United States Patent Application Publication US 2022/0290142 A1 - sequence listing, part 17

SEQ ID NO: 15441 - DNA, 79101 bp, Homo sapiens
gacggaggtgcctgtttacccgcgccggactcaccgccgccgccgccgcgggatccgagtgcgggcgcgggcgcgggcgctcccggcgagccacggtgagtgtcaggccggcggcggccagcgacgcgatcccgcgcaccccgtcgggggccgttagcaccctcgcgggcgctgcgcccctgccgccgccccgggggcaacccggccgccgaagaaccctgcccgacgtgcccgctgccggccttaaagggcccgtgaccgctccctgcccccacccgggccgtggggaggctgcgccccttaaaggcgccgcgcccgtccgcccccatcctcctcgcgggggctgccgctgcgggctagggcaggcagaggtgctgcaggagcccttaaaggggccgggaaagtgttcgctggagtacccaccgcccttccgcgggcatcgctacctggcggggggagggggcagctagctgcctcttaaagggatagctctgcccttgggggcagtgactcggccgaagaggactcctagatgtgtccccgggagcttcggggatccccgaggggaccatgcctggtggctgcccctcaagggcgttgggcgaacggtgccgcgtctgcccttcctccccgcttcacttccctttcgggagcccgcgaggctgggtgggggcggggagggcgtctccgtcgggcttggggagtccaagtccgcccgccccttcggccctgtagccagggctggcgctgcacccgggaatccccggccggcacggggccgaccccagcctgcgaactttcgtggggcctgtgccgtccaggtcctgggcggccctcaaggatgccccgtgggtctgcgggcaggtgcgcgtcggcctggggatgtcgcccggagcccgggtgcgggccggccttggagtcccagagctccgcggagggcgcagcgagcctggctccagctccgggtttgacagatgtcagggaagaaaaggttcccgctcggctattgccgggcgttgacatcccagagagcttcccgtttgcttggaagaagacgaggaaggtagaggtgaacgtcgaccttgtggggcgcatgttagcctccccgaggggtcgcgagagccggcagcggggtgagctcaggtgcccgccggcaggagctggggagggaaggggagtgctggacaccggcgcctgctgtcaagttctcgccggccggtgagagacccgctgccgccgcgcaccccgcacctcctgacccctctcccctctccgcctcggccccttcccggtcacctagcgttgttttggcgctttggcgcttgcggtctcttccttcttccaccgctactcctcagcgaggaattattagccaagttttctcacccagcttccaaaaatcagattccgtatttgtgaacaagcttttcttgacactacccgtatacccgtatttccagcatcgtcgttttattaaacatccataaaagctgccccttagatgcattcatttcccacgacacctgcttgcttgtcatttgtccttctgacatctgctgttgttcacccctttaatctattattaaatgacaactattattttaattcttctggtctcattgatatccggatctgtgaatttgggttggtggagtttttaattaatgtacccgttgaatcatgagcttaaaataatcattgctgctcctgagcagttttgaataatatcatgctctctctgcttgcaagacttaaaaaaattcgctggtgttatatttgatttccatatcaatggaattcccaaatatttttgaaaatacaaaattcagtctttcagtccatgttttgttactcagatcattttactgataagtctttaacgcagcttatagaacatatttagaaggtttggaaatttcctggacaggatttgaaattgcctgtatcatctgaagctggttctgtagaagcattttggttttgattgtagatgcagccagtgaatgataacaataagttaaaactgtagttaaatttgttctttattcaaccctctgaagaacgaacagatctggtagaaaagcactaacctgggagttaggagctggacatcctggttctagtttaggcttgggctctcatggccgttccagtcggggcaagttattaaagatttctaggttgtgtttgcctctgatggaaagtaagacggttgaactaggtgatctcaaaggttcctctcttttgaagttctgtaagtctctaaatatttaatacatttgaattcaggttggtatttacctcctggcacctccagaatatctgagctgaagccctattttcataagaaagttaagcagatcaacagatggtgttttgaagaatccatttcaaatgatttataaaatgatgactacttacgagtttgtctgctatttgcagaagaggtttgcatgccacagggcaggaaaaggaagtggccatgttttcagatttatcccttcacaccaacaatctctgtggaatttatatgctaaaagatggagaagcaccatagaaagatttggctgtattaacaaaactgcatatgaaaaggtaaaaactagatagttaatatctctctttggtgtaagggttataatgtatctgagctttctttgtgatttcatcatcaactctcactgtggtaggaaaatcaatattaaataaacagtttcagccccgtgattacatgcagtgattttaggaagcatcatgataactaaagtaggtacttgcagggaagtaaaatatcctttctagaccttgaggtttcgttgggagctagggacacaggcatgttatccttctccacagtcttttttcattgtcaccttatcacaagactcagatttatcccaaatacccaccttgtcttttcttctccctctcatgaaataagacctgctctgactcaaccccctcagcatctcttacttcccacccaaaatgtcctgtctctatccccatcgtcccctcatctcctcccaattcagagaaagcaagtggacctctcctctgttccttttcttggcctctcaccatgggcaagtgcctgggctctggtggcagaagaatccatggctcaggtttgggctttgtggtcttggatgtgtgcttgactcctctgacctcaggtttctcctcttggtgtaatggcagtgcctgcctcgtggagtctgtgtgaggattaagggagatggtgcatgtaaaaggcctggcacacaggaagcctttcctttgtgccagctgccattccttctcacctctacccgggtcctatcactagaatattatttgtgctgtttgtccttagtctcccctgccccaccctgaaaaccttaggcttgacttaggagaggaaggatggaagaggcagagtcagacttgtggtgagcctgctgtgtaccaggcaatttacatgtgtctttacttggtaccctgggttcgtaagcctctctttcctccctcctgccagcctcccccactctcccatctcctgctccattcttagtacctgccctctggcttctctcgctaccacctttctttatatttcttctcaaagttttctccaaaactttgtcgtgagttcctggggcccatctgcccatccttattcctgagtggttgttcttggcccctttgcagtatttcttttatttttttaaacatggtctcagtcttgcctggttggagtgcagtggtgcaatcgtggctcactgcagcctcccaagtctcaggtaatcctcctgcctcagcctccagagtagctgagcctacagacacgtgccatcacacctggctcatttttgtatttttattagagatggagttttgccatgttgcccaggctggtctcaaactcctgggctcaagtgacccacctgcactggcctcccaaagtgctgggattacaggcgtgagtcactgtgctcagcccctttgaagcttttacctcacttgttttttgtcctttgaaatcctttcctctctcagcctttgggtcatgctggtttcttgattctcttcctgcacccctgtaaagataaatgtctgtcctagcttctgctattcacactgtccgtggcctggggtcccctctctagccctgacctgtctctcctgtgttctgctagcaggtccgttgtggacatgaatggcagcctgtaatctgcatttgtggtctcggagttacaggtttgcagactgcttgcaagcactgtcacattgagtcctcatgacacactggagcctacatcccttcattccccaggctgtcctaaaaggcagtttggttgggtagtttagcatacagactctggagccagatttcacatcctaagtattccctactggcttcgtgacttgtggtcaattttcttttgctctctatgccttggtgtcctcatctataaaactgggatcatagtagcccctacatcagagagttgaggtgtggattaaatgagttaaagcattggaaaaagtgtgccagtctattcatggcacattgcaaacactcagtgaatgttgctgtcagtcttgctgctcttcgttgccttgccggggtgccttggcctggtttgtagtggtctccacattcagcctgcctgtctgccagaccttgccatgtgcctggacactgtagtcaagctgaggggctgtccattccctgtaccagcccttggcccagtccatccctcaattttcacgtgtccaaatcctcctctgcttttaggacccagggccttggtcctgcagcactatttcttcattttgttttccttcctccccacacctggcagcaatgtccacattgatttttctccaattctcttaggttctgctgcattccatattgtgttgggctgtctctgaaaatatctcacctgctcgctcagcctgagcattctgggagaagtttatcttgctttttccaaaatgacaggcacagggagcctttaggccatggttgtccaatgcacattgatcttgtggaggaggagatgggatggggtgggcactcagggacggagcaggtggagggaacaggatgcacactgcatagaggtgggggtgcaacagggccataagtggacatggccgtaagtacttaggtctgcatggaaggagggtttgaattggggacttaacctcagggggagataagattggataaggtttagtcatctttgctgcaggggaacgttgagtactggcatgtaatggagagtggtttttaccttagtatgtgctgtccttttaaatagtgtaaactaattctttatctagcctggttaaagaaggggatggctggtctgcctaatttaatatttggctattgctctacccactgggttttgtgcatatactgaatgaagcattggcttgtatttattccttcaatcactgtttgaaatgtctgacctgggcaagttaattagcttctctgagtgcaaaataggaataataattattacgataatagcagctaacatttattgaacactttctatgtgccagcacatatgtgagtcacctttgcttattaactcatttaaaccccataacaactacatgaggcaggtactattatccttacttcacaaatgaggtggttttataaactgcccaaggtcactcagctgttatggcttggggcagaatttgtgctggtgaactccagagtctgccctgtaacaccctagtagattcctactgggaggaaacaccccgttatatcccttacctcactcagccgcaccatgccaggagcctagtaggctgacagcaattgggaaccagtcttattgttgacaaacatggtatgagcctcttttagagcggagctgcctgaaaccctccgcataagggatgcggacctggatgctacctgagcagcagctccaggggcttgtgaacattctcctcacatcctgttatgcatggctgtctctctggcctccccctgctttctctgcagcattgctctgacccaggccccctgtggctcagccagctcctccccaggcagctccttgtgtgagatgaaccttttaacataactcactaaccccacctcccaccctcatctagccatctgcagagctcctcactggggaggggaccttttcaaaggtccctcaccttcgtccttttctccctgaagaccaacgtccacaactttggtatatccacagtgttggggtgtgtgtgtgtgtgtgtgtgtgtgtgtgtgtgtatatatatgtgtgtgtgtatatatatatatatgtgtatatatatatatgtgtgtatatatatatatgtgtatatatatatatgtgtgtatatatatatgtgtatatatatatatatgtgtgtgtatatatatatatatatatatatatatatatatttttttttttaatgccagttgttccccaaatacatttagatagtaagggacacattgttttatgtcaagaacctgttacataaaaatgtgttatataatgttcaaatatatactgcacagtgaaattagataccactttttttttttcaaagaataaaaggataataaacacaggccgtcctgaatataattaacctcagatttgggaggcatggaaggacgtgccctgccctcagagctctcgtcctgagctctgcctttcttgagtgcgccgggagcaggatggatgggaagttggcctgaatctgccatggtgtggtactgtgagatgctctggaaattgtcttttttttttggcggggggtgggggatgccttcgcatcttgctcacttgtatctttctcacacctaagcagagggaagaagctctttttgccccctcgtacttagaccacccaggtcatcttttgaccagttttctgctctgctcaactcctttcaatcttcccagatgacaggccagctttgcctgctaagaacagccctggtgccagtggcatgcaggtggcacccctgtgtccagtcttccaggctctccagggtctggtcctgttcctcctccccagccctgcttccccgctcaacctccattcccagccacagccctgtgcccgaggttcagtcctccttgcctctccgctgtcctccctaggccacctcacttcacactctccctctggctagcggggtctttgcttaaattgttcccttgaggcctctcttccttgcccgtgcctgccttggatctcacttctctgtgaggtacctctgataacatttgttccctttgtgtgtgctctcccttttgctcttgattgccaaccattcattcgttcagaagcaggggtatgtcataatgagcaaattaccatatcatactgaatcaggatggccagttgtctcattttttaattgtttcatggttaattatcttacgctcacttcccactctccagtttcactcagttactccgtcagtgaagtttattggatgcctagcactgttgtgggcactgaggatacagcagtgaacaaaacaaggggcccgcaggaggggacagatgatgaatagtgaaacacgttcatgccttgttgtgagaagtgctaggagtgctaggatagcaagcaaatagagtaaagcagtagcgatgaggtatggtgggagggagggtaccttatctagatcacaggggagacctctctgaggaggtgacatttgaacttagcttcagaaagatctgggggaaagtatcccaggaagagagaacagcacatgtaaaggccctggggttgaaaggtgcttgatatttttgaggaaagtaaaggctagtgtgactcgattatgagctgcttgtgtacagatgttttctgcctcttttatactccctttaaccctgagcccagtgttaggaaggccttgtaaatacttacatacagaattatagcatttgtcattggttatatattataaaatagtaattttataaaataataatttatcataccctgcttagaaggcttttaataaaacattatattgcatataaacaaattaagggtttgaagggttttcttataaatgcactcctagcatgtttcaccaaatattactgttttaattgtgtttagtgcagaactttagacctcataattctgcttcatgtgcacaaccatcttaaaaacaggttttgttccaaaagtttatttgtaaggcactaggtggaaacttgggataaatttttctataagaaacaatgaagtaaatagtgatgtagtttctaggcgagccctcaaaagctatttagtggtgactgtagctgaaaacatactggttggtatcagcagtcgtcaagccttctgctggtagaccctcctctcagtagcattgtacctcatttgctgttagcaatcataggacccatttacctcagtcacttctcctactgtattttcagtctgttaaagttttatagaagggattttttacctttatacctttaagatttggttgcatgtgttataaatgagacagtagtgcagagagtggggaaaactctggactgggagctgggagaggcctgggctccagactgggcccagccactgactggctgagtaaatttgagtaagttatcctctttgaactttgatttctcaggttcttcttggctgtaaaatcctattgttttctcaccatagcagggaaacgtagatatacttcgttgttcaaacctgccctcaaatggctgcctctgatttcttcttgaagaagtatatggcactcagcaatgaggaactcaagcagttccccatgtgcagagctctgcagtgacattctcagtaggaaccttgattttgatctgctatctttcttgatgagttgaaagaaattttgtcccagaacttttggtccagataagatttctgtgttcttggccaacttatcttccatataattatgtaaattgttttttctttttaactcttagggataaaaatggtgactctggcttgcctgcttataaaatatagttataagtgcccttagggaatggaatgagtttgcaggagagagcagagctgaaagagtgtgggatcaaaaacaactttaaatgttaaatgcaaagctattttcagtaccctgctggaagaaaaaatttttttcaaggttttagaggatagaagaggtttttgctccaaagaagaaaggaacctaaggttttgcagtggtgaaaagtacctgatcctttaaccaactaccaccctcccttcccacctctgagttttgttttcgacatcatgaaccacatttgccatttgagaggtttgatatttaagtgacgttagtggcagagctcaactggcagtgttcaaatgacttaggtgcagagtgctgtgctgcaaacttccccagtgcattctagggtaagggatgcctcatagagagtgacagagcacttttagctctgcctctatttggtcagttgtgaatggtgtgttcctttttttccttacttgaaggcatagcgaggagttggtacaagaagttattgcttcatggacttcactttggagctagagggtggcattagacctagcctgccttcttggatgctggaataccagtggcaatgtcatctcttgttctctgctatacccctagcaatgaaaacagtgtctgtacagaaaagtctctcaataaatacttgtttattccttcaaaaagtgaattcagctttggataaatttttaatttcctccactctctagcagtataggcttatgaggttggtcttgcaaggtactttggagtttaggttgccatttctttttgacatctgtgtttttcttattcttcaggttggtcaggtatcagtgtcttttactgatgatggttgtccctgccctgctgatgttcatcttctgttatctttaattggctccaaactgcagcaaatctatagctgagccacattaactaaaagaaaacttgttgcatatttatttaggcatagtactacacatgtatttattcagtcaacaaatatctgtgagtctatatgccaagaatgttactagacccaaaggaagagcagaaattgttgttgtgaccaaggagcctgcagtttgattgccttgtggaacatctttatgagcattgtagaagggaggaggcttcatagaactggtcaggttttcacctttaaggatggtaggatttcgattcacagacaaggtgaggacaggtatttccaggaagtggctgagcggaaacagcataattaaaaacacagaagtaggaatggaccagtttgcattcatggacacagacttgtctaaaatggaaggttcttaaataatggtgggaatttaagtatggaagatcactgaaggcccaaacctgaagccattttagacacctagtgacttgcctaaagtgacagctgataagtggtagatccaggcttaaaataaggccatgggagctctcgaccactggcactggacttggctgtttcccagcagtctctagatgcaggatttgggtttgattggggattttcttttttctttctttctttctttctttttttttcttttttttttttttgtgatggacactgagattgggggttttagagtcatgagctggaaataggcaaggctctatttagcccactctttcattttgcagttggggaaactcagtgaggttaagtggcaagtcggagtttacctagtgagtcagagactgctaggcaatggataaccactggatttgttttattatgattatgattttagtgacatgaaatatttctctctaaagcatcagtccagtgttagtgttccagttggattggagcaatgaaggactaaatgcagcagagacctgacaggaggctgctagatgaatccaggaaggagagagagaagccagaactgagaattaattgtcaattatgttaatcagcatggtgttatcagtcaccctttagatttctagagtgcggtgaacatctgcctgtgtgagtggctttcaagtgtgtgaatctgcactgtactgtgaccaagataccttaatgaattctccagacagaaagtgccactatggaagtcgaatgttttaaaacaaatgcccacattttctggaaagagcaccagattaggagtcagatgacctgcattttaggctgcttctgctgcttagtcaccatatagccaaagcaaatcacttaatgtctcaaactgagcctgactccttatctgtggaacaggtataacaattcctgttgagcccttttcagtgtatgtgtgatgcttgtgtgagctaaggaaagaataggcattttgaagctgtaaagttgctttctggctgcagggagcagcagtgcagttttaatagtgaagatgtactggcccttacaggaatagcctaggagaaccagaagaaagttcccctacctccagggcatgtttagggaatctggcgctgtccaccaggtgggtgctgatgtgtactactttattggatagggccatgttttttgtttatttgtttgtttttattatactttaagttctagggtacatgtgcacaacacacaggtttgttacataggtatacatgtgccatgttggtttgctgcacccattaactcatcatttacattaggtatatctcctaatgctatccctctcccagccccccagcccctgacaggccccggagtgtgatgttccccgccccgtgtccaagtgttctcattgttcagttcccacctataagtgagaacatgcggtgtttggttttctgtccttgtgatagtttgctcagaatgatggtttctagcttcatccatgtccctgcaaagaacatgaactcatccttttttatggctgcatagtattccatggtacatgtgtgccacattttcttaatccagtctgtcattgatggacatttgggttggttccaagtctttgctattgtgaatagtgccacaataaacatacatatgcatgtgtctttatagtagcatgatttataatcctttgggtatatacccagtaatgggatcactgggtcaaatgatatttctagttctagatccttgaggaatctccacactgtattccacaatgattgaactagtttacactcccaccaacagtgtaaaagcattcctatttctccacatcctctccagcatctgttgtttcctgactttttaatgatcaccattctaactggtgtgagatggtatctcattttggttttgatttgcatttctctgatgaccagtgatgatgagcatttttttcatgtgtctgttggctgcataaatgtcttcttttgagaaatgtctgttcatatcctttgggatagggccatgttttaaagatgattacatttcacccccgtaagcctgggcatggacggaaaagttaggcatggatagccatgtgaatctattatctgtagacacctttcaggatagtgacaggcagctgtgaaccagaaaaacaagtgtcagaatctagccagctggccagtctggcattcttggatgtttcatctgtcctggggcattaggcagcgatccagaggaaccttgattagcctgggggattcatggctgagccagcatgctgtccaggtaatacctggctgcaaagcctgactggagatctgccaaatctaaatttctgccagcattacaagtgtatatattattattattattattattattattattattaatagcagtatctaaccttgactacctaccatatgccagcaactgtgctaagtgcttacatactttttctcattcagtcttcacagtattcatataaggtgggtaatgtcagttctgttttctagttagagagactgaaactcagacgagcttcagctgatacatactaagtgtaaaagccatgattcaaactcagaacagtctcagtccagtgcccagctgcataactgctatgttcttctttctctcttttcctggtacctgaaaatacttcttgtctctggttttgaggtttctgactgtgttattggttgatggatgggttgccacacagaggctcagctcagcacagctcttttttcttcatagcttatgacggacatcctcctggatactctggctggtgagcaaatgggtgccagtggtgaatgcagcagaaagactaactcttgccagctagtgcatgtgggtgaattttaaagacaacaaaagaaatttctgtaggtcagtttttcaaagagtaactggtagcttgtagtctacttaaaggccaagtttgatgttcatcaaagtcaccctgtaaaaacctttccaaatgctgtgattctgataacaataccatagaacattcctgtgtaattgacaagtagtttttacatacaatgtcttgtttagtcatcatcacaaccctatgagggtttgcaactacatatagttgcaaagaagactgggagatatctttagttgggaagccatgagtctagcaaaatctctgtttttaagggtggcgaggggagtgaatgaggggagctagcaatctgatgtgttgtggtggtgatggaagggataagtagagtttgaagctgttgtcagtagagttgggaggatgcctcctagtctatgacatctcctagtgttatgacatctcctcttgtggactgggaaattgcttagagtttaagcaactgtccagggttctacaactggtcagcggcagaggcagcacttaagtattgcttttgtgacttaattcactctctattcaagtttcatctttgctttctctattgaagttcttaaatattctgattcactgtatttagaagtcggcaggaattattaaagtgaacttctttgtggtatacactgttactgaatcagagtaaataaaaggtcacatgattggttgttgtgttaggtttaattgacgtgtactctgtatgatacagaatactcacatatcttttgtgggatatcattggtccaacagctttaaaaatcccaaggctttaatagatgataaaacacggagtttgtgtaatttcttgaaaaagttggccatcgagttcttggtcaggaacacaagcttcaattgtaacagtttccatggagacattagccttggcttgcatcatttcagctttcagtgcctttcctaggaatggagtgaactgctaaaagaagagctctggttgtggttgtcacttagagctctctcccctactgtttctgctggaggctgatttgcttttctgggtcttctcagttttttctgtgacctaagcataaattgtctttgagatcctggtaatctcatattttaaaagttttccacaaaagacaactgaatggaacacttttttttttcacccctttaaagtatttaattggccatcaacggtggctcacgcctgtaatcccagcactttgggaggtcgaggcaggcagatcacgaggtcaggagatcgagaccatcctgctagcacggtgaaaccccgtctctactaaaaatacaaaaaaaaaattacctgggcgtagtggcgggcgcctgtaatcccagctcctcgggaggctgaggcaggagaatggcgtgaacctggggggcggagcttgcagtgagccgagatcgcgccactgcactccagcctgggcgacagagcgagactccatctcaaaaaaaaaaaaataaaataaaatgaaaaataaagtatttaattggtggcaaggggctttgctagaagaatggacacctggtctcactcaagcttcttgtattagttgggataccaggtgagtccctctgttaaagagacccacaggcacaatggctgaaaccaggtagaagttttctctctcatgtactagtccctagtagatagtggtccaggcctagtatttttaacacatggcttccatttgatggttgaaggtaaaaacttaccatctcccagaggaaacacccaagggggcacacatccagtcatttttaagggaaagacccggaagcagcacattctctttttccagtagccggaatttgcaactacatatagttgcaaagaagactgggagatatctttagttgggaagcaatgagtctagcaaaatctctgtttttaagggtggcaaggggactgaatgaggaaagctagcggtctgctgtgttgtggtggcgatggaagggataagtagagtttgaagctgttgtcagtagagttgggaagatgcctgagtcaagggtgagaatctaagcaggcacacagaaaccagggcatgtgcagccatctagaggtcagggaagctcttggctctgaaactaagcagtggggggcacccaggcatggaagggaatgtgaattactcagaagacattaggttgtcagtaaaaggaaattcaccagtgtgactgaatcagtagaaagagcacttagactaggagtcagaagacctaggtttgagtccagcccttttacttcataacctggggcaaaaaactcccataaatatttgctttattatttagataatggcaataacagtgatggcctttcctgcctcccaggcttagtgtgagaccaaagggtgaggaagtactgtgtagactgcagccccatggagatgtgcacagtgtctgcccagcccagggcctgccatgggtgtatttgttgaatgaagtgtgaactattaaaagagttgggaaaaatgcattatactaaggagatcttaatcctggacagtcttctctaccaggcagaaaggttctgctctccactggtcaaggccttgggcctatgtgtaaaactgggtacctaacaaacacatgggcagacgcctgcagctccttactgggtagcacatgacacatagtatgtccttggcaaggccatttgctcattcctctgtgtaggtaaccaagtgcaacagaagtggaggtatagcccatgaatgtgaactaatcatttttaaatgatttggtccatgggcaggttagaagatgaaaccttcccaaggccaccaaaacttgatttcttgcttgaaaatgataagatgcagttataaaatgcttctgttgatttggaaaaaatgtgtgacttgttcaaaacaatatgtattaatagaaaatgtaacataaataagaggatacaaaaaagagcttaatgtttctatcttctgggcctagcaatagtgatttttttttccttttggtaggaaaatgggggctcagtggaataatcagttttatttctttttcttttaacttcatgaagggtttgtattgttcattttgttatttaatttgttcatttgctaaggaaagaacttctttcttggaactctgcggagtgtttttagatggactttactggaaaaaaacaggaattgaaattatattcacagtgcgctctaaactcttttaaaatctcatgcatggatggaggaaaatgcactgaaatatcaatagtggttctcacctcatggaattagaggtgacttttattctcatctccttctctgtggtttcctatttttcaacgagtgtgaattacttttatcatcatgaaagaccagttaaaaattaatctcacaaattaacactctcaagccaaaccacgaatttttgtttttcacaacctggcttggactataaactgtcacactatctcagacctatgcagattcttttctgagtgaggcattgaggaacttgttataaagatgatgctttccttctggaaatcaagaaacaagccaagggcttataatgtgttaggaaagatgtcctgagtaactttcctcctggaatctgactagcctttattacagctacttaaggaaatgagttttgtgggttccctgttcactgtgtcaccatttttttctttatcctgtactcatatgtacctcagggtccccagattttcttatcctgggattgcatgaccttgtccttggctctctcgggcccctgccgtttccagtgttctctgttcatgttcacaatattgttgatttggctgtggcttcttcccgcagtgttcttgtagactgaagagagcacattgctgcccttgtccctgtgcagcttcctcttcctctttatcattgctcaggtgagtggcctgagcagtgctcctgggatgaggtgaagagaagcagtcaagactgcagggaagggctaggggtgctgagctggccgagcttccctgggggaaggcactgggccatctgtccagcagcagttggcccacagctggcagggcaggctcaggagtggctcttgaagatggctgcttggtgtttgaagacagttcccagggcatgcattcatttgttgagcaccttcaatctggcagcctgtgttctagatgctggctgatgaccaaggctgacatggctttggctgtcatgggagtttcattctagtggtagagggagagagagagagacgatgtggtagagggagagagagagagacgattagcaggggaatcaatgaagaagataattacaggttgtaagaacagccccagaggaggttacaggtgcctgtttgtcgagaagtgggagggccagagttgggataggaacctatgtccctgattgcaaggtctggctccttctgtgtcctctgggctttctggtgggaagggaggaggtggaggagaccccttgcgagggccgagcttctcccattcagccagtctggaccagcctggggccttcagatggagatagcaaaagttgagggcataagctagggactggctctcttggtcactccagttgcccatctctgtacttccccaggtgaatagccatgttttttaaagaacacggagcaaatttgcatacaagagtccagatttatgcatgctgcagctttgtctgaaggcaagcttatattttctctcctattattttcaacttttaatgagttaccagcatctcagtgcccctccagcaaggatattgggctggtgttttcagggaacaattttaattaactcctccttgcctccctctcacccagccacccccagtccccttcctggtggctcagagtctggctttggcatgcaataagaatatttttgccttggtgttagcctttctgaaactcttgattaccagtgctcacaggacctttctgcagcactgtctgcttggctgtggactacccagaggagcttggtgtcaggcaaacttaggcgatttccctgagcatccttgttgagtctgcctttgtacttctttgtcaggtctagaggcttggccgtttgtcctgctcttttgtcccctccttctgggaaccctcaggaccctcactccatggagactcagcacccttcctcctgcaaacatcagtgatggggctttcccagccctttcccctatcttccttttcaaagaacaaagcctttgaagcttgtctcatacctgtctgatgcagtatgggaatctgtaagttctttgcctcctgaaggggtctggggaatcacttggctttcagagctttcctcgctcctctcccacccacagaccgattttaaccagagagtaagtcattcatgctgtgcttgaatactccttccagtcccactaggaagactctttgttactaaattctgttttcttgggaaaggggagcttattactatctcattttgttggttgttattaccctcctttaaaaatgtatctacatacacgcatgtgtgtacctacatgtttctatatttcccttgtgaatgtggccctcagagggcctggatttaaaccctgggagtggtagtgaccctttgggaaatgtatactttttgttccaaatcttctctggcttaaatttgtgaagttttgtttcagccttggtttcatagtttttcccagtttccaagataagtttggggctcactgtaatcagcatgtaaaggagaatatggccatcagctctgccccttaaattcatagtcagactcagtggggaagccgttcctgtcccatcttgcgctcgtggctctgtcagcctcaggcagctcctgcaccgtcctcctgcctgtgacagtgttgtcaggagttcttggtacctgggtgctgcttggcctcagggtgccagggctcccatgtggagtgtgcttgctgcagtctctacagcccaggtgtctctgcagccctcctcttacatagccacagcgtggtaaagtacatccagtttgcgctgtagtaagcaattttattaaaaaaataagtttaatatgtaagtggtcccttagttcgtttgaatggctcccctctctggctttggtttgaatgagctacacctggctggagccctgctgctcccctcagcatggagtcacctccctgtgctatggaggaaaggaagaagttattcttaccttggttttgagacaagacaagcctggagaaggctgtagggatgaaggagttgcccatttgtccagcatcagttgagagtctactgtgtgcctggcatcataggaagcctctggagtgctgtgagcaagaaaataatacttgatttatgtttttaagggttcttctcgctgcctgtgggccggcagtgaggaggacaagagcgcagcagggagatgggttaggaggcagttgctccggtgcagggagcagtgccagcttgagggctgctggtgggtattggtgtgagggtgggcaggctgcagataggccttcgcccattgcccttgccatgtgtccccatgtgtccccaggggaggctctgggcatcccaaactgtgagcctgccctttcccaagtgtgctaggccctgccaagctcctgcttcatggcctatgctgttcattccatctggaatgctctcttccccctgctttccatcctagctgagtgacattgggcaagtgaccagatctctcttgagcctcaatctcttattctgtgaaagagtgctcatggaacctactgcatgggaccatgaggataagactatagttgagtgtggtgattgcagtagcctccaaagctgtctcctgcttccaatttcatcccgctactgtgcattctttacacagcgatcctgtgaccgagggtcagatcagggcaggcctctgctcagaatcctctccacagtagcttcctgtcccagtcagaggaaaagccaaatcttagcatggccctcagagcttcctggtacttctgacctcatctcccaccccaaggccatggtgtatggttgatcatgctgggttctgcacagctcattgtggtgcatgtaagtggcactcacttcctccccaacttatgcattgcacaacttgtgcagctgtacatgctgctcctacctgcgcctctctagctccactccagccacagtggaatccgtgttgttcttcaaacacaccaggcatgcttcctgtttaagctctccctactgcctgctcccttggcctggaccattcttcccccagaggtgtgtatggctagttagctcaccttcttcaggtcttttttcaaatgtcaccctatttaaaattgttccatctgggtcactgccccccaaatgttccctttttcccttgctctttatttttcctcctagcacttatcaccatctaatatattatacgttttccttatttatttggtttatttttatttatttatttatttctcaacagaacataagcttgatgcaggcaggcaccagtgttaattttgttcactgctgtatccccagtgcctggattggtgcctggcagtaggggttcagtgatgcatgagtgaatgagtttggatgcacaaaggtaaagtattgggtacggtgcttagcacactggaagcacctaatacatggatgccagtattttcattgtctctgttaactctccaggccctggctcaaatgtggctttctctgagcctttctgcagtcccttctcaggctgaattaagtcaccaccacctgtgctctgtgttccccttcattttgccttctctgtctgctcggcatttatcacactgcagtagtgggcttatctcacactttttcctgttccaattgcaattcctgtggggcaaagactggcctgttcagatttgtatctcaggcggtctgcgcccccagctggcatgtggtaggagcttaggaagtgcttgctgctggtggctgtgggaggtggaaagagctttttaatccatcaggacccttacaagggggactggctccagcatcactgccgtctgatgtttgtgccccctcccaaggggtgtcaagggagagcttggcaaccacttaaatgagagtctccagtggtatatttagagcaaattttggagagaggagtctcttggataacagcatctgggtgacctgattgtttcacatataagagtttggctttttggctactcaggctttgagaggttggggtcattcaagggaggcagtgtaatacccatgtgttcagaggtggctgggacgagagggtgcaggagaaaaggcttgagctggcctgtaagggatctgagttggtgaagggagcacagcttctgggggtggcagaaggaataggagagctgcccctgccatacctggggaggggtggttaggtaggtgccttgggaggcatggttaggtaggtggtttggggccatggggggaaaactgtaatgccagggcaattactttggcctcttgtatttggcaggaggggtccacactggggattgtggtggcgtgagggagagggccctgggagagaagctctagagtcattttcttttccagaggtggagttgtcttggggacctgcacgtggcacgcagagcccatgctctcaggcacctttggggtggcagagtttcaactgaaccaacagaggacaaggggctgagaagtcggaggccttggctgaggtgcccagtttcttggttcactttctttacctgccaggttagcagcaagtgagcaaatccctcctgcctttgctcagcattagcctcagagacttgaggagagctgggccttcaggtgggagcctggtggccacactggagaggaccaagcttgacattgagtgtccgaggggctgaaagttgttcgctcatccagagatggattcgttctgcaaacatagggaaagttcccttcccattcctcatggctgtttgaggatggaattcctgcattgaccttggcctttccctgatcttggcctttcccctgcactatggcctctctactcttaacattacgccccagcccttttccatgggcccctcgtcttccctatggccatctaaaatggccgtataatattctatcaagggaatgttttcagtaagccatgagcttgatatggagcatttagattgcttctaatttttgctctttcagctaatgctacattaagccatctctgtgtattatggaatcatttcattagttggcatttgtctagctaatggcaatggcccaagatttaatagcgaatcagaatttcttttttcaagaagaatgtcatgaggatatataaaaaatttacttaaaatgctaggaatcatctatgttggggttttcatgaatgaggaagcagggaaacagtaacatgaaattagttgtaagtgaaagactgtgtgtataaaagtaactcgtgacttgtttgttcctgagtgtggaggggagccaataaatccttggaaggagcaatctacctgtgaaaatcaaagagatctgtattcctgcatctgatgaaaacataacaaacagtgatctcttcttaaggatatttttagaaatgccctaaaacaagaaaaagtaaataagatttccgagaaaaaacatgtctccttaattccaaatgagcctctctggaaatgccatttagtagtggaagcaggttgtagacttgctgaaaggatttggttctttggttattaggaaataactagaatgaaattgacaaacagacaacactgacttggtccccagtactgctttgagcctgaggtatgtgttggctttggaatgatggggaaggcttcctctgacttgctgatttgttgtagttgttgttgttattgttttgagatggagtctcgttctgtcaccaggctggagtgcagtggcgtgatcttggctcactgcaacttctgactacctgattcaagcgattctcctacctctgcctcccgagaggtgggattataggcacgtgccaccacacccagttaatttttgtattttcagtagaaatggggtttcaccatgttggccaggatggtctcaatctcctgacctcatgatctacctgcctcggcctcccaaagtgttgggattacaggcatgagccactgcgcctggtctgttgttgtttttattgtttcagtctctggtggcttattatgtagacttgggctgtaagctttgcatttcagtttaaaccagcaaatgtttacactatataaggttgcaagggctaaaactttagggagaaagaacccagtgcacccctgtttctgagaagctcatgaccagggagtgggaaggataaagcaatgttaaaaccaatggttattcaagggagattaagaagggggccctgggagagtcagctccatccttttagagaagggaggagttctacctcactgctgggcagggtggggctaaggggcaggagaatcaagaaaggttttatggaactagttgcatttgtcaacatcttgaaggacaggctgaaatggaggctggacattctcagcaaaggtaaaaggcctgagtagaggagatggagatggaaggacatggggcaatgtttgggatttggctgaagaattgcatgcctgtagtaatggtcatagtagcactttatggagagtatcaggtgccaggcatggttctaagagctttatatgtagtaactcacttaatccatgcaatgaaccaaatgaggtactgttattatccccattttacagatgaggaagctaagataaatagcaaggaattaattgcccaggatcacactgctgtggagccaagatcagaccaagttcatctggctccaggctctgtgcttacgaccatgaagctgtcctgtctctgatttggggaaagaacagtcactagaatcagacagatggacagatgccgtatgtttagaggctgggattatcaacattcaggaatgcagaggtggaaaagagaccagagatggagatgaggggcattggagaggtggggatgggaggagggtttggtgagagccgtgaagggccacaggaagacagagctttaaggagaagtttgtcagtgaggcccagagctgcagacaatcccaggaggtgagacctgaggaataggtctgggctgaggagaaagctgtgagggcctcgggagaggggcagcagggtgacccaggctggagctgctgtggtgtcctatcctggctgcagagtgctgcgtgttcctgggggatcatagctgttgatgagtatcactgtccctgtcctcttatctgtagaaagaggtgagtgtgacagagggggcaggtgagagctggcactgctaatttggcaaacctggtgacttttctgcagcctaatgatttttgaaagctgtttgctatgctgaggcacaagtgtgacttcccccatctaaatgctgtgcaatcgctattttccctggaaaattgggcccatgtgggctctgtgtgtggtttatttgagttccatttttatagccttattaccttgtccccatgatgcaagaggcctctctcttttcttgagctttgctgtgaaaattgtttcttaaaaggcacaaagtgatctctcgtcatctgggtggtgctcgctccacaagcagcacttttctcagactccgcacacacttgtcatcgcccctgcccccacttggcaggttcctctgattgttggcaatttactgagaacttttaggcagctcttgaagctcactacctatgtgtttgtcttgatttcttccggaagagtttgtgcatgtaaatatccattcagcctctttctctccgagatgttgccctgccactgaccgtgcttggggctgaaacccagtcttgtcctctggcctcgagctgattaacaatagcagtcatcatgtacagagcctgagtggttatcaggcactaagctaagggatttacgttcgtgatcttaattattcccaatttctttgaggtaggtactattacttcccccattttacagataaagaaaatgagccttcaagggatagagtaagttaccccaggttacatagctagtacatggcagagctgggcttaagcgggcctttctaaccttagactccatgtgctccattcattcattcattggcaacaaatgattgtctgcaacaggctgagaactgttgtagacccagggtgtacagcaaagggaaaaaaggccaaactcccaccttcagcttatattctaacttggggaggtagagatcatataataaatgacatatacattatgctatgtggtaatgagaactatggagaaaaatgaagcaaggaggtcagatgggaagtgggaggattttgaggagtggtcaaagaaggcctcattgagagtacaacaaattgttaggttaacaaacaaacccccaaatctcagtgtagcaacacaacaaaactgcacttctctgcagaaaaaattccaaagtggctgctcctggttagcaggcagccttccttgcagtcatccagggacctagactccttttatcctgtgtctctgccttcttcaagggccttggtttcctttgcattcaaatgctggagcgtgaggaagaagaagagagggtagtttgtgaggaaggctttatggaccagtctggaggaagcatacctccctcccacccactggccagaattcagtcacatgttcactcctgactgcaagggaggctgggaaaggaagtctggccatgtgccgcctaaaaaaaggaagtgggttctggtgaactcatggcatggtgtgttgcagcgagtgaggtgaagaagtgagctatgtgtttagctggaggaagagcattttacacaaaaggagcagcaagacaaaggctgctggaatggagtggggaggagagaaggagagtgggagaagatgagggcatggagttgtgggggccaggccactggggtcactgtaaggatttggttgccttgggaatgacaagcagagccagaacatagagttttgaaggaggaacgacaggatctgaggcacgtctcacagggctcactctggctgctgtgttgagagtggactgagggagcaagggggatgcaggggagaagcgggcgtttgcgggtgttatccaggtatgtgaccagaagggctggccctgagccggggtggtagaggtggggagaagccgttagatttgagatcagttctgaaggtgggccagcaacttttgctgtgggattggtagtggggcatgagagaaagaaaggagtcaagattattctgaggttttggctttgcctaatgagtattagtctcacttcctaccctcagaagcaagaggggaaattttttggaaaaggatatctgagtgttctctgggccctgacctgtcctccataacctctttcactctgtgatacttttttcagcacagatgggcaattcccattcatgactaggctttcagacatggagagggcacttggagtccctcctggcacacagcagaggtgaggcagcactgggaattgtctcactttggggtctttgggtcaaaccttgggacccctttagagtgacatggcagggactgagtgtgccctctaggggggtgagatatgcctactggagtccacttccaatgcctgccatctgcaaacactggtgaggccctggctgaagggtaacaacccacaaaagtgcacaaaaggaggaagttctggaatgcgagttgatgctgccagcggtccggttggctccttgccttctgttctttgtgtgttgacatcagacctctctactgcagacaggctgccctacctgagggggcacagctgccagcagcctcagtttacaatcctagcaaaggaggagagcctttctctacatctaggtatcagtttaagggaaaagcctctgtgtttgagagtgggagcggaaactgtttcccacgtacttccttggcagtcatgacctgtcaaggctgaaactggagatgggactttttaatagaccatgatctcactgggagcatatggggaagaaagttcatcttagagatggcagggcgtgagctgtgaaaacagatagtgcacacctactagatgctgggcccccgctaggtattttatttcactggagagcaaaacaatatatcatccctgccctcatggcacagatggcctcaagtggctaaaccatagaatggctagctgagagaaatgatagttctttctttttttctttactgattgcgaatggggttgtatttttaattttggtatccatgtgttcattgctagtatatagaaatccaattgatttttttgtttttatgttgtatcttgcatgtttgctaaactcactaattagtcatagaaatttttttttgtttattccccaggattttctgcatagacaattgtatcacttgcaaatagggattgtttcatttcatcttttccaatctgtatgttttttatttctttttgttgcctgattgtgtggccaggacttctagtcctatgttgaacaagagtgctgggagtgcacatccttgccttgttcctagtcttggggaaagcatcagcctgtcaccattaagtgtaaggtcagctgtggatttgttgtagatgccacttgcactttgctggcatggttgtgagtaggactgtgggttttgtgtgtttgtgtgtgtgtgtgatgtttggctgaaatacagtggttattatctacaagttttctgtcttgaaacagggagatttgttggggcattttctctttgtgctccttggcatttctgagttgctggtctcctcagttccaagtctgagctatatgcagaaaaggaaatgcaggaagctcaccactgtgttgttccttggatcctgaggtcccagctggtctgccttcttcagactgccatttggagtcttcttatagtcatctagcatagaatgcccaggggttttcattgttcttagcaggtggaatcagggaaagtgcacctgctccatcctgctgggagtggaaatggttgggggaaattggagcgtataggtcggggctagtttagatgcaagggctccgttctgtaggtgcaggagggccgtggaggctcagccctgacagcagtgggagggggatgggaagagggggagtggagagagcctaggtggctgctgcctgtgtccaggcaggaggtcctgaagtcctgaggtcctggccgtgacagtagaactgcagcagaaagaaggacaggaagttccatgaggacagtgaggaagtgcaaggagaccaggttggtctgaggtttctagctagagcagctagctggttctgagataacagagacagagggaggggtctaagcgtggcagaggggtgtattctaggcattgtagagcagatctggaagactggacttactgtgcttcccctcaggggaggcttcacagaggaagtctggctgctggggaaaaatccagggagtgtgcattctgggcagaggaattctggctgctgggtaaaaatccagggagtgtgcattctgggcagaggaaacaacgtgggaaaaggcacagatacagaaaacggcgtgatgggcctgttgggactccagctagctgaggcataagtgggtagttactggttccatgactgggaaggatgctgtaggagtgcacaaaaggaagaagttctggaatgcgagttgatgctgccagcggtccagttggctccttgccttctgttctttgtgtgttggcatcagacctctctactgcagacaggctgccctgcctgagggggcacagccaccagcagcctcagttttacaatcccagcgaagggggagagcctttctctacatctaggtatcagtttaagggaaaggctctgattggcccaggttggtgatgtgcctgcctttggacccgtcactgttgcaagggagtggagagttctaatctaggccggatcgtctgcccacccctgttggggcaaccagagtcttttaaaggagaaggcagacaaaatgcatctggggaagataaaaaagactgtttaccatggcttactgtaatagattttgaagaatatgtagtctggcagtgcaggaactcttcatggagattaaagcaggggacttgatcaaagttaggttttattaaaatcattctggacactgtatggggttgtgattggaagtgaatgacaagaggtgtcaaggcgggttcgtaggccactgctttagctccaaggagcactgatgaggcctaagctagcttagaatcctgacttactttgtttgcacttcacctgtagcgacagcatcagtgaggtggagaacagggatagagtcctagagatgttagacaggcaagacttggtggccagatggaggcaaggagaagggggtcttatggaggattccccactgccaccaagggcataaagaatgagtctctggagggctagccttatctttggaaacactattaagtgttggcagactcgatgtaccttattgcttcttcagaagtgttagtgttgttggcttcttgtggtatccagctggaaaaggaagctgattgattgcatttccctccctttaaagagcttccttttttgagaaatcagaagataggtgatacagtcaggactgccagtggagaaataggttggggagagggagacactggcttggagactctcctgcccccagcctgccccgaggcccgcgagtctgctttaggcacattcgtccttttggcatcatccttgctgggaaggcttttaagggatttaaggaaagaaatgacacaatctgattcatattgcaccagatttcctcctctgttcagaatagactatgggtggaggtagagtgactccaagagtagcagcagggaagcagggcaccaattaggagactgtcgcagcaatctaggatggggacggtggaggtggtgagaaatggtcacattctgaatacattttgaaggtaagaaccagttttagtgaggattagatgcggagtgggagagaaaggagatgaaaatgactccaaatttttggtctgggcagctggaagaacattgtcttaaactgaggcggacacaacgctgggaggagcacgtcaggggtctgtgttggacatgtttaagtttgagacacccaccatgtcttacacaaagctcccatctacttcttacttgacacaaacagttggatgtactggtcaggagttcagagcaggggtccaggcttggagagaaatctgagcattgttagcatggaggtgatatgtgtgaatccaggagactagttgagatcaccaagggagtgacagagaagagatgaaaacaaggactgaacacgctgacataagaggtggggagatgagggagaataagcaaagataagccagtgaggtgggcggaaaaccaggagagctagagggcatgattaactggtgtcaaagctgcaaggtaaggactgagactttaccaatggatgtagcaaaatgcaagacaggccaaatgcatatgctgttggacctaagcttaactttgcaaataagtcatagttccttcccagaaggagaatataattttgcaaaaagggatcatttaagatttattaaaataaatctgagaaagatgtgaagatagtaccgtaggaatccagcagaaggaaacagtgcttctggcttttgtggggaggattgagtcagattcattcataccttcattcatttgtgtgttcattcatttggcaaaaacttattgggtgccaggggttgcggggaggagggaagagagagttgttatctagtgggtatagagtttcatttttgcagatgaaaagagttctggagatggcttgtggtaatggttgaataagaatatgaatgtacttaataccattgaactgtacacttaaaaatggttaagactgcaaattttatgtgacatgtattttctcacaattaaaaatggagagagattaaataaaaaacagagcactttttggggccccatcatgaacttggtctgggatatgatgtttgaaatggatgcgccatctcagtagatggaggtaatgtggagaagagtggaggaagacgtccagctcagagggttttgggaactatcagtcctgtttgtctggatggtagggtctatcgggggaaaccatgcaagctgagactgcagccgggccagttggtgcaggcccagcatcctggctgtggatttgggcctgccttcttagattctgggagcctctgatggtttctgcccaggggagtgtcattccaaaggtgtgtatttagattaatttcattagtccttcctgttaaaccattgcctattaaaagcagtggggttgaggcattcatttttatggtgaaaattctggcctagcagaattttagatatccaagcatgtgtcaatgaagtgagtaggttatttttccatccattttacaagtatttattgaggatcatctaagtgcccgtagtgttctaggcagttgggggtatgggacggggtgaatttaacaggtctcttctcttaaaaagcctacagtctagagaaaccccctctccttcctaaacaagaagttatgccacaacgtgccatgtgttaccataggcatgccgccacagttccatgggtactgagaggagggggtgcctggcctgcctggaacactggggaggcttacagggaaaaactgtccaatggatttaaaggacaagcagggattttctaggcaaagaagcagaatgggcatcccaggagtatggtaaatcaaaacttattgggtgctatgaatttaaagctaaacttttatttcattggcttttaggtggtgctggctagagtgtatacgtttggacccaagcttaacttttccaatgtggaatcctgggccttcattggtaagtttgtttgatgccttcttaccaaattatgctatcaaggattggtatttggaatgaaaggcaaggtagttatcattggcaagttctctgtggaggttaccagccctggacctggagaagcctgtagcacaggctgaaggggtacataggaaaagtgaaatctcactgtaggtttctgtggtagatgcagagagggaggccagaggaggggaaccaaggggtgcgggggatggatgcagcgggccttatggagaggtggagctttggctctgttttgaagggcaagctagattgaaaaaagtccggggaggagtgaaagaagattttcgggacttgagaacatagaggtgaggtgtaaacaaagtgggcctagcagcagtcccataggagcaaaatcttcatcgaaaggagtcacgggcaagaactgtggtgggatctgctggcgtctgatgattctagtccatcagcaaactttttctgtagaggaccagatgctaaatatttttggcttcgtaggccatgtggtctctgtcacagctactccactctgctgtggtaacatgcaagcagccatagataatatggaaatgaatgggtgtggcagtgttccagtaaaactttatttacagaagcaggtggtgggctggatttggcctgcgggatgtagtttgccaactccttttctagaccctaaatgcccggctaaggcacatagactttatcctgaaggcagtgggaagccattgaagttattttggataaagaagtgaagtggcagaagtgatgtttacattttaggaacattcatctgatagctggacaagaggcatgggccccttttggaaggcagcagcagtcatccaggcatgaggtcttgcggtgaacagtagtgaaaatggaagcaaaggatcaatggaggagatactgcaaagggagaaccaatagcgttttcagtcttcttagacttaagaggcaggagtcaaagaggatgaaagtttaagcttgcttgtttacggtggtatctttgacagaaatgtagatgttgggggtggaaaggatagctgatgcatctggttttagatatgttgaattcaagataacagtggttcatccataagaaatgtccagcagagaattggaaatgcagggctgaagcctggcctgagaagattaagtctagagatgtggaatggaagccataggattaaacacggtctccccaagatgagcagtgggctgagctgtggggaatatgcgtaactgtgggacgggaagacgatggaagagacccagaggccatggaggagagtcccgggaagggaagagaatggggcagcagagaccagggagaacggacctgaagggaggctgctgaatttgtgacaaggtctttgcagatggccttgagaaatgtaatgtcacaagaggggaagggaagaggaagccaggttacatggagttggacataaatgaaggataaagaattgagatgttacaaaaatagaccgctcatagaaggtttgggtagtaaaagaagggagacacataagatttagatacttgcttgtcagaataacctttgctttagctttgaggcaggcaaagcatgctgtgaccagttttcatttccttctttggagccaagctgtgtttgggagtttgtgtgtaccttgggcttgtgattgtgttcttatgctcccttttgaggtgtggtgttcgtaactctgccacaacttgcaccacggaatccagcccgtgtttggacccttgccatgagacaagatgtgatctgttggggaagtagttgcatttgtataagttggaggagaaagtagagtggaccaaaaattgaaataaaccttcttactacagagtctatccaagtatggggacttgaggataattcctccagtcatgatttaattatgtatcaatttgtgctctgagtattttgagtgtaccttctttggtttgaattctaagtagtttttgacttggtttgtgtgaatatagcagttagagagctggtaacaaaagcaacagttgtaactggtttagagccatgatttattgaacactcattatgtactaagtccagtgctaagtgctattgtgtatcatcccatttcatctttgcaatgacctatgtggggggaattattaatagtattcttatttcagccagaaataagtcatagatgagtaactatgcaaggttacaagggatttgaacccgggtctgtataatccctggcttatgctgcttcctactttatcttgcctgtgtctggaatttttcctcctactaatgtagaaggactagagatagatcgagtccctcaggttaaatattcagaggctgtagtgggtgtttccacttcttaggagtctattgaaagggcagaagaagtgtgggaagtctggaagagactaaggccaaacctcaaacacttactttaactgtttccccagataaaatttagttgaaggcagcagccttgggcttggaaagaaaatagcgctagaaggcatgagagtcagattccagtcctagcattatgacaattataatgtcatttttgtttaaactcttggcatttctctccaattacctccagctttgagctccaaaggcaggctcctattttgtcttgtttttcactgtatccccagcatcgtagcacagaatctggcatgtagtatgttatgtactcactaattatttattgcttcgaatgcaccaagggacttggtacaagacacttagcctctcaggcactgctcttggcatcatggttatagaggtgaaacaggacaaggtctctgctgtcgtgaagcagacgtctacatgtgtgagatgtagaatgtgacgtcaggtatgatcatgctctgaaataaaagacagtgagaccggggtggagagggaagggcctgtccaagaagtgagacagtgagctcgttgggggtaaaatccataaaattcctcttggggtgactacagattgtcagctgcgctgtcagcaccttgttttaattgttttacttggctgccattgccaatgcccagctgactgctccctgcagcgagaactcccacctcaggcctcgctttcttcagctctgctgagcgtgcctctcctgggtcggctcccggttctcctccagctgctgagattccagcctccacagcctgctctgctggttctctgttctttgtccttagcttctggtttggcttggtccctttcacgtcatccttaacgtcctccctgggtgagctcatccaccactcacctctgtcttgaagacacccggatctccatatccggtctgaacctcctcccagtccacactcctagtggtctgccccgagggcacctcaacctgtctgtcccctcctgagtgccacatgcgtctttctccctgtgctgcctgcttggtccacgcccctcagttgcttctgcttcatgagtcgtcctggccttgtcttttccctcatattcccttggttaccacatcctgaagagctcatcttctaatttgtcaactcagttcttctctgtctctccactcctgtgtttaggattcatcattttgttctatgacagcctcttaattggtcatcctgtgttcatctttttcctccctcattccactgcccacattcctatcaacgtgatctttctaacacatgtctgatcagagctttcttttgcttaaagctctccaagagctcctcattgcttagaaaataaaagctaacccccttcagcggggcctgcagtcttctcatcatctggcccttggccccctgcagcttttgctcccccacccccaccccactttgggttttcctttttccctaactcacatttctaacctcagcctagctaccaacagccatcacctcctagtgcctttgcaatgctgggccctctcctgggaatggcgtggtctctgttcaccctcttgggaactcaactccagtttcccccaaatcttcaggacaccatccttccctacccagcacctctccatgacctggaaatgaccttcctcctggctcccagaacaccctcatgtctctcttgcaaagcacttatcggtgttactgttgatttacttacctgttatgctcagcaacctgagctccttaagggtggagaccacacacacacacacacacacacacacacacacacacacacactctgtctctctctctctgttccaagtgccagcatagtttacctggctcaggaagtttttgttgtaagagtgaggagtggtctgtttgtgcagccaagcaacagattcataatgtgataaaatgtacctgaaatgggaggttcattggccattgggtttattggggtgctcttcttgtcagctttgagtgcaggacaggttgtgttgggcttgagtttgtgacgcctgttgtgtctcccagcatgctgagacctcaggaatgtctcttctctatattctttgcccctgactttttatttttttagctcttgtttttgatggaccgataatagcaattcaaaatgaaaaataatccatcaaggaattctcaggaatgaggtccacccaccttggtcctggatgaatcccaaatttcctaaataagccagaatatctattcttgcgaactactgtctgacagcctttttcccccttaatccagctgagaatgcttttcttgaagggtaaggatacctagtggcccttcatgggggtgcctgagggcctctttgtcttcattttaaaccttgtaaagtccccagtgaatactgaggagtctaacaaataggaagaagctctgaccccaggggtcccaagtcagcatctgtactttgcatgggagctagcacaatgcacctagccaatagcatataaactctcctgttttcattcagtgccttaagcttgttgcttgttgtgtcttcttcacttcctatctctgccagagacctgagaagttgtgccaagagtgcagcttttatttggggcctcacagtaatctaggaaagcttttcagaagagagccattctcagcaccgaggtgtcctgcagaccaggacactccagcaggctcttggaactgctttcctgggatggaaatgcttgtgatgctgcctccccttgtagggactttccatatgctgttccctcagcctggaatgcatttttctcctggtttgcctagctcatgcctgttcaccctttggaactcagctgattggcctgcctcctcctcagaagcctccccaacctccctgataagaaggctaggtcttgtcctcaccattcccatgccagcatctagcgcttatggactgctcaccttgtgtcaagtactgttagaatgcttcatgcgtagctactttgtattaggggcttggtagatgttggctgaggtaagtgtcatcattgtcccaaagacactgtgtgaggaaactgaggcctcgacccattgagtaggtgacagagcaggagtttatcccagatgctggactgtgggtttacgctctgacccttctatacgccaccgttccctctgctccaagtccttgcagtctgtccttttccagcacttgtcatggaggtcatgacctcggtttgtgtggttatttgattaatgaatgtttgttccctcactgggcagcccttttgagccccaggatggcaggagtacctaggactctaggcaggtgcgcagcctggagttgaccgagagcatgtgggactgcccacttgcccacagctgcttcttgccttttgcatcacaggagggtgggctaggaccataaaagagccagcccaggcctccccctttctggagctcactgagtgcgtgcatggggtttggccgtcaccctcacttccatggttctgcatcagaaccagctgtgctgaggaaacatctgtgccttgttaaggtctgttccttctgcccactccctttgcccttttctctaccttacaacccctttgttgtccttcttcaaggaaaggggccccctttgtctctcagggcagagccagctgcccttctcctggtcctcttgatctgcacacactctgaggatgactgcccatggcaggtcatgatggtccgtctgccctggactgtggtttctgtggcagagcaatactttgtacagtcagggcccatggccctacggaaggctgagggagagcctgaggtcattgccttaagagaagctgcttcatggtgcagttggtatgtgtgcatgtgtgtgtggatgtgtgcttttttcatgcatgatgtttttatttgtgttatttatccccctgctatatctccctctctcaggggtctaacatggagctttgaatagtagatacatcatagctcttggctaaatacatattttctcccccgctgatctgaaggcacctcccttttcccctacccctcactttggtaccttggtgacttcacagggttgttatgacttcccagacctcattgagattgcagtgatgtgaaaaccctacctagattccagccagctgggcaggggccttggcagcaggggaagcccagttccctagggcaactcaccaggcctccagggctctctagggccaggctggctgagcttcaactgactcatactgtttttgactgggaaaaataaaaattttaaaatggcttctgaccaaatggggaaagtggatgtgggaggaggagaagggggacgttagccacaccctaggtacatttgccagcagcaaactgagatgggcttaaagtgtggctggcctctaagacgcctgcttcaaagggcattcggcacactggtctcaggctttggaggcccacctgcttcagaacatcagctccctgtctgtctagcgttgtgacttaagacaaacccaccaagctcccttagcctccattttctcatctgtaaaatgggattgtaatcattagaataacctttataaggttcttgtgagagtggaatgaagatgtgcttagcaccgtgactggcgtgtagaaagcaccaaatatttattatctgttaacattgtttttgtttgtcaaagtattattgttaataataattataagaagactttggaacagatataaagtctaaaatgcaggctgtgatgaaagggagatggtatataagaaaagtgctttttgaattgcacattatgtccagatattattattagcacaagtatgtttattattgttttgtctttgaaaaaaatgctggagcacaattttatgatgttgagtctatgtcctttgttgttttgttttttgttttggaaaaaggtttgtcacattggcctttattggaatcttgtccagtggatgtatgacccacattggtgaccctgggtgccaaatgcctggacagcacctggcaaagaagagccattatttcaatggtcactattgtttaaaatcgttatggtaaacaatacctgacagaagttcttagaggttcattgacagtaaattgtgggcaatgcactgagttattatttactctagacctgagaaattctccctctccaagttttgtgccttgtatagctaaataaatataaacaatttccttagaatttgatacaaacagctaccattgtcttcacaagtatgttagaaatactttcttaatagcaactacttgactgttttgttttttatctccattccctgccattactctgcctcttcccatctttctgaaataaaagtgagccaaattagccatttaaaaaatacgtagatactttcaggcagaggttgaaaactgtctaccccctggctgcatctggcttgcagatgtgttttgttcagcactcatagtgttttaagatgtttaaattagtggccaacatttaaaaatgggtagatttttgaatcaaaatccagatttccagctcttcataaaaaatcaaaggtctagtgggcctgggcccgtcttccttgtggcagtgcggaagagtggtggtccctcccctgggagcttgtttctccagcctgcctccggctggcccagcctcactgtacctttccatggcctgcttggcccctgtaggaatagagtttgtagtctctgcttaatataactaataccccttagatactgtgtatcagtttagaattatttccactagcaactgtgaccataggtaggaaggatattttacttgctaagttgtcattcttatgatagcccaaatggctataatagtattttaggctcttttggatttaatagaattaccttctctcctctctgtgggatttcctcattaacaatttttaaaaagtgttcagcaaggcttatatagcaacataaaattttaaataatgcaggatataaatttctatagctgctattgaaggggggttgcaatcaagtgaactgctttaattcaacaatttatggtgttgtaaatttgaaaaataaaagacacttagttttttttttttttttttttttttttcagaataaaataattaaatagttgacctttggcagagtctttgttgaaataggcaagggttttgagcttctcagaacttgagaccattgccttctggagtctttcctcagatgagtctgtgcctccttctagctagtgcactctgagcactgtggccacatctggagggtggagaggagacttagcttccaatggtggtcactctaggggaggggggcccttgcaaataccaaaatttttttaaattattattttatgagcttttaaaaacttttttgtttttgtcatcacaaaagtaataaacacttgtgataaattcagacaacactgaagtgctttaacataagcaacaaaatcttctgtgacctcccccaaccttttccaaccattccccaaacataagcacttttgagagtttgcttcttatactcctggacttttgcatttgcttgtttctctccacccctaccctttgccctcaaccacgacatagatactttcccttttgttttctaaagatagactgtccctgtgcatggtgttctgcaactttctttttacagctgtcaattattatggttatttttccaagtccatatgtacagataaatgtacttgttacttttaaaagttgtactccatgttatggttgtatgttaagtaaatttcgttttgtattgatagacactcaggttgtttctgaccttttgccattgcagtcattgctgctgtggaaatttttgtgcacacgtgtgaacttttgcctgagattttctttggtatagatacatagaagtaggacttttggtttaaatggtttgctgtttaaaatttgaatccataatgccaaattaccctccaaaaaggctgtaccaattcatgctcttcctaggagcatcccattatggctttgctaatctagtttttgcttacacatgtgtaagaaagtaaatcttaaaagcctcacaaataatgccatcaaaattacacgtttatcttagaaaagcattcagaatatatgtctgtagatttaattatatgatttttatatcttgactttgatggtggttatcatcctgcaaggtgacaaaaagttccctaaatactgtacacaattattaaataattattaaggatatcagttgtgccaggtagcctttggaagaattacagccaaatcacagcttccttttccacagctctgccaggctggcttgtctttcccaccaagggctgagccattaatactgaggctgggtcagcatttgaaggggccctgccagggagtgccaggccttgggccccagagacctggggagtgggagatggcaagtgactgctgtgaggctgagacaaagtttttgcctacaacaccccatggctgtttcctttactgagctagatgaggaaagcaaagggaagtgatggtccaagacttctggtggtcacttttgttcatagatttctcacaggagtgctaacatttaggctcatgtttacgaaggtttgaaaccttagcatttgggaaggatctgcaaattctcagccaggggccttaactgatcacaggtagttgtgaactcttggtccaggctgtatctcaaggcttcttcttagaaggacaggtcagcttaccacctgctaactgcatgtgaaattttgaattctgccttctctagctctcctctctggctctgagctggtatctggcatttgcaaacagtttaccctttgttgacttcttagcactaacctcacttttatgagtctgagtagacttgatacccaggccatttatcctttgagggtgccctcagcttcatcagacccatgctgggcagtctggcatagtggtaagaggcacttggagccagacagacctgggttcaaatcctgacatcatcacatttactaacagtgtgaccctttggctgatgacctcacctctttgagcatcagtgtctccttctacaaagtagggacagtaattctttcccaggggtattttgaaggatatacgaattaatatttgtcaggtgcctctcagatgttcagcacaaaataaacagtgtataaatatgagtcctctcttatcttcctgctgtagagagaaagttcgttggggatgctccaagttggtggctactggctgaggatcctggagtaagaggaaggctaccatgtaaacccagagatgaatcatgaacaatgtgtattctcaggagcttagtatttgatatgggagcctaacaagcaaatagtgtgtccagtaataggaactgattaatagaggaaagattaattaaccttctaggtgggtggggtggaaaagtaggtggggtattgaaggttcaacaggagttcgacagagaagatagaccataaataataaatatacggctgtatccactagagataaagttacattgttttttatgtacatgttgacttcttttggccttgccaatgcactgatatattcaaattcagctcctctctttttctcttcccttttcccttcactctgcctttcctccagccctgccttgaaatactcagccactgaaaatttcttaaagaatttctttatactttagtaagtcctcagaggataccagttcaccctactgagattttacaagaactttggtgtagctggggttttttttgcattcctttttctacggtagatataagttcttttgggttgcccatcaatgaacaaactaccaaccatttgatgtttactgcgtgactcctgtataccaagcacatgtgccatttcacttagtccccagaatgtcagagcagctttgtgaaatgggctgcccgttctttcttatggatgaagaaactgaggcttaggtaggttaatatactgaatattatacatgtagtgagtgggaaagccacagttcacctccagggtctttttctccctctttgctgccttgcttggggtcctgctcatagtaggtggacagcagatgtttgtctgaacatatgagaacactgcctgccacgtgccggtcagtttgatttgtgctgctggttttgtaacccacatggggcaatgacagctgctcaggtactttcctacctattagtggggccccagggtcacacatcagtcataattgacaaaaaacacaatttccctttcctctcaacttttatttctaaggtacttgtaagcaggtagattagattgttaacttttcattttttgctttgtctctctcctttaaagactatgtgaaagaatacacagtgccctgagagcctggcctgggaatcagaaacttagattccagcttcggttctgctggtaactcctcagtcattatgggtaaataatattccctctccagaactactagattgtgtccttggtgcagtctggggttcgggtggtcctagggaccctgcctactgcatgaacctgttatcaccatgtgaggctggaaggatctcagcgttggtgttgggcaggcctgagtgagcatcctggctcctgtacttcccagctctgtgacctcgggctaatcacctgactccctgatgcttgttcttgtctacgaaggagggctaagaggacctgcttcccaggatcactgtccagattgaatgagaaggaacgtcggcttccttccttctgtctccaactcctgagtgcactggttttagactaactgggtgtttctgcagttgaaaccaaaacaccttcattaggtacaatgttcattatacctcgcaacaccctgagatactcaactcttagatttcttgaagctcttttttgttaagaaactcctcaaaggaagatactcttctaccccattgagctttattagtgcttcaatgacagcaccttattttttcacttttttcccccttgcagacagaagctgcagtgtgaatcagtttgcatttatataatttcttttgcatttctttgcaaagaggaaaactccattcatttagcaaatgtccgtcatgcccaggccttatgttaggtgaagggatttggagagaaatagagtcactgacctcaagaagcttacagggaggaaaggtgtaaatacataaagtgacacatgggtttgtcctgtcaccaaggtatgcagtagatgctgtgggagaagagaggatgacacaggttctctcttggaagacctcatagagaagaggtgacttgtgagcaagtctttttttttttttttttttttttttttttgagagagggtcttgctctgtcacccaggctggagtgcagtggcatgatcctagctcactgcaactttgaaatcttgggcttcaagggatcttcctgcttcagcctcccaagtagctggaactacaggtatgtgccacttgcctgtctgatttttttttttttaattttttgtagagacagcgtctagccatgttgcccaggctgatcttgaactcctggcctccagtgatcctcccaccttggcctcctaaagtgctgggattatagacatgagccactgcacccagccgttgtgagcaagtcttaaaagatgagtaggaaggagtctgtcagctgtagaagtaggaagggcccaggcagaaggagcacagggcagaggctagagccctggtaggaggtgacacactgggtgcatgtctggagctggagccaagaggtggaggacctaagtggctacatcttggcagtcacccatatattggcaagccccaaatctttgtaaccagcccagattgtcttcctgagcccccaactcccatacccactgcccattcagcagctagctgcatgttgaagtgtagtggtcttcccagacctaacataactaaacagaagtcttgatttgttccttcaaaaacaaacaaaaaactagccttgctcctcctcagtcttccccatgttatgaggtccccatcatttttacctggctacccaggcctaaaatgtgggcatcatctttgattctgcttcctcctgtgttcttcacatcatctgtttgcaattctttttttgtttgttttactggttttaaaaattatttatttattgagactgagtcttgctttgtcatccaggctggagtgcaatggtatcatcttggctcactgcaacctccgcctcccgggtttgagaaattctcgtgcctcagcctcccgagtagctgggattacagtcgtgcgctaccactcctggctaatttttgtattttcagtagagatggggtatcaccatgttggccaggctggtctcaaactcctgacctcaagtgatccacccgccttggcctcccaaagtgctgggattataggcatgagccactgcacctggccaatttatttatttttaattaacacataataattgtacatatttatggggtacatagtgatgtttcaatacatataatctgtagtaaccagatcagaataattaacatatctgtcatttcaaacattgcagttcttgacaactcttactgtatgtcctggaagccaccactgctccttattattagtttgtttctttatcaaccaagcaggccagaccactgctctaccctcgttcaaacctccactgtctttcagcaggtctcttgtcagtttgctacataggcaaagaggtcttttaaaaagcaaatttgtgtcatttccctgctctaaactctccagcggctttctggcatctttggaatggaatctaaacatctcgccttggcctgccagcccctcctgctcatcttctctggtctcatcccttggcactctctgctcactccatttcagctgccgcatcttttcttactgttccccctgttgtctcatgggctttgcacttgctgtcctccgcctgagctgctcttccccagacaccgcctgtctcaccttcactccacgctggcctctattcaagtgttctcccacctgtctgaaaaagcaccgttctgccccctctccccgctgcttcaaccattctgtcctacctcgctttggtttctctcattagcactcatcactctctgactttatatgatatgtttgtttgtcttcttatttagtgtttgtcttaccccacaagaatataaatccatgaagatgggacctggtcttatctattgcattcagcactctagggcctaaaacagagcctggcacacagtgggtgatcctgaaacacgaggtgggtggatggacaaatgactgagttaatgcatgcctgcatgcaagcgaagactttggagtttatttcataggcagtgcaaatctagtagacatctttcaggaggtgagtgacgtggtcagcacttttattttagaaagccagctggtggcagtgtgggggctggactgtaggagggaggcagcagaattactttagcggctgtgaaaatcgtccaggaaattgatgctgagtgttgtgctagagctgtggggatggagaagaggggacagatgacaggacctgaagatctttgagtgtctttgatttctattgggataacttggtatagtgattcctttataagaaaagcaggaggggacgaactggtccagggagagactgttgacactctgtggtgtttttctcaccaagaaaacctaagccctgggatgcatgttctctgtagtggcattggctctctggggagtgactctgctgctccgcagcctcccctgttccattttttaataagagaatagtcaagatggtggtgtcagtgagtgggagtcttcttcatgcagatggatccattgatctttgcatactccaagccacactaagtcattggttcttttctcgcagtgggtacatttcaccttatttgattctgatctgacaaatgctgctttttttcttttctttttttttctttttttttgtttaaagaatacctagactgtgctcaagttccaggtggggtttacagataactggggttccagcatctcccttcttacaaacacgaacaggagcctttgccgtccttgggtctcagggaggcagaccggcagcaggcacacattcctggcccaggcgtagccatgctgtctggtgctgccttttgagaccttttgtgtgtgtgtgtgtgtgtgtgtgtgtgtgtgtgtgtgggcttgaatgattccttctttcaaaaattcaaccctctccaaattttgatgaaaaccttttcatctctgagtaagcacattatttcccatcttgatgaggtgtgtcccctctgtgtccctgagagtatgtcatcccagccttttaaattttattgtatttttttattttttattttttcatactagtcaagtgcagtagtgagaagcggggaaagagtagaacaaggggccgggggcggtggctcacatctgtaatcccagcactgtgggaggctgaggtgggtggatcatgaggtcaggagattgataccatcctggccaacatgatgaaaccctgtgtctactaaaaatacaaaaattagctgggtgtggtggcacacgcctgtagtcccagctactcgggaggctgaggcaggagaattgtttgaacccgggaggcagaggttgcagttgagccgatatcatgccaccgcactccagcctggcaacagagcaagactctgtctaaaaaaaaaaaaaagagtagaacaaggagtttgatctgttacagactgaactatcaatggagataactcactaccttcggaccagcctcatcccagtcttttaagcctggtccagaattcctaatcctgcttgtcaggcccttcaaagtgaaatgctgtaccatctgtatagctggattctcacctcctacctctcctctcccttccaaaggttccgatgtcataggaatctacgctagagggcttcctgtgtgccgggcactgtggtaagcacttcacatgcattctctctaatccttaccacttcggggatgtaaggattataatcttctttttacagatgaggaagctgaagcttgccactgcttagtagttaagagtatgggcttacagccaaacagaccctggattgattctcaactagctggggaccttgggcatgctacttaatttttttaacctttttcacatttagaagataaagataatatatagagagataatatagaagattatataggtattatatatatatatatcttctatattatgaagataatacagagttgtgataaaaattaaatgaaatgaccagacatagtggctcactgttgttttgttttgttttgtttttttgagacagagtctcgctctgtcgcccaggctggagtgcagtggtgcgatctcggctcactgcaagctctgcttcccgggttcacgccagtctcctgcctcagcctcccgagtagctgggactacaggcgcccgccaccacgcccggctaattttgttgtatttttagtagagacggggtttcaccgtgttagccaggatggtctcgatctcctgacctcgtgatccacccccctcagcctcccaaagtgctgggattacaggtgtgagccactgcgcccagcccatagcggttcactcatgtaatcccagcactttgagaggctgaggtgggaggtcacttgaggccaggaattcaaggccagcctgggcaacatagcaagaccacttctcttttatgaaaaaaaaaaattaagaaaaataaaaattaaatgaaataacatgtaatttcctaagtacattaagtacgtgcctactatgcgccggacattgtgctgtcagcaaataatagctcatcgcagatgctgttatcatcatcatcatcccaaagccacagattgagtctgtaggtgaggccctgcctggctccaaagattgtgtttttttctcctgttgctcccaagttcacctgtcccaaactttctagcccctaagtttgcttccttgcgcttttctggttgtgccatttgtccctgtctgggcagtgggctcaagctaaggcacagcagttttccagtccctttgagctactgacctcttttctgtcattgactgaacagtttccggtggctgaatcgtctgtgtaagagcttggacaattttttctgattgttaccatcatcgtgtttactgtgaaagggcttcctgtatagttgtttgtgttagcagcattgtctaaatgaaacaagagtggcaacagaaagggttggtgagcagtcctagtcttttggggtcacagatcactttgtgagtctgaagaaatttatagactctctcaaaaaaataaacgacaagacaaatacaagcccagcatttttcatgagacgttttccctgaagttgatctggaaggctatgtgctcttttgtcattgtgctactccacattcacagccatgaagggtgtcatgtttctgcagggtgtttgtatttaagggttgttgggcaatttggcaacactatacctgtttcattgatactatgtgctatttgcatttatttcccatatctgagatacgtattcacacatgagaactggcctggccattttgatgagatgtacctgctgatttgcacataaacacaagccatggcctgcatctagaggatcgactggagaggcttttttttggcccaaaacatcagactagtaggaattttattatgagttatagactaaaaggggggataaacttagcttcagcagggtttaatattctcaattcaggtaagtgtaaatctctacttttcattttaaacatttttgaaatttcagtctttaaaaaaatgcttgttttttttccttccaagttttaaggtatgggtttgggagaaggcagattccaaacactttaactcttcgacctcagacttgcttatgagcctctctttggaacatttccagtgaaccgtggagcaagcctgccacatccagcagccgtaggcatgatgatcactggtgccgatggcccctccactccctgcctggcttttgaggccccgcagaaagaaaggaacagaatcctttcataaggaaggccccagaatcctttctcctgctgtagctatgctgccagtgtcctctgtagatggaaatggaacttggattttgggtgccagaactgaattcatcacagataagattagttgatataaagctgtttctgatgagcagtttttcctccagagttttcatttttgctttttctaaattatacaaaataatagacactcattacaaagggaggatcataatgctccatacctggttttgaattccacttctatcacttattagatgcagccctgggcaaaacacacgccctctctgagccttgatttttctcattgaatgggagatctaattattttacctcataatactgctgtagggattgaaggagattggtataaataatggttttctgagagtctggtgtgtatttgctttttttcagttaatatgaattgagtacctactaagagctggtcactgttctagttgatatggaaccagtcaagagcaagacagagagggtctccgctctcatggtgctcacattctaatcagaggaggcacaagaacacaagatcacttcagttattaagaaattagaacccaggggtagcatgagagtcacaggaaggacccctttacgtcggatggccagcagaaccctccctgaagagctcaatgctttgtgacccccccggtcccaagttttccaggactcctacttttaaaaacactgcccctccaagtatataggtctcaattttgagtttggaaaatctgaccacatattagttctcttgttcattaatgggcttcccatttagagagtgagttcctggggcaggagccatgtcacaggaccttttgaaggtctcagggccaatatggacgacacttctcttgaacactcacccagttgggctgacatgaaaacctcatggtgggaggtggggggtgattagtttccagccagagcccattttgctccattgctgctttgaacattctggtttctaaggagctggaagtagtttctctcagcgagaatgtggcacactgtcatctcctgattctctgcatgcagttcttcaatggcttgttgaggctgcgtggaagcccagaggtcggggcagttccaactcacacactggcatttgaacggcagagcagtaagccctacacctgacataactgcattgccttcttggggtacggtacggatttttaaatgaccatttcagcctgctgggctgggcaacggtgatccaaactgatgagtcaggaagccactgaacagaaaggcaggctgcatctgactcacctgtcatgtcgatagttgacctccttttgtttgaccttgatttgctcagtgcaattaaagatgctgttgtgagtgcacttctgctacctgatttaaataaagtctaacatgtgacagctcagggtcttaaatgcacacacgacttaggcagacggacagatgggtgagtggttagcctttcacttacctctgaattgtaattctatcacaaggaaagggcttaatttcaggaacacggagtaattatttgagactagatacaatgccaaagcagcaggccttgattccttgctacagggcagcttaatcaggaaatggcctagatggccgcctttcaagtaggtccttgcagtagcttggcaacaggcacagggtcataattggaagaatttggctgtgagtgtctgtgggtgtttacagtgcactatagggcagggcttctcttatttatagaatattttgagcaacaagcagcagaaggctgaaaagccactaaaatctcgatttatttttaacaaattccatttttctcctcatcccagaaggagaactgagttattaaaaaacagttaaaaaatacatcattgcagagcatgccatatctaattatggggttgccagcatcggcctgcagccacatttcaagggcttcgtaaatcaaccatccattcaatctgtgaacttatatgactcctgttctccatttagatgtagagcgaaattattggcaagtgggtgctgatcagaaaaagttcttccctgtctaaattaggagatgggagggataaatatagaatagtatacttatgttctcaaaaggagataaaatcattcttcattgtccattatacttagctgcacaaacatccatcccattgcactaaatagccactttagagttttcacacattgcaatggcagttctgtgccactcaaaggcgcagtattgtgatatctcgctgagcctaaacctgagtgattattgctcacgtagtcatgaagagacataaacccagtgcttttttgcctgtgttgtcgtagtgtactagagctacaaggtgggccttcagagagacactagttttaagtatatctcattgtaggtggggaagcagaggcctaggcaagggagtgacttgcctagggtcccattaagagtcatggcagaggtgggctggggcggcagtctctgtgcttctcttgacagtgccctgctgtgctcactggagctactgtattaaacagatacccttcaggggttcacagtcttagaagacacaggcacgaagatggccaaacaatcagcccatgcataagcagaccaagatatgtgtatataacagattagttgagtggtagagaaaatgagagtggggaattttggaatctatttggatagcaaagcaaaggtaacatcagttgctctctgacccacttgggaaaagcttatagagatgctatgaagttttctaatggaaaaaggtgcagtacatttgccatgtgttagtgggaaggtaagtatgatgcagtggtgggtggtaggaggcagtgaagataagtattgcaactttggaggagccctgggaatggattgttgaggtgatttcataggaatacgaaagggagcataggaccagggcacaggccagagacaggcaatcccaagttccctggagtaccctgcccttttctgggaaagcaagtgggtggcatgagtgctatgttcccaatgctctggccccacccctggtagaagaataataactgatcatggtgggttttttctgagcctctgtatctttgagtagcattctggtagccaatatcagtggactggtgccagcctgtgtggtgaacctctatctctttcttgccctgggctgcatgtcaggcacagtgcctaagccggagtgggctttggggagttacttctctttctgaggctggaaggggcagagggacgtagggaaaactttgctagggagggcaaactgtgaaagcctctggagaagtcacctgttgggataccaaaggccagcggttttagaggatgcgaagaggccgggcggggttggtctgggcctaaactaaggctgtagcggctagcatggagaggaacaagcgacggggagtgattacggatgaggaagacgtactaggatttggctacagacagacaaccaaccagagagtaaaagacagtgacatgctaggatgtgaaccacctactacagagaaggtcagaggtggggagggaggaatcagggctgtgggcagatccagcagctgggatccaaagctgaagcccttgggttattgaatccattctttctgagaagagatggttgatcttcctgcccagggagttcctagccagactggacagtggttctcaaacatggtgccaggtgttgtcagatagcaaacaattagtttgtacacagaatgtccccaaggtcacctacacatatttgtttttcctaatctttgatacctacagccacttacctgctttcgagttctcagagttgagaacatataaatttgcagtaacaagtgcacaggaaatacttggaaaatggctgatgagctttagtttggaaatttcatttttttcttggatctggattataatttcagtacaagctagcaatttttcttgttggtaaaatagtttctagttttaaaattatttctgtagttaataaagttaacactatttcatgatggaggctgccccagctctgaaccaattttcaaaaggcagattctcctctttctctctcttatttcttgctcttgaacatttcactgtgttctagcaacttttcctgtgtgtgactcggccaggagactgacttgagtaagatccaggtcaaggggttgtgtgggtgggtcggtggtaaggaggtgctgaagaacactaaaacctttgcctgagaggagtctgggaagtagcctgcgaactggaatgaccccaggcttcctgtcacggtcatagcccatggagttggcagacttgatcactctatattgtgtgcccccaggtaatggcattagtcatcgatactgtcttttttttttttttttctttgagagagagagtctcagtctgtcgcccaggctggagtgcagtggcgtgatctcagctcattgcagcctctgcctgctgggttcaagtgattctcctgcctcagtctcccaagtagctgggattacaggtacatgccaccacacccagctaatttttggatttttagtagagacggggttttgccatgttggccaggctggtctcgaactcctgacctcgggtgatctgctcacctcggcctcccaaagtgctgggattacaggcgtgatccactgcgcccggccaatactgtctttaaatcgtccagagtaagaaaatgttgatagcttgttgtcacagccctgtcattttacacattccctgaattattgtctggcaccagcaggtgttccagaaacacttttggttctttgagccattactggtcattcctgtcaccactgccaccaccagatgtggttctgagagcattaagtaaaagttttgaaggttgtgtatgttaagactggtgcaaagtccatcctccttccttcgggctgatcagccacaccctggctatcagcacttatttactcattttcaaagtgacagaatggtccagtgggcaggggcataaggggtcacttcctctaaccacccgccagtgcaggaggatcccatctgcgcagtggctgcccatgacaggcagttccctagccccagtcggacatctccgcaccaggcatcctgctcctgctttatggacatctttggctcttaaaaatcctcctttattctgaccgcagatctgccttttggcagtgtttccttagtgacctagttctgctttttgtggcaacacagaacaaaggtcggtaggcatggcacaattccagcttagaagtttgaaggtagtgctcatggacccacatcctttccctctccacccactctatctccctccacaaggtttatgttctccagtgccttcagccattctttctatggcatggcagtcagtattaatcccagtaaaggtaacatgtatccagagagtgcttgccatgggccaggcactgttctaagctccgtacgtgaattgtcttatttatgactcaaaatcaccatatgaggtgagccctgtcatcatcctcattttaccaatgaggcaactaaggaacgagggctcacatcttgtcccgagccatgcagtcaagcagcagagcagagatttggggctaggcagtgtgactccagagcccgtgctcttagttgtggtgcaagactatcttacagcctttcctgcatagtgccaaaaataagcccatggtgcactagacttgggctggccctgctttaacttattttgcaagaaatcattagacaggagccttagttgaaccattttctgtgaaaccttcagagtttgttttgacagaacagactgcagggcagaggcatctgcactgtccccaacaaatgggttcatcctgtagctctgccaggccccacagggttcataaaatggtagctttagatcaaggtgacaaatacagggctcttgatgttttttttttttttcctgaacatggtgcctgagcaataggtttcttgtttaaagtgcttagtcatggttttatggccagaaagtagaaggagagaggtacctaagaattgcaaaactgggtcatctcttcaagtgcctaatccaatattcagtctcagagaacaactccagcagttacgggggtggaaggatgtgatgaccacctaccatccaaaactgggatgtaggtgccaaatacacattctcctgaaatgatccctggtgcctctagccaggctcttccaggagtctagagaaagatggcccatgacttcatccagagtctttgcttcctgtgctctgggatgcctgggcttttctggccacagccatacactgacagggccagaagggctgagatgctgggattgaaccatctttctctttgtgagttgctttccagatagcacgcattccggtcactattttccagagatttaagcagcaaagtgagggaccctcgggcatcgactcagagacctggaggggagcagcttgaagcaatgtaaaaagcactggataaaatctggttctaccaaaaatagggctatgagagttacctcacctccctgaaaggtaatatctttatctgaaaaatggggatgataatactactaacctggaagattgacaggaggattagatgagattctgcatggacataacagtccttggcatgatgtctagcagtgaagaaacataaatatgagaataataacttccttcttcctccgctgtctattccttctcttattctagtcctgtctgctgttgggttttgtctgttgttttgggtaaatagctaacctctctgcctctttttgtctgtagaaatgctactggttctgaatgggtacttcgcgccccctataggacatcgtgggaatgtgtgtgggtgatctggatgtcacagtgacccagacgaggcttttactgggggaagaggggaaggcaggggtgctagatataatgcttggggaacaaaagattgcccaacatctgcatagctgcctaatgctcagtgcattcttgtgggcaaaaccctgcttaaaattatctgggcctagagtctgactccaattaacacataaacacaaataatttttgcatgtttttaatatatactgaattttctgcgaacacagctaccaagtatataagatttacctatttgttatgaataggtgcaagcatttcatatatctttcatgatgttttctggtgtagcggtgccccaatacttacatattgatttacatgttgtcttatttttaactatatttcctttcttctttgtattacagttagggcattatattgattatttttggaattataagtgttgtaaggttatattacttacagatttcaagagagctaaagacatatttaaaatatttttattgcatttttgacaatatgaaagagcaagagagagagagtgtgtgtgcgtgcatgcatgcacatgcttacaaattagctagaaaaatcctaagacagactttaaatgaaaagaaatggtttcatagctcctagaaatgtccttttacataaggatatgtagtagaagtccaaatttttaactgcattcattgtcagagaaatgaggtgttttgatgtttcccctgtcccttttagaaagtatatgatcctaaaagagcctgaaacagtttccattgtcatattttttcatttttgcaatctctatttttttcactcctcccacctgtgcatatatatatttaaaagcgtccccatatagacttttaaagaaagaaaagccagccaggctccccactctttactaagtttgttttgattgttttgtggcctctgcctgcacctcggcctgagtcagactgactctgggagctgtgggcaggtccaagggaaagtcaaggaggtaatgaggcttctcgtgggggcaacttgtaggccaagttgggtgggttgaagtcagtctaccagaagcttcctgcctcaagcctgggcctctacctgtcctgaaacctgagggctctccagttggaccacgagggtctgacatccaggaggatccccaggagagagcaaccgtcactagggaatatgctgcccagcactgactgtactgagcagcagtgttgtgtgcctgttgggttgatgccatggatagccaggcgttcagaactgaacacgacacctaaaaggcaaacacgaactgtgaatgtgccagtgtcagatgctgccttggtggtcatgtgtgggctggcagtaagcttttggtcccttaacactcgctgttggaaatttcccaaggctttcatctagggtagctggtgtgtgatttccctgtcctttgttactcctatctggaaactagttgaaatcttttctatgatattgatatagttacagaaaatctgaatacttactactaagttttatagttctgcttagttcaaagtaacacaacctcataagagaaagtttgaaacaggtagagaaattgaaagatgaaaatcactacccattatctcagcccacaaagatagctactatcagcattttggtttgtttcctttcagtcctttctgtgtttatgaaattttattatataaataattcatgtccaatatagaaaaagatggaaaattgagaaattataacgttaaaacaaaactgacccatctcaccagttggagatgtcttaatattctggtgaatttttttttgtcttttttctatagacacataagaagactgggaaatattgtgtatatacgtttgtaccctttttcaccaatgtatatcaatgtatatcagttcactaatgaatactaattaaatgaaaatttattaaatgtatatctatttatatctattgatatattaacagatgccagtgcatatctattaaaagagtactatgtaagagatgatgttcttaaacataaaatttaatttaggcatgaaattactttgtcaaaagatatatcagtttatattcagatatacagtgtactgacctgcccatttaccacatcttcactaatactggtattatctttaaatagaatctttgctaatatgagcagtgaaagtggcatattatctattaaattttgacggttatgagattgagcatgtttttgtatacttactggtctttgtgtttcatcttttggggtttcctattcatagtctctgcttagttttccactgaggtatttgcctttttattgatttataagagattttgttttgttttaactcagaaaaggtagtattgcttcagttgtcacagagctttggagtcagacagagctgggtttgaaccctggctttcctacttgtgagctgagggatttcaggcaatttatctgacccctctcacaattaattagttcttctttgagaactaaacgaaacaacactgactagcatgaaaaaaaagcctggtgtgtggtttctgccaatagtttttgtgttgttatttttgttgtgattcctgcactgagtattttctcagaaaaatgaccttgagctgtacgactcatgcctgttcagacccacagacacatgatactcactatatccaaagctcagaaaaatgaaactgaaatcactgaagtttgtgggttttttttttaaattcttcttgccagaaggagacaaatgaaggaaaaaaaacaagccgatttcattttcattaagaggaatttgtagagttatttctggggtcaggcaggatacattcagacgaacattttagatctagggctgggaagatcccgagactcgttatagattacatcatcttcctccaagtgcacttgccaggcaaatggacaagtgcattttagaaaggttttcagttgttcacgtttaaacagaaaggatcacctggctaacttttagttaacccattgaacagatgtgccattcccccagcccattggttattcatgtccttgttactggtttttgatatccttgccccgtaggtgggaggagggatgggtatgagcctgccctgccctctttctcctacttgggacagagctgttgcttttatttgctgagtcactgaagcaatagagcatgtgcagagtcccagcctggaggtgggcatatctgggttccagtccctgctctagcccttctcagctgtgtgatcttggacaagttgccatacctctctgagcctcagtgtcatcttctatgtgatgtcgatgcctcccccaaaaggtcgttacgaggaccaaaggagacacgtcagggcaggaaccatcctaggcacgtgtttgatgctcagtaaacgggacgtggtcagtgttcagagttgtgggggtggcaggtgactgctctgtttcacctccactcacagcaacagggcctgtggtgtcacctagacatctcataggcatcccacactgaacatgtcccaaaccagcagctcctccctggatgggtggatggtgtacagggacctcttcctccagctgtcacatggggcatgtacctggcaagtggctttgcagccctagctgcccccttggctgggggcctttgtgcagttcatggactgggagtcacccccatgtctagaccgtcaggaaacccattggcttttcctttagagcataccaagaatcaacttctcagaacatagcaagagttgactttttgtcaccctgccgtggccactcagactgactcctcttacacctcacatcccattgatcagcacagcccctggaaatatgtctagaatccagctgcttctcatcacccccacacctaatacagagggctgagtcatagcatctcttccccggactgttgtagccgtctcctaactcagcttcctgccctgcttttacacacacacacacacacacacacacatggtatcttctcaccactgcagccagacttaaaacctaagagggatcatgtcactccccattttactcagagtcaaggccaagatccttactggggtctgcaggcccccacacctggccctctgactgcacccctaccttccttagctgtctcctctccctagcatgccccaggtcgctggtcccctagcactgggcagctccctgcggccctgttcactagctgtcctctgcctggaacacatctgtcacctctcacctcctcctgtccagcctccttggggcctttctaactgcctccctcctgtggtctgcctcctccccatctctgactttcctcccgagcacttactgccatccagcacccgacataacttacttgtttcgtttgcttgccttcctcaccaggaggtgtgccagatgaggacaaggatttttatatccctacccccatctgcagcactgccatggagaacagtgcctggcacttggatgccctcagtaaatatttgttgagagactaataagtgatcgtgggccagcatgccaacagtgtcttcgttattacaaaattgtcccgaattgaaatttggctactacaagcagtttgtggtggaaatttactcaaattaccaattctttcactgaagaaattacctggcatatgtgggttctcaataaactgtgttggattgcctcaaggctttggggcagtggtagccgtctgaggcctccttgccagtcaaccaaaccctgtgctgggtgggacataagagatgcccccagcatccttagctgatgctactatgtcaccccagaatccctggggcagcccacccctcagcagcagctgtcaccctgctgggttccgcttttcctcctgtgggcttcgtctccctaaggaaatcattgtccttgctttctacatcttatctccctgagcagctccaaaattctgttattcatatcccactgacctttctcattgtcctagtccaagcttctcacaggaggagttgtctctctgttttatattaaaacaaagcggttggactcttaaaactctattcacttttcagattctttggagtcctcaatgcttcctgctatgaaatgctgcgctctggaatgccttccagacccacccccaggatacctgtagccttccctgcagccactctcctcaactccctcctcgttcccaggggtcaatgtcctggatctctccagctttaagttccttcatgtcctcttgccacccctgctctcaccatctctgagttcttgtatccccaggatttcaacctgagtttgcatctcctgacatcacttttcccagccttctcccttttcaaccagcacaaggccatccacttccatggccatagtggacgccactgagcatgctaggtgttttcttctattcaactcatgtggtctgcacaacaacccagtgcggggaatccacccctttcacagatgaggcatctctagctcctggaagtcacctaacttgcctaggacatgcagctagtaagtggcagggctgggattggaacccaagaggccccgccctgaccaccatcctgccctgcctctcctcgggcacccagaatcccctcactctattgtcaaaacccaccttgtcctgcctgtctggtacctaggggagaaccctcagcctcttcttctgctgccacttgcttcctcttctgccaggaaggtcccacgcctggccagcctgctctggagacacgcccactgcctggccttgccaggaggctctgatgctctgcaggcttcctgtcccacggatcccttcctgcctgtcctggggtcccaccaccccactttgtagttggccttgctctttattgtggtgaaaggtgcaggccattccatccaagatcctataatattccttttctctgctgttgaatgttcttcccattccccccacattctcaaagaaggcatgtggctttcttcactgcgtctcggcctgccctgagtccagcccctgctgcctggcccagcctgtcttgttggcatcccctaagccctagccagaaacacaagcacctttcaggtgctccatcctaactccaccctccctcacactggcctctctccctttgccaccagataacagcagtgcattcttttgtttcctttagaacaagatgcagatgttttccagaattttcttcaacttcaggcagtaagttttttggtgaaaggagtattactccctgagtctgtagaaccaggctctctcctcttattctgtagcaattaaagacaaagacaggcaagaaaacaatgaaaagaaacaggagccaggctgatgcaccttcatttagctggtccttgagcatgactcattgatccttcttgcttccatcagggattgcaccctgtgccctctttgaatgcaggggcatgtcaaggccaagggtcaggaagagagctttggcctcgccagcctggtccccagagtggaagtggcagggcaggaggggtgtggcagacagagcacatatcgcccccagccttgcccccagatgttgagtgctgggtgccggagtgcagaggggaacaaggcctggaccctgcctggggagaggcagcacctgggagatctttgtggcttcagatcccatgtggtcctccaggtaaagcagagcatctctggggtctaggctgggggaaaactcttgcaaaaaattcctggttctgggacagaatgcatggggtctgcgtgaggggcagaggacagtgccaggccagtgagcacgcactgggcaaaggaagtggccagagaccactcataagaaaaagtgggacatgaacctcagagcctgggctgctttcagaggagccaagagcctgggaaataagcatcttctggtgaggaaatcagcagggggaggggagggtcatacaggaggggacttttaatcctgaatggccttgcagggcatggttcccctagtgtgccccatggaacccttggctgttagatgtgaggtgataaatggtgtgtggatgcatacacttgggactcagactctgctgcccttagactttcaccctccacagggctgcgtttaaaggtccaagaagccctgcagaagaaaaacctaactattgaaccagcattccctatacgtatttggcccctgattttttcccccgaataacatcattacaatcctatgggattagtgttccatggcagaactttgggaagtgttttttgaagaatttgtaaatccctgcaccctctggactgtgcccatttcttagattgcatggaggctgtgctgtacagtggaaggagtatgggctttagatgggactggcctgtgtttaaatctgctttcccattatacaaaatctctgatcttgatcaagttacttactctctcaaacttagtttccttatctgtaagacaggggatgaaacattagctagttgtcttatgaggctgttgtgatggttaatgggaagataataatgacacttacagagggcttgttatgctccagacaccattctgagcactttatatatctcacttacttttcaccacaactgtgaggcaggtaatgttatccttatcctacaggtcaggtcaggagaccaatgacacatacaggctaaatgttgtgcccaacatcacacggctggtaaatgtgggacctaagatttgaaccctaggcactcatacatgatggggtcaggatttgaaacttgaccgtcatctcccatcagagaacatgctctgaatcagtatgttctaaagggtctagagcagtaaaagcactaattggtatcagttcccttttcagatggttcgtggatatgttagggggattgatggttcctgggactccaagtcattctgcagtcattaaaatcagccctgttgaaagagtaatctcctcgatctgcttgcccactcagatgctcccattgtgaccattttgtttgctctgctgcctcatcctgggccacttcaatttgggtggctgctcagcgttcaggtggagtcgggccactttccacagccatctcatctgtggcctgtgcctccacttccaggaccaagagtccccccaggatgcccagtgagttggtagcttgttctctttctacacctcagtgatggacttgacaaagggttaagaagacatcccttttatcattcagcaaactgagtgcctttactgagctagatgcatgccctgggggaactagcactgtttggtgacttagttagacctctgaatccctctaccaaccctcagtagctgtctgggagactgggattctgtggactctcctctatcaacgatattgggggtcttttccacaaagaccagcctggttttgattgacaaagtgcctcagatttacaaatcttaccccttgcaggatcctctcaactgatcaagccccatagctccaaatgccgtctccttgattgatgtttaatttggggatccacaagcatctagagctaccagttgaatttgggtacccaagggccacaaatgggcccccctcacaccctgacccctgacaaccagcacctttgagactgaagtaccactgcatatagtgctgtcctctgctcagggcattctccctaccagccaggccacccggcaaacccctgcaacacctcataagacctcttcgctggtctcatctccttttattaacacctcctcagcacccctccacacacacccaagcccacaagcaaatcattttttcatctgttttgctcttgtaccttacctatgctccactaatacaaaaaaagcacgccttcctcaagacacttgactgccacctgctggagagttgtcatcatggctcaacaaatatctgccacttctaaacccccaggcacctctggagtagggcagtgcattgcttgtacagctgtaaacatggcctgcctgttgaattggtcatgctgtcatgtacttattaaaacactcgtctttctaactggactgaggacatcttgaacgtaaggactgccgatttctgtcttcgtccccattgtggcttctgctaggggctagagaaatgcttattgaatgatccttgtgcaaacacctgttaccttaggttcagggcatctgctgtcattcagtgaaggtcttctaaatctgtctgttgcaaagcaaggctcgccacaggctgtcagagtaaccatggaggtcggacaggacttgcagtggggacagggccccatcagcctctcacctctgctcagaggcaccaccctctgaacagatcagagcataaacaggtcagagcaattcagcattcattccctctacagacatcagggcaggcaccatgtagtggagagtggggccaggggccatctgccatggctgtttgggctggggaaggagagcagtacttctggagcatgtgctgtgctcagggccagctccctgtaggtaggttgtgggaatgcagaggtggcaactcaagcacccctgctggggattcagagttttgtggagaagtagatcagtaagcacatggataccagatagggttgtcaaggatgttgattcactgttgtccctattttcctaagctcgccacatcatggaaggctgctacccaagtgacattcttgggcttcaccaagtgttttaacagagctccacccagctgtcacactaggggtaacacagtgggccagaaggagaggcaggccttccctggggtcccattttaaaaagggggaagtcctctgttcttttacaacacttgtttaccccaagccattcagcatagtattacttaggtcccatacagagaaccttccaacagatagctctccttgctcaggcctgtcctgatgaactccctgatattcttccaggtcttaaaagagtgagagctgagcatttccctctctgccctggctgccaggaagctcagagataacttgtttgctcagttcctgtagctttcctgacccaggacttctttttcttataaattctccttgttccttttccaggaatgcttgctttttatgttttgtttgtttatgttgcttttgtctctgtattatactttggggggtggtttttggaggcaggattggcagcagccatggtagttagaagcaccagcagtaaagctggacacacctgggtttcatccccacttgctagctgtgtcattttaagtaagataagttgcctcttcagttctcggttcctcaccttgaaaattgggataatgatcataatgaatggataggttattgtgaaaattaaacttgtttattgtaaatgcattgtttcctgttcctgctcttggatcaggcttgatctgtggctgtagaatcctagtcttaatttccttcttcctgcctgtgtctgtcagcatatgatgagttgtacaatagtagtgactaggggaccaaccatcccggtttgtctgggacggaggggtttcctgggatgcaggactttcagtgctgaatgggaaggtcccaggcaaatggatgagtcggtcaccctggtaataaacaacctcaacatctcagtggcttactgtagcaaaggtttatttcttcgttgtgctactgtccatccagggccttggctaaaggaggagcctctatcccaggaaattgacagtcatgggcacagacagaggaacacatgttaaaggtcctttagaaagttgtggctgtcacttctgccctcattcactggttggggccagtcacatggccaggcctgccaccaggctgtgcagaaccttcccactgggtgggacagctcagcctggaacactgatccactctgccaggctcacctttctcttcttttgcattttagggtgctggagcagggaccagggaaaggagagagtcacttggtctgaactgggggtcttggatgtgatcatcttcctgtagatggtcggtatgggtttcttaaggggcagggttcagcttcaccctgctctgctcagaggagcagctgtgtctcctttggacgccttctagtggttgatgccctcacctttctcagctgccaaggcctctctcgacagggcaggctgggctgtgacttctcttccaccctccttgctccttcctgtggagcccctgagatcctttccccatgctcctgggtggaatggagggtgccctctcacattcttccaaggcatcttgcgcaagtccctccatgccctgctttctctggcggtccagcatgcctccatctcacctttgggactctctagcttggaagtgggcacacctgcagcccctgactccaggaccacaggctaggctctccccaaagcatcctcatcacacaccatgtggatggccaggtcagggcggccgtcagagcccaccctcggcaaggataccctctcaaaggcacctctgttggctcaaatcccttttggaagtagcccagaaagaggctttcttttttcttatcttttgttgttttatttattgttcttgcatctaagaacaccttcttggtcagaaaacagttttccagaaataatgttaagtaagtgtcacaactggtttagctccctaacctggtctaagcatataagagaggcttttgaggctgggcgtggtggctcatgcccataatcccaatactttgggaggccgagatggagggattgcttgagtccaggagtctgggcagcatagtgagaccttgtctcttctaaaaataaaaaattagctacgtatggtggcacatgcctgtagtcccagctacttgggaggctgaggtgggaagatcacttgaggccaggagttctaggttgcagtgagctatgatcacaccactgcaccctaacctgggcaacagagtgagaccctgtctcaaaaaaaataaaaaaggctttttgatttttgttttgcagaagtaccaaaatctatattagcatttattatttttatttctataaagtaaatttgagtattgggaaaattgatcaaaatgagaaatttcatatggagtttagtacttgaaatttggatccttcatctaaatttcagggaagtcagggctgggcatggtggctcacacctgtaatctcagcattttgagaggccgagatgggcggattgcttgagcccaggactttgagaccagcctgggcaacaatgcaaagcctcctctctacaaaaaatataaaaacaagccagacatggtagtggtgcatacctgtagtcccagctacatgacaaactgaggcaggaggatagtttgagcccaggagatggagattgcagtgagccgagatcatgccattgcactccagcctgggcgacagagcaagactgtctcaaaaaataattaaataagtaagtaaatttcagggaactcagagaacgagaaaggacatgaaattgttcatttatttagcatttgttgagtaccacctggagtgaggcacgagatcaggcacaggagacgcctataaataaggccctacctgcctgaagcttatgggaggtggaggagacacgcctacaagcagagaatggtcacagggcgtgaaggagcctgggcaggagctgctgcaggagagccagggagagaggatacagctctgaaggcttctccaggaggtgtgcccacgggcacaggaaaggaaagcaggagtttatcaggtgactgggtggttgaaaggagccacacctgcaagaaacgtgggcccagcagaggcagggtggttttgggaactcttgtcttttagtctgtcggggggctttgggtagcagatgggagggttgggctgaagactaagcagtgtttcctgctgggtgggtttgaactttgtttggaagacttagggggaacagtgaagctattgcagtggtctgagcaagggggtatcccgcctctgaccacagtggagaggggatggggctggagacgacagcagactgaacagaggcagtgacaaggatctggagggaagtggctgggcccatcccttagagggctgtgtgggggctgtggggtgtgggaggaagagaggaaggaagcccagggtaggttctgggttgctaatttgggggctgggaggatagcgtgtgacctaaacagagaatcagatttagatggaattacctatattaagcctggggatttcatatctatttgctgctgctttaccagttgaggctcaagaatgagaagcacaaaatttctggtcacattatttgcatgtgcccagactggggttaacagaatcggacagtgagcgttcctgaatcagactgcaatggggaatgaatgccttgggaggctggaagcagttgtattcgcagatattcatttggagatctctatagcgatcgaggcaaagataccccaaagactgcaagaattagccagtggaatttgaaatgccaaaattttttttcagaaaggtcaggaaagccccgtttaaaatctaaattttgccatctcaaggcagtgcagggatggattaggaggatgtggggtgacccttttcttcctttcagagccagtttctgccagacacaggaatcctccacatgagtcatagggtggagaggagacccctcagtcctttcagtaaggtgggagggcagtaccgcccggtggctaccatgaaccctgtttcagaatttctttcttaacttcgtgtgtgcccaggtgcacttgagattcactgatgttttctttagaccgaggagctcgcttcagcagttagtttcaggtgttggctctgctggcattatgcttcggcttaatgttttctgaagacttgttttctgttgtttttcattgttcttgttgtctggcttcaggccactaccttcaacctagcaagagctgagtggtgccttcagcagtgaggtagcttctgaaggccaccactctcttgctgtgtgactttggctagtttctccacctctctgtgcctcagtctcttctgtaaaacggagaacacaggagtatctccctcatagagttactttcaggtttcaatgagttaatctacataaaacaataaggatagagcctgacacaaaatcacactcaacaagttttcacaattatgattacttgacccagtaggagaaataaaaaacacaactaacttccttctaaggacatgcccaagaatccagttttagtaactttgaaggcattgtttttcaccgaaaatatctcctgccagattttttcatgtgtttgcagcttagctttaacaaggagctgaaggacggccaggcagcaaggggtggtgagtgccggtagagtgtgacgagctcgcccagccttcctccctgtaattaggagtcatgaaccatctacaccatctcccttagctaataagagatttttacatttacttacctcaaagtgacctgtctgggttttcttttcttgtggcccccactgtaggtttttggaagaagctgaccgcctgaaaagaaattataaaacatgaaaatcgctttgaggtgaccaagtccagaggcccctaactcctcccaagctggatctggggtgtaagaactgtgacttcaggtaacaaagtagtatcccctccctgccccctgtgaactcatgattcttggtagcttgcatggcagttcttcctttaggaagtgtagtttcttccaggaactctgaaacttggggtattctacctcatgcggttgtttggctggtcaaaaaagggagtgggggattctggaggtacttcatgtctgctgcatggcccaagggggccagggctccataaatcaccaagaccctgagggcagggctctgtactcattcctggccctgcttctgtaaatgttaatgacaaaataacaatgtcacccacccaacagggtctttaatatgattaaataatcatgaaatacttcttgaaggataaatcagagagaatagctaggaaatttccaaaaataaagagcagtaggagagtatttgttctgctagctattaaaatgtattctaaagcacagttgtaaaaacagtatagtactgtgatggaaataactagatcagaggaacagagtagagagtccagaaataggtgataaatcaataaaggtgtatttcaagttagtggcaatgggatgcatggactagcaaatggtgttagaaaaaatctcctatccattagagggaaataagaaattcctaagcttaggtagtatatcaaaataatttccaaatagcattaaattaaaaaaatcattaaaatcttagaaaaaagaatatttatattattttgggtaagaaaagacttaaaacatgtcacttttggtcccacatacaaatatcgtaaacaaagttaaaaagcaaaagggtgggaaaagtgtttacaacatcaatgatgaacaaagaattaatattcttagtatacaaatttattcgttcattcaatatttattgagcacttagtatgtactagaaagtattctgggcactaagggcacaagcagtaaataatgttcctgttctcctggtacttagaccctgatggagaggactgccagtgactatggtagattattgtaggtcacattttgataagggctaaggacaaaacattacgtaggtggctgggctagggaggcttggcagggtttgcattatgtggatattcaagggggcttcactgatggaatgacatgtgaagaaaaagggaaagtcattgaatgtcgagctgatagcacatttgctgtttttggaatgtcgagctcataggatttgctgatggattgaatgcgggttgtgaaagaaaggagtcagggtggcttctaggtttggggcctggcaaccagaaggattgacataggaatgactgagaggcttggcttggagatagagttttggttatggatgtttcagtttaacatctctcttgtatattcaagtgaggacgtcagggaggtggtcggccataaatatctgtaattcagggtgacatctaggctggagatataaatttgggaattgttgcagtgttgatagtatttgaaagaatgacactagctagagcccctggagagtgtgtgtagatacagaagagggcccaggacatccatgggaccctcccttagagttgagggagatggagccagctaaagagagcaaaaaggagtgaccactgaaatggaaggagtcccgtgagaagggggatctcccaagccaagagacagtgagaagggcgaggtcagctctcctctggatgtgctgatgggcaaggagagaactggccattggatctagcagtgaggaggtcactggtcaacccaacaagggctgttttatgggaatgatggggagagaatctgtttggagttggattattgagaataagaggaaaaaaactggagacagagaaatgggacaatagctggaggaggatggtattcaagtaagtttatttttcccaagatgggagttacataactcttgttttcacccaagtggaaatgattcagtagcgtggggagagtggatggtgcaggattgggctggggtgagggttctgaaatggtggtctcgaggaggtgggagaggtagaatccaggcatgagctggggaagggatcctaagtaggagcatctaaggaggtggtaggtgtgcacctgcctcttttctcagttcactaagaagcagagtcctcagcggagaatggagactaaggagacgatggaagtttgaggagagagggcaaagtatgaagtccttcatagcagaatgagaaaataaatggccaggggaatgaaggattgctgggcggcatgcaggcctctaaggggtatgtttctccagccatgtcctgttacacaggtgaacacggggtaggaggccattgtggtagaaaaacaggacatgagcagacacaacgtaagacagagaaacgcctgtaaagagaaaaagcaacatcagtaatagctgaagaatacaagtaaaaacaatgaggttttctttttttctctttagactggcaagagctcttgttggggatagaaattattgtcgcttttctggagcacagtgttacagtatgttccagaatacaacgtgtgtcccgttttgacctgtcagtcccacctttagaaatttattctaagaaataattgctcaaatgcaaggaaatatatgcacaaagatgttcaccccagcagtgcttatcaaagtgaaaaaatggcagtcatctaaacaggaggcagctggttcacttatctgtcggcctaacagtgatagtgggaaacagtagctcacactcaccctcctgttttgcagatgagggaagttgggtccagagaggggtagtgacagctccagtcctactccacggagctcagaccccctggctgtaggcaggcaccctgcccaacctcttcaactgggcttggagtcagagtcccttgcaaggcacttgtcaagcccttttcaagggccggtttgcttaatgcttttaaaatacgagttctcaaaatgttttgcaaatttgtttacaatgtcttcatttcatctcatggctttccttgcaaaggatgctgacagtggggggaaaacaggccgactgcctggccgtgatagaggggaccatattttcctgattcccaagtaagacttacagtggaagaaaggatattttctgctttcttacagtgtttacaaaagtcataacaggatgtgaggactatctggctgcaacatctgtcaccccattggtcgccagagttgattgggctgatctggctggttaggcaggtgtcccattcctccctcaccactccatgtgcgtccctcccaaagctgtatgctcagaaaggatgaccatccccgatagaggaggactggtctttggtcaagggtatatgagtagctgcaatcttctgctagggacccccaaacaagctctcaaaagtcataacaggagtacaaagataataaggaacttgcatttatttgtttccttgatcatatgtttattgattagaagaaaataaaattagcagccagccgtggtggctcacacttgaaatctcagcactttgggaggctgagacgggcagatctcttgaggtccagagttcaagaccagcctggccaacatggtgaaaccccatctctactaaaaatacaaatattagccaggtgtggtggtgtatgcctttagtcccagcttcccagcgttttggatggctgaggcacgagagtcacttgaacctgggaggtggaggtggtagtgagctgagattgcaccactgcactccagcctgggtgacagagtgagactttgtctcaaaacaaataaaaaataaaaataaaataaaattagctttgtgtgtggagaaaagggaggaaaaataattagcattgtcagagaacatctgggttatttggtcccctccgtgggaactgccctgggttttcacttctagagtttctggttctggtttaatttttccacgccacagcacagggaccgagaagctgctcagcttctctaggcttttatgtcttcaccagaaaaatgagcgggtgggcttaaatttcctacaaaaactcttaaaataaatatgatgctctttccattctatcacatgcctgttctgggtccgggggtgtgagagatgcattagtgctgctgtaaaccagccccgggtctccccccccggccccccaccaccaaacccccaagcaccaacctgggttctccaccacttttgagagctcatcgaaataaacacacctttgtgcctcttgtaacaattccagatcatccaatggcagaccagagaatggacatttcttcaaccatcagtgatttcatgtccccgggccccaccgacctgctttccagctctcttggtaccagtggtgtggattgcaaccgcaaacggaaaggcagctccactgactaccagtaaggcctttggggcatgtcttcctcttgttaaacttggtgtcagttctcgggcatggaacatctagcagccagctactgtttcatcctggaaaaggggatgggaataaaaaacccaactctaggtggcgacacagttggtttttggctttaccttcccctagtttgtaagcaagaaggagccttcagcagtgctgaggcatttaacttccacttcctgtccccaaaatgttctacacccagagaaaaagaacagccttaaggccaagttctgtcttttacccctttcttcgtcttctttctttgctcctttgagcaagagggttaagtctatgggtgtcatctcagggggttcaaagagagctttgcctgagggcctctctgaggaagacagcaagtgtcaggtgcttaatgaatgtttatggaaggaatgagtggaggtcctctctgaaaacaatttaggaacattgatgttgtccttaaacattatttaaattagtatgaacttgttatattaaatagtatttttgtttatttttagacttgttgacttttcgtttgagtaagtaaattttcacacttacagtcatcccttctatatatgtacaaacacctagggaataaggcagtgtagaatattcaaaggcacattttgttttgccgaagcacctgcgtggaatcttacccaaatgtccatttaagaggttttcttttgtttaatgagggaaaatctccgaggaggtataccccctacagcagatgtcctttctgctgaagttcacaggtcgaatttggggagcacaatggctggaggtcagatgcccactaggagatgctatgattaatatgtaagttatcccagatgattaagacagccaacacccaggggctggagagtgggtatgagggctgtgagggcgttcttccatagcagtaactccccagcagaaagactgcgagatgttggccacaaaccctttgtcttgagcaagcgctaagggagccactgatgtgttctaaggcctctgtcatctggacctgtgggttccagcctggtcaccacccaagatttcccttgtggactctggtttgctaatcttctgtaattcatggagactcaattaattaagcaaccttaatccctttcactatcattttaatgtaactgaagtcatctgtgactgtcaggcagagctttttctcacctgagattatcacctggcctcaaggaacagatagaattctagacaaaagggagaggggagtttttgtccttccgtgcggcctgcgtgatctctgaactttagaactagctggggaaactctctgcctgtgaggaaccccagggcgtctaattgggaacactgttctagaatgcccatgatatgatccagtgctcctagaaacagctatttttgcccttgggattacattgtttgaagggccatgctctctcctttcctgtgggataaaggaaaaaggagagaggcccagctggcagtccatgccctcctgataaatgtatggattggagaaggcggtgagggggatttggaactccttcctctggggatttcagtctgttttcttctactgaaccacaggatgcaacgaaacttggttttctgaagtctgtgaaagggagggagatccttgctgtgaccccaggacttctgtggccctcagccccactacgcccctccatcccaattcctaaaatctaggggttcccacctacctgagaagcagaatatttggcagtagtgcctttgaaaagctgcctggggctctgctcagtactttgttggtactttaattccaccctcctcacttcgtcccttccctgccaaatagatatgtatgcacatttatctttgatgctcaatatgttttgcaaacagaataagcttcatttatccagaatgatggggggggagaatgagaggttatatagatatttcaatcctatggttaactaagcatttttataaacactacatattcccaattttcaaacaatcagaatatggtaaaatatatgttaacacacaaactcttttgagatgataacttttgtttgataacctgagaagctggtccaggttttatagtaagttcaagttaattttcatttgttttacccttattatacatcattaattgatactgtggctgttcgaactttatgattgtttggtttctggataaatgagagccttctgtcttatgataagaagctcttctgtatgtctttattaacatgcagtcacattctcttttgttttttcagagaaagcatggacacagacaaagatgaccctcatggaaggtaccatgaacctagtaatttgaacttcagcatccttatagccattttctttgcactgttacacattctgttacttggggcagcacccatgtcctcaactggagatgagcaaggaggccgtgagcctgtgggcgctcactgtgtccctccaa

SEQ ID NO: 15442 - DNA, 80674 bp, Homo sapiens
gagtgcgggcgcgggcgcgggcgctcccggcgagccacggtgagtgtcaggccggcggcggccagcgacgcgatcccgcgcaccccgtcgggggccgttagcaccctcgcgggcgctgcgcccctgccgccgccccgggggcaacccggccgccgaagaaccctgcccgacgtgcccgctgccggccttaaagggcccgtgaccgctccctgcccccacccgggccgtggggaggctgcgccccttaaaggcgccgcgcccgtccgcccccatcctcctcgcgggggctgccgctgcgggctagggcaggcagaggtgctgcaggagcccttaaaggggccgggaaagtgttcgctggagtacccaccgcccttccgcgggcatcgctacctggcggggggagggggcagctagctgcctcttaaagggatagctctgcccttgggggcagtgactcggccgaagaggactcctagatgtgtccccgggagcttcggggatccccgaggggaccatgcctggtggctgcccctcaagggcgttgggcgaacggtgccgcgtctgcccttcctccccgcttcacttccctttcgggagcccgcgaggctgggtgggggcggggagggcgtctccgtcgggcttggggagtccaagtccgcccgccccttcggccctgtagccagggctggcgctgcacccgggaatccccggccggcacggggccgaccccagcctgcgaactttcgtggggcctgtgccgtccaggtcctgggcggccctcaaggatgccccgtgggtctgcgggcaggtgcgcgtcggcctggggatgtcgcccggagcccgggtgcgggccggccttggagtcccagagctccgcggagggcgcagcgagcctggctccagctccgggtttgacagatgtcagggaagaaaaggttcccgctcggctattgccgggcgttgacatcccagagagcttcccgtttgcttggaagaagacgaggaaggtagaggtgaacgtcgaccttgtggggcgcatgttagcctccccgaggggtcgcgagagccggcagcggggtgagctcaggtgcccgccggcaggagctggggagggaaggggagtgctggacaccggcgcctgctgtcaagttctcgccggccggtgagagacccgctgccgccgcgcaccccgcacctcctgacccctctcccctctccgcctcggccccttcccggtcacctagcgttgttttggcgctttggcgcttgcggtctcttccttcttccaccgctactcctcagcgaggaattattagccaagttttctcacccagcttccaaaaatcagattccgtatttgtgaacaagcttttcttgacactacccgtatacccgtatttccagcatcgtcgttttattaaacatccataaaagctgccccttagatgcattcatttcccacgacacctgcttgcttgtcatttgtccttctgacatctgctgttgttcacccctttaatctattattaaatgacaactattattttaattcttctggtctcattgatatccggatctgtgaatttgggttggtggagtttttaattaatgtacccgttgaatcatgagcttaaaataatcattgctgctcctgagcagttttgaataatatcatgctctctctgcttgcaagacttaaaaaaattcgctggtgttatatttgatttccatatcaatggaattcccaaatatttttgaaaatacaaaattcagtctttcagtccatgttttgttactcagatcattttactgataagtctttaacgcagcttatagaacatatttagaaggtttggaaatttcctggacaggatttgaaattgcctgtatcatctgaagctggttctgtagaagcattttggttttgattgtagatgcagccagtgaatgataacaataagttaaaactgtagttaaatttgttctttattcaaccctctgaagaacgaacagatctggtagaaaagcactaacctgggagttaggagctggacatcctggttctagtttaggcttgggctctcatggccgttccagtcggggcaagttattaaagatttctaggttgtgtttgcctctgatggaaagtaagacggttgaactaggtgatctcaaaggttcctctcttttgaagttctgtaagtctctaaatatttaatacatttgaattcaggttggtatttacctcctggcacctccagaatatctgagctgaagccctattttcataagaaagttaagcagatcaacagatggtgttttgaagaatccatttcaaatgatttataaaatgatgactacttacgagtttgtctgctatttgcagaagaggtttgcatgccacagggcaggaaaaggaagtggccatgttttcagatttatcccttcacaccaacaatctctgtggaatttatatgctaaaagatggagaagcaccatagaaagatttggctgtattaacaaaactgcatatgaaaaggtaaaaactagatagttaatatctctctttggtgtaagggttataatgtatctgagctttctttgtgatttcatcatcaactctcactgtggtaggaaaatcaatattaaataaacagtttcagccccgtgattacatgcagtgattttaggaagcatcatgataactaaagtaggtacttgcagggaagtaaaatatcctttctagaccttgaggtttcgttgggagctagggacacaggcatgttatccttctccacagtcttttttcattgtcaccttatcacaagactcagatttatcccaaatacccaccttgtcttttcttctccctctcatgaaataagacctgctctgactcaaccccctcagcatctcttacttcccacccaaaatgtcctgtctctatccccatcgtcccctcatctcctcccaattcagagaaagcaagtggacctctcctctgttccttttcttggcctctcaccatgggcaagtgcctgggctctggtggcagaagaatccatggctcaggtttgggctttgtggtcttggatgtgtgcttgactcctctgacctcaggtttctcctcttggtgtaatggcagtgcctgcctcgtggagtctgtgtgaggattaagggagatggtgcatgtaaaaggcctggcacacaggaagcctttcctttgtgccagctgccattccttctcacctctacccgggtcctatcactagaatattatttgtgctgtttgtccttagtctcccctgccccaccctgaaaaccttaggcttgacttaggagaggaaggatggaagaggcagagtcagacttgtggtgagcctgctgtgtaccaggcaatttacatgtgtctttacttggtaccctgggttcgtaagcctctctttcctccctcctgccagcctcccccactctcccatctcctgctccattcttagtacctgccctctggcttctctcgctaccacctttctttatatttcttctcaaagttttctccaaaactttgtcgtgagttcctggggcccatctgcccatccttattcctgagtggttgttcttggcccctttgcagtatttcttttatttttttaaacatggtctcagtcttgcctggttggagtgcagtggtgcaatcgtggctcactgcagcctcccaagtctcaggtaatcctcctgcctcagcctccagagtagctgagcctacagacacgtgccatcacacctggctcatttttgtatttttattagagatggagttttgccatgttgcccaggctggtctcaaactcctgggctcaagtgacccacctgcactggcctcccaaagtgctgggattacaggcgtgagtcactgtgctcagcccctttgaagcttttacctcacttgttttttgtcctttgaaatcctttcctctctcagcctttgggtcatgctggtttcttgattctcttcctgcacccctgtaaagataaatgtctgtcctagcttctgctattcacactgtccgtggcctggggtcccctctctagccctgacctgtctctcctgtgttctgctagcaggtccgttgtggacatgaatggcagcctgtaatctgcatttgtggtctcggagttacaggtttgcagactgcttgcaagcactgtcacattgagtcctcatgacacactggagcctacatcccttcattccccaggctgtcctaaaaggcagtttggttgggtagtttagcatacagactctggagccagatttcacatcctaagtattccctactggcttcgtgacttgtggtcaattttcttttgctctctatgccttggtgtcctcatctataaaactgggatcatagtagcccctacatcagagagttgaggtgtggattaaatgagttaaagcattggaaaaagtgtgccagtctattcatggcacattgcaaacactcagtgaatgttgctgtcagtcttgctgctcttcgttgccttgccggggtgccttggcctggtttgtagtggtctccacattcagcctgcctgtctgccagaccttgccatgtgcctggacactgtagtcaagctgaggggctgtccattccctgtaccagcccttggcccagtccatccctcaattttcacgtgtccaaatcctcctctgcttttaggacccagggccttggtcctgcagcactatttcttcattttgttttccttcctccccacacctggcagcaatgtccacattgatttttctccaattctcttaggttctgctgcattccatattgtgttgggctgtctctgaaaatatctcacctgctcgctcagcctgagcattctgggagaagtttatcttgctttttccaaaatgacaggcacagggagcctttaggccatggttgtccaatgcacattgatcttgtggaggaggagatgggatggggtgggcactcagggacggagcaggtggagggaacaggatgcacactgcatagaggtgggggtgcaacagggccataagtggacatggccgtaagtacttaggtctgcatggaaggagggtttgaattggggacttaacctcagggggagataagattggataaggtttagtcatctttgctgcaggggaacgttgagtactggcatgtaatggagagtggtttttaccttagtatgtgctgtccttttaaatagtgtaaactaattctttatctagcctggttaaagaaggggatggctggtctgcctaatttaatatttggctattgctctacccactgggttttgtgcatatactgaatgaagcattggcttgtatttattccttcaatcactgtttgaaatgtctgacctgggcaagttaattagcttctctgagtgcaaaataggaataataattattacgataatagcagctaacatttattgaacactttctatgtgccagcacatatgtgagtcacctttgcttattaactcatttaaaccccataacaactacatgaggcaggtactattatccttacttcacaaatgaggtggttttataaactgcccaaggtcactcagctgttatggcttggggcagaatttgtgctggtgaactccagagtctgccctgtaacaccctagtagattcctactgggaggaaacaccccgttatatcccttacctcactcagccgcaccatgccaggagcctagtaggctgacagcaattgggaaccagtcttattgttgacaaacatggtatgagcctcttttagagcggagctgcctgaaaccctccgcataagggatgcggacctggatgctacctgagcagcagctccaggggcttgtgaacattctcctcacatcctgttatgcatggctgtctctctggcctccccctgctttctctgcagcattgctctgacccaggccccctgtggctcagccagctcctccccaggcagctccttgtgtgagatgaaccttttaacataactcactaaccccacctcccaccctcatctagccatctgcagagctcctcactggggaggggaccttttcaaaggtccctcaccttcgtccttttctccctgaagaccaacgtccacaactttggtatatccacagtgttggggtgtgtgtgtgtgtgtgtgtgtgtgtgtgtgtgtatatatatgtgtgtgtgtatatatatatatatgtgtatatatatatatgtgtgtatatatatatatgtgtatatatatatatgtgtgtatatatatatgtgtatatatatatatatgtgtgtgtatatatatatatatatatatatatatatatatttttttttttaatgccagttgttccccaaatacatttagatagtaagggacacattgttttatgtcaagaacctgttacataaaaatgtgttatataatgttcaaatatatactgcacagtgaaattagataccactttttttttttcaaagaataaaaggataataaacacaggccgtcctgaatataattaacctcagatttgggaggcatggaaggacgtgccctgccctcagagctctcgtcctgagctctgcctttcttgagtgcgccgggagcaggatggatgggaagttggcctgaatctgccatggtgtggtactgtgagatgctctggaaattgtcttttttttttggcggggggtgggggatgccttcgcatcttgctcacttgtatctttctcacacctaagcagagggaagaagctctttttgccccctcgtacttagaccacccaggtcatcttttgaccagttttctgctctgctcaactcctttcaatcttcccagatgacaggccagctttgcctgctaagaacagccctggtgccagtggcatgcaggtggcacccctgtgtccagtcttccaggctctccagggtctggtcctgttcctcctccccagccctgcttccccgctcaacctccattcccagccacagccctgtgcccgaggttcagtcctccttgcctctccgctgtcctccctaggccacctcacttcacactctccctctggctagcggggtctttgcttaaattgttcccttgaggcctctcttccttgcccgtgcctgccttggatctcacttctctgtgaggtacctctgataacatttgttccctttgtgtgtgctctcccttttgctcttgattgccaaccattcattcgttcagaagcaggggtatgtcataatgagcaaattaccatatcatactgaatcaggatggccagttgtctcattttttaattgtttcatggttaattatcttacgctcacttcccactctccagtttcactcagttactccgtcagtgaagtttattggatgcctagcactgttgtgggcactgaggatacagcagtgaacaaaacaaggggcccgcaggaggggacagatgatgaatagtgaaacacgttcatgccttgttgtgagaagtgctaggagtgctaggatagcaagcaaatagagtaaagcagtagcgatgaggtatggtgggagggagggtaccttatctagatcacaggggagacctctctgaggaggtgacatttgaacttagcttcagaaagatctgggggaaagtatcccaggaagagagaacagcacatgtaaaggccctggggttgaaaggtgcttgatatttttgaggaaagtaaaggctagtgtgactcgattatgagctgcttgtgtacagatgttttctgcctcttttatactccctttaaccctgagcccagtgttaggaaggccttgtaaatacttacatacagaattatagcatttgtcattggttatatattataaaatagtaattttataaaataataatttatcataccctgcttagaaggcttttaataaaacattatattgcatataaacaaattaagggtttgaagggttttcttataaatgcactcctagcatgtttcaccaaatattactgttttaattgtgtttagtgcagaactttagacctcataattctgcttcatgtgcacaaccatcttaaaaacaggttttgttccaaaagtttatttgtaaggcactaggtggaaacttgggataaatttttctataagaaacaatgaagtaaatagtgatgtagtttctaggcgagccctcaaaagctatttagtggtgactgtagctgaaaacatactggttggtatcagcagtcgtcaagccttctgctggtagaccctcctctcagtagcattgtacctcatttgctgttagcaatcataggacccatttacctcagtcacttctcctactgtattttcagtctgttaaagttttatagaagggattttttacctttatacctttaagatttggttgcatgtgttataaatgagacagtagtgcagagagtggggaaaactctggactgggagctgggagaggcctgggctccagactgggcccagccactgactggctgagtaaatttgagtaagttatcctctttgaactttgatttctcaggttcttcttggctgtaaaatcctattgttttctcaccatagcagggaaacgtagatatacttcgttgttcaaacctgccctcaaatggctgcctctgatttcttcttgaagaagtatatggcactcagcaatgaggaactcaagcagttccccatgtgcagagctctgcagtgacattctcagtaggaaccttgattttgatctgctatctttcttgatgagttgaaagaaattttgtcccagaacttttggtccagataagatttctgtgttcttggccaacttatcttccatataattatgtaaattgttttttctttttaactcttagggataaaaatggtgactctggcttgcctgcttataaaatatagttataagtgcccttagggaatggaatgagtttgcaggagagagcagagctgaaagagtgtgggatcaaaaacaactttaaatgttaaatgcaaagctattttcagtaccctgctggaagaaaaaatttttttcaaggttttagaggatagaagaggtttttgctccaaagaagaaaggaacctaaggttttgcagtggtgaaaagtacctgatcctttaaccaactaccaccctcccttcccacctctgagttttgttttcgacatcatgaaccacatttgccatttgagaggtttgatatttaagtgacgttagtggcagagctcaactggcagtgttcaaatgacttaggtgcagagtgctgtgctgcaaacttccccagtgcattctagggtaagggatgcctcatagagagtgacagagcacttttagctctgcctctatttggtcagttgtgaatggtgtgttcctttttttccttacttgaaggcatagcgaggagttggtacaagaagttattgcttcatggacttcactttggagctagagggtggcattagacctagcctgccttcttggatgctggaataccagtggcaatgtcatctcttgttctctgctatacccctagcaatgaaaacagtgtctgtacagaaaagtctctcaataaatacttgtttattccttcaaaaagtgaattcagctttggataaatttttaatttcctccactctctagcagtataggcttatgaggttggtcttgcaaggtactttggagtttaggttgccatttctttttgacatctgtgtttttcttattcttcaggttggtcaggtatcagtgtcttttactgatgatggttgtccctgccctgctgatgttcatcttctgttatctttaattggctccaaactgcagcaaatctatagctgagccacattaactaaaagaaaacttgttgcatatttatttaggcatagtactacacatgtatttattcagtcaacaaatatctgtgagtctatatgccaagaatgttactagacccaaaggaagagcagaaattgttgttgtgaccaaggagcctgcagtttgattgccttgtggaacatctttatgagcattgtagaagggaggaggcttcatagaactggtcaggttttcacctttaaggatggtaggatttcgattcacagacaaggtgaggacaggtatttccaggaagtggctgagcggaaacagcataattaaaaacacagaagtaggaatggaccagtttgcattcatggacacagacttgtctaaaatggaaggttcttaaataatggtgggaatttaagtatggaagatcactgaaggcccaaacctgaagccattttagacacctagtgacttgcctaaagtgacagctgataagtggtagatccaggcttaaaataaggccatgggagctctcgaccactggcactggacttggctgtttcccagcagtctctagatgcaggatttgggtttgattggggattttcttttttctttctttctttctttctttttttttcttttttttttttttgtgatggacactgagattgggggttttagagtcatgagctggaaataggcaaggctctatttagcccactctttcattttgcagttggggaaactcagtgaggttaagtggcaagtcggagtttacctagtgagtcagagactgctaggcaatggataaccactggatttgttttattatgattatgattttagtgacatgaaatatttctctctaaagcatcagtccagtgttagtgttccagttggattggagcaatgaaggactaaatgcagcagagacctgacaggaggctgctagatgaatccaggaaggagagagagaagccagaactgagaattaattgtcaattatgttaatcagcatggtgttatcagtcaccctttagatttctagagtgcggtgaacatctgcctgtgtgagtggctttcaagtgtgtgaatctgcactgtactgtgaccaagataccttaatgaattctccagacagaaagtgccactatggaagtcgaatgttttaaaacaaatgcccacattttctggaaagagcaccagattaggagtcagatgacctgcattttaggctgcttctgctgcttagtcaccatatagccaaagcaaatcacttaatgtctcaaactgagcctgactccttatctgtggaacaggtataacaattcctgttgagcccttttcagtgtatgtgtgatgcttgtgtgagctaaggaaagaataggcattttgaagctgtaaagttgctttctggctgcagggagcagcagtgcagttttaatagtgaagatgtactggcccttacaggaatagcctaggagaaccagaagaaagttcccctacctccagggcatgtttagggaatctggcgctgtccaccaggtgggtgctgatgtgtactactttattggatagggccatgttttttgtttatttgtttgtttttattatactttaagttctagggtacatgtgcacaacacacaggtttgttacataggtatacatgtgccatgttggtttgctgcacccattaactcatcatttacattaggtatatctcctaatgctatccctctcccagccccccagcccctgacaggccccggagtgtgatgttccccgccccgtgtccaagtgttctcattgttcagttcccacctataagtgagaacatgcggtgtttggttttctgtccttgtgatagtttgctcagaatgatggtttctagcttcatccatgtccctgcaaagaacatgaactcatccttttttatggctgcatagtattccatggtacatgtgtgccacattttcttaatccagtctgtcattgatggacatttgggttggttccaagtctttgctattgtgaatagtgccacaataaacatacatatgcatgtgtctttatagtagcatgatttataatcctttgggtatatacccagtaatgggatcactgggtcaaatgatatttctagttctagatccttgaggaatctccacactgtattccacaatgattgaactagtttacactcccaccaacagtgtaaaagcattcctatttctccacatcctctccagcatctgttgtttcctgactttttaatgatcaccattctaactggtgtgagatggtatctcattttggttttgatttgcatttctctgatgaccagtgatgatgagcatttttttcatgtgtctgttggctgcataaatgtcttcttttgagaaatgtctgttcatatcctttgggatagggccatgttttaaagatgattacatttcacccccgtaagcctgggcatggacggaaaagttaggcatggatagccatgtgaatctattatctgtagacacctttcaggatagtgacaggcagctgtgaaccagaaaaacaagtgtcagaatctagccagctggccagtctggcattcttggatgtttcatctgtcctggggcattaggcagcgatccagaggaaccttgattagcctgggggattcatggctgagccagcatgctgtccaggtaatacctggctgcaaagcctgactggagatctgccaaatctaaatttctgccagcattacaagtgtatatattattattattattattattattattattattaatagcagtatctaaccttgactacctaccatatgccagcaactgtgctaagtgcttacatactttttctcattcagtcttcacagtattcatataaggtgggtaatgtcagttctgttttctagttagagagactgaaactcagacgagcttcagctgatacatactaagtgtaaaagccatgattcaaactcagaacagtctcagtccagtgcccagctgcataactgctatgttcttctttctctcttttcctggtacctgaaaatacttcttgtctctggttttgaggtttctgactgtgttattggttgatggatgggttgccacacagaggctcagctcagcacagctcttttttcttcatagcttatgacggacatcctcctggatactctggctggtgagcaaatgggtgccagtggtgaatgcagcagaaagactaactcttgccagctagtgcatgtgggtgaattttaaagacaacaaaagaaatttctgtaggtcagtttttcaaagagtaactggtagcttgtagtctacttaaaggccaagtttgatgttcatcaaagtcaccctgtaaaaacctttccaaatgctgtgattctgataacaataccatagaacattcctgtgtaattgacaagtagtttttacatacaatgtcttgtttagtcatcatcacaaccctatgagggtttgcaactacatatagttgcaaagaagactgggagatatctttagttgggaagccatgagtctagcaaaatctctgtttttaagggtggcgaggggagtgaatgaggggagctagcaatctgatgtgttgtggtggtgatggaagggataagtagagtttgaagctgttgtcagtagagttgggaggatgcctcctagtctatgacatctcctagtgttatgacatctcctcttgtggactgggaaattgcttagagtttaagcaactgtccagggttctacaactggtcagcggcagaggcagcacttaagtattgcttttgtgacttaattcactctctattcaagtttcatctttgctttctctattgaagttcttaaatattctgattcactgtatttagaagtcggcaggaattattaaagtgaacttctttgtggtatacactgttactgaatcagagtaaataaaaggtcacatgattggttgttgtgttaggtttaattgacgtgtactctgtatgatacagaatactcacatatcttttgtgggatatcattggtccaacagctttaaaaatcccaaggctttaatagatgataaaacacggagtttgtgtaatttcttgaaaaagttggccatcgagttcttggtcaggaacacaagcttcaattgtaacagtttccatggagacattagccttggcttgcatcatttcagctttcagtgcctttcctaggaatggagtgaactgctaaaagaagagctctggttgtggttgtcacttagagctctctcccctactgtttctgctggaggctgatttgcttttctgggtcttctcagttttttctgtgacctaagcataaattgtctttgagatcctggtaatctcatattttaaaagttttccacaaaagacaactgaatggaacacttttttttttcacccctttaaagtatttaattggccatcaacggtggctcacgcctgtaatcccagcactttgggaggtcgaggcaggcagatcacgaggtcaggagatcgagaccatcctgctagcacggtgaaaccccgtctctactaaaaatacaaaaaaaaaattacctgggcgtagtggcgggcgcctgtaatcccagctcctcgggaggctgaggcaggagaatggcgtgaacctggggggcggagcttgcagtgagccgagatcgcgccactgcactccagcctgggcgacagagcgagactccatctcaaaaaaaaaaaaataaaataaaatgaaaaataaagtatttaattggtggcaaggggctttgctagaagaatggacacctggtctcactcaagcttcttgtattagttgggataccaggtgagtccctctgttaaagagacccacaggcacaatggctgaaaccaggtagaagttttctctctcatgtactagtccctagtagatagtggtccaggcctagtatttttaacacatggcttccatttgatggttgaaggtaaaaacttaccatctcccagaggaaacacccaagggggcacacatccagtcatttttaagggaaagacccggaagcagcacattctctttttccagtagccggaatttgcaactacatatagttgcaaagaagactgggagatatctttagttgggaagcaatgagtctagcaaaatctctgtttttaagggtggcaaggggactgaatgaggaaagctagcggtctgctgtgttgtggtggcgatggaagggataagtagagtttgaagctgttgtcagtagagttgggaagatgcctgagtcaagggtgagaatctaagcaggcacacagaaaccagggcatgtgcagccatctagaggtcagggaagctcttggctctgaaactaagcagtggggggcacccaggcatggaagggaatgtgaattactcagaagacattaggttgtcagtaaaaggaaattcaccagtgtgactgaatcagtagaaagagcacttagactaggagtcagaagacctaggtttgagtccagcccttttacttcataacctggggcaaaaaactcccataaatatttgctttattatttagataatggcaataacagtgatggcctttcctgcctcccaggcttagtgtgagaccaaagggtgaggaagtactgtgtagactgcagccccatggagatgtgcacagtgtctgcccagcccagggcctgccatgggtgtatttgttgaatgaagtgtgaactattaaaagagttgggaaaaatgcattatactaaggagatcttaatcctggacagtcttctctaccaggcagaaaggttctgctctccactggtcaaggccttgggcctatgtgtaaaactgggtacctaacaaacacatgggcagacgcctgcagctccttactgggtagcacatgacacatagtatgtccttggcaaggccatttgctcattcctctgtgtaggtaaccaagtgcaacagaagtggaggtatagcccatgaatgtgaactaatcatttttaaatgatttggtccatgggcaggttagaagatgaaaccttcccaaggccaccaaaacttgatttcttgcttgaaaatgataagatgcagttataaaatgcttctgttgatttggaaaaaatgtgtgacttgttcaaaacaatatgtattaatagaaaatgtaacataaataagaggatacaaaaaagagcttaatgtttctatcttctgggcctagcaatagtgatttttttttccttttggtaggaaaatgggggctcagtggaataatcagttttatttctttttcttttaacttcatgaagggtttgtattgttcattttgttatttaatttgttcatttgctaaggaaagaacttctttcttggaactctgcggagtgtttttagatggactttactggaaaaaaacaggaattgaaattatattcacagtgcgctctaaactcttttaaaatctcatgcatggatggaggaaaatgcactgaaatatcaatagtggttctcacctcatggaattagaggtgacttttattctcatctccttctctgtggtttcctatttttcaacgagtgtgaattacttttatcatcatgaaagaccagttaaaaattaatctcacaaattaacactctcaagccaaaccacgaatttttgtttttcacaacctggcttggactataaactgtcacactatctcagacctatgcagattcttttctgagtgaggcattgaggaacttgttataaagatgatgctttccttctggaaatcaagaaacaagccaagggcttataatgtgttaggaaagatgtcctgagtaactttcctcctggaatctgactagcctttattacagctacttaaggaaatgagttttgtgggttccctgttcactgtgtcaccatttttttctttatcctgtactcatatgtacctcagggtccccagattttcttatcctgggattgcatgaccttgtccttggctctctcgggcccctgccgtttccagtgttctctgttcatgttcacaatattgttgatttggctgtggcttcttcccgcagtgttcttgtagactgaagagagcacattgctgcccttgtccctgtgcagcttcctcttcctctttatcattgctcaggtgagtggcctgagcagtgctcctgggatgaggtgaagagaagcagtcaagactgcagggaagggctaggggtgctgagctggccgagcttccctgggggaaggcactgggccatctgtccagcagcagttggcccacagctggcagggcaggctcaggagtggctcttgaagatggctgcttggtgtttgaagacagttcccagggcatgcattcatttgttgagcaccttcaatctggcagcctgtgttctagatgctggctgatgaccaaggctgacatggctttggctgtcatgggagtttcattctagtggtagagggagagagagagagacgatgtggtagagggagagagagagagacgattagcaggggaatcaatgaagaagataattacaggttgtaagaacagccccagaggaggttacaggtgcctgtttgtcgagaagtgggagggccagagttgggataggaacctatgtccctgattgcaaggtctggctccttctgtgtcctctgggctttctggtgggaagggaggaggtggaggagaccccttgcgagggccgagcttctcccattcagccagtctggaccagcctggggccttcagatggagatagcaaaagttgagggcataagctagggactggctctcttggtcactccagttgcccatctctgtacttccccaggtgaatagccatgttttttaaagaacacggagcaaatttgcatacaagagtccagatttatgcatgctgcagctttgtctgaaggcaagcttatattttctctcctattattttcaacttttaatgagttaccagcatctcagtgcccctccagcaaggatattgggctggtgttttcagggaacaattttaattaactcctccttgcctccctctcacccagccacccccagtccccttcctggtggctcagagtctggctttggcatgcaataagaatatttttgccttggtgttagcctttctgaaactcttgattaccagtgctcacaggacctttctgcagcactgtctgcttggctgtggactacccagaggagcttggtgtcaggcaaacttaggcgatttccctgagcatccttgttgagtctgcctttgtacttctttgtcaggtctagaggcttggccgtttgtcctgctcttttgtcccctccttctgggaaccctcaggaccctcactccatggagactcagcacccttcctcctgcaaacatcagtgatggggctttcccagccctttcccctatcttccttttcaaagaacaaagcctttgaagcttgtctcatacctgtctgatgcagtatgggaatctgtaagttctttgcctcctgaaggggtctggggaatcacttggctttcagagctttcctcgctcctctcccacccacagaccgattttaaccagagagtaagtcattcatgctgtgcttgaatactccttccagtcccactaggaagactctttgttactaaattctgttttcttgggaaaggggagcttattactatctcattttgttggttgttattaccctcctttaaaaatgtatctacatacacgcatgtgtgtacctacatgtttctatatttcccttgtgaatgtggccctcagagggcctggatttaaaccctgggagtggtagtgaccctttgggaaatgtatactttttgttccaaatcttctctggcttaaatttgtgaagttttgtttcagccttggtttcatagtttttcccagtttccaagataagtttggggctcactgtaatcagcatgtaaaggagaatatggccatcagctctgccccttaaattcatagtcagactcagtggggaagccgttcctgtcccatcttgcgctcgtggctctgtcagcctcaggcagctcctgcaccgtcctcctgcctgtgacagtgttgtcaggagttcttggtacctgggtgctgcttggcctcagggtgccagggctcccatgtggagtgtgcttgctgcagtctctacagcccaggtgtctctgcagccctcctcttacatagccacagcgtggtaaagtacatccagtttgcgctgtagtaagcaattttattaaaaaaataagtttaatatgtaagtggtcccttagttcgtttgaatggctcccctctctggctttggtttgaatgagctacacctggctggagccctgctgctcccctcagcatggagtcacctccctgtgctatggaggaaaggaagaagttattcttaccttggttttgagacaagacaagcctggagaaggctgtagggatgaaggagttgcccatttgtccagcatcagttgagagtctactgtgtgcctggcatcataggaagcctctggagtgctgtgagcaagaaaataatacttgatttatgtttttaagggttcttctcgctgcctgtgggccggcagtgaggaggacaagagcgcagcagggagatgggttaggaggcagttgctccggtgcagggagcagtgccagcttgagggctgctggtgggtattggtgtgagggtgggcaggctgcagataggccttcgcccattgcccttgccatgtgtccccatgtgtccccaggggaggctctgggcatcccaaactgtgagcctgccctttcccaagtgtgctaggccctgccaagctcctgcttcatggcctatgctgttcattccatctggaatgctctcttccccctgctttccatcctagctgagtgacattgggcaagtgaccagatctctcttgagcctcaatctcttattctgtgaaagagtgctcatggaacctactgcatgggaccatgaggataagactatagttgagtgtggtgattgcagtagcctccaaagctgtctcctgcttccaatttcatcccgctactgtgcattctttacacagcgatcctgtgaccgagggtcagatcagggcaggcctctgctcagaatcctctccacagtagcttcctgtcccagtcagaggaaaagccaaatcttagcatggccctcagagcttcctggtacttctgacctcatctcccaccccaaggccatggtgtatggttgatcatgctgggttctgcacagctcattgtggtgcatgtaagtggcactcacttcctccccaacttatgcattgcacaacttgtgcagctgtacatgctgctcctacctgcgcctctctagctccactccagccacagtggaatccgtgttgttcttcaaacacaccaggcatgcttcctgtttaagctctccctactgcctgctcccttggcctggaccattcttcccccagaggtgtgtatggctagttagctcaccttcttcaggtcttttttcaaatgtcaccctatttaaaattgttccatctgggtcactgccccccaaatgttccctttttcccttgctctttatttttcctcctagcacttatcaccatctaatatattatacgttttccttatttatttggtttatttttatttatttatttatttctcaacagaacataagcttgatgcaggcaggcaccagtgttaattttgttcactgctgtatccccagtgcctggattggtgcctggcagtaggggttcagtgatgcatgagtgaatgagtttggatgcacaaaggtaaagtattgggtacggtgcttagcacactggaagcacctaatacatggatgccagtattttcattgtctctgttaactctccaggccctggctcaaatgtggctttctctgagcctttctgcagtcccttctcaggctgaattaagtcaccaccacctgtgctctgtgttccccttcattttgccttctctgtctgctcggcatttatcacactgcagtagtgggcttatctcacactttttcctgttccaattgcaattcctgtggggcaaagactggcctgttcagatttgtatctcaggcggtctgcgcccccagctggcatgtggtaggagcttaggaagtgcttgctgctggtggctgtgggaggtggaaagagctttttaatccatcaggacccttacaagggggactggctccagcatcactgccgtctgatgtttgtgccccctcccaaggggtgtcaagggagagcttggcaaccacttaaatgagagtctccagtggtatatttagagcaaattttggagagaggagtctcttggataacagcatctgggtgacctgattgtttcacatataagagtttggctttttggctactcaggctttgagaggttggggtcattcaagggaggcagtgtaatacccatgtgttcagaggtggctgggacgagagggtgcaggagaaaaggcttgagctggcctgtaagggatctgagttggtgaagggagcacagcttctgggggtggcagaaggaataggagagctgcccctgccatacctggggaggggtggttaggtaggtgccttgggaggcatggttaggtaggtggtttggggccatggggggaaaactgtaatgccagggcaattactttggcctcttgtatttggcaggaggggtccacactggggattgtggtggcgtgagggagagggccctgggagagaagctctagagtcattttcttttccagaggtggagttgtcttggggacctgcacgtggcacgcagagcccatgctctcaggcacctttggggtggcagagtttcaactgaaccaacagaggacaaggggctgagaagtcggaggccttggctgaggtgcccagtttcttggttcactttctttacctgccaggttagcagcaagtgagcaaatccctcctgcctttgctcagcattagcctcagagacttgaggagagctgggccttcaggtgggagcctggtggccacactggagaggaccaagcttgacattgagtgtccgaggggctgaaagttgttcgctcatccagagatggattcgttctgcaaacatagggaaagttcccttcccattcctcatggctgtttgaggatggaattcctgcattgaccttggcctttccctgatcttggcctttcccctgcactatggcctctctactcttaacattacgccccagcccttttccatgggcccctcgtcttccctatggccatctaaaatggccgtataatattctatcaagggaatgttttcagtaagccatgagcttgatatggagcatttagattgcttctaatttttgctctttcagctaatgctacattaagccatctctgtgtattatggaatcatttcattagttggcatttgtctagctaatggcaatggcccaagatttaatagcgaatcagaatttcttttttcaagaagaatgtcatgaggatatataaaaaatttacttaaaatgctaggaatcatctatgttggggttttcatgaatgaggaagcagggaaacagtaacatgaaattagttgtaagtgaaagactgtgtgtataaaagtaactcgtgacttgtttgttcctgagtgtggaggggagccaataaatccttggaaggagcaatctacctgtgaaaatcaaagagatctgtattcctgcatctgatgaaaacataacaaacagtgatctcttcttaaggatatttttagaaatgccctaaaacaagaaaaagtaaataagatttccgagaaaaaacatgtctccttaattccaaatgagcctctctggaaatgccatttagtagtggaagcaggttgtagacttgctgaaaggatttggttctttggttattaggaaataactagaatgaaattgacaaacagacaacactgacttggtccccagtactgctttgagcctgaggtatgtgttggctttggaatgatggggaaggcttcctctgacttgctgatttgttgtagttgttgttgttattgttttgagatggagtctcgttctgtcaccaggctggagtgcagtggcgtgatcttggctcactgcaacttctgactacctgattcaagcgattctcctacctctgcctcccgagaggtgggattataggcacgtgccaccacacccagttaatttttgtattttcagtagaaatggggtttcaccatgttggccaggatggtctcaatctcctgacctcatgatctacctgcctcggcctcccaaagtgttgggattacaggcatgagccactgcgcctggtctgttgttgtttttattgtttcagtctctggtggcttattatgtagacttgggctgtaagctttgcatttcagtttaaaccagcaaatgtttacactatataaggttgcaagggctaaaactttagggagaaagaacccagtgcacccctgtttctgagaagctcatgaccagggagtgggaaggataaagcaatgttaaaaccaatggttattcaagggagattaagaagggggccctgggagagtcagctccatccttttagagaagggaggagttctacctcactgctgggcagggtggggctaaggggcaggagaatcaagaaaggttttatggaactagttgcatttgtcaacatcttgaaggacaggctgaaatggaggctggacattctcagcaaaggtaaaaggcctgagtagaggagatggagatggaaggacatggggcaatgtttgggatttggctgaagaattgcatgcctgtagtaatggtcatagtagcactttatggagagtatcaggtgccaggcatggttctaagagctttatatgtagtaactcacttaatccatgcaatgaaccaaatgaggtactgttattatccccattttacagatgaggaagctaagataaatagcaaggaattaattgcccaggatcacactgctgtggagccaagatcagaccaagttcatctggctccaggctctgtgcttacgaccatgaagctgtcctgtctctgatttggggaaagaacagtcactagaatcagacagatggacagatgccgtatgtttagaggctgggattatcaacattcaggaatgcagaggtggaaaagagaccagagatggagatgaggggcattggagaggtggggatgggaggagggtttggtgagagccgtgaagggccacaggaagacagagctttaaggagaagtttgtcagtgaggcccagagctgcagacaatcccaggaggtgagacctgaggaataggtctgggctgaggagaaagctgtgagggcctcgggagaggggcagcagggtgacccaggctggagctgctgtggtgtcctatcctggctgcagagtgctgcgtgttcctgggggatcatagctgttgatgagtatcactgtccctgtcctcttatctgtagaaagaggtgagtgtgacagagggggcaggtgagagctggcactgctaatttggcaaacctggtgacttttctgcagcctaatgatttttgaaagctgtttgctatgctgaggcacaagtgtgacttcccccatctaaatgctgtgcaatcgctattttccctggaaaattgggcccatgtgggctctgtgtgtggtttatttgagttccatttttatagccttattaccttgtccccatgatgcaagaggcctctctcttttcttgagctttgctgtgaaaattgtttcttaaaaggcacaaagtgatctctcgtcatctgggtggtgctcgctccacaagcagcacttttctcagactccgcacacacttgtcatcgcccctgcccccacttggcaggttcctctgattgttggcaatttactgagaacttttaggcagctcttgaagctcactacctatgtgtttgtcttgatttcttccggaagagtttgtgcatgtaaatatccattcagcctctttctctccgagatgttgccctgccactgaccgtgcttggggctgaaacccagtcttgtcctctggcctcgagctgattaacaatagcagtcatcatgtacagagcctgagtggttatcaggcactaagctaagggatttacgttcgtgatcttaattattcccaatttctttgaggtaggtactattacttcccccattttacagataaagaaaatgagccttcaagggatagagtaagttaccccaggttacatagctagtacatggcagagctgggcttaagcgggcctttctaaccttagactccatgtgctccattcattcattcattggcaacaaatgattgtctgcaacaggctgagaactgttgtagacccagggtgtacagcaaagggaaaaaaggccaaactcccaccttcagcttatattctaacttggggaggtagagatcatataataaatgacatatacattatgctatgtggtaatgagaactatggagaaaaatgaagcaaggaggtcagatgggaagtgggaggattttgaggagtggtcaaagaaggcctcattgagagtacaacaaattgttaggttaacaaacaaacccccaaatctcagtgtagcaacacaacaaaactgcacttctctgcagaaaaaattccaaagtggctgctcctggttagcaggcagccttccttgcagtcatccagggacctagactccttttatcctgtgtctctgccttcttcaagggccttggtttcctttgcattcaaatgctggagcgtgaggaagaagaagagagggtagtttgtgaggaaggctttatggaccagtctggaggaagcatacctccctcccacccactggccagaattcagtcacatgttcactcctgactgcaagggaggctgggaaaggaagtctggccatgtgccgcctaaaaaaaggaagtgggttctggtgaactcatggcatggtgtgttgcagcgagtgaggtgaagaagtgagctatgtgtttagctggaggaagagcattttacacaaaaggagcagcaagacaaaggctgctggaatggagtggggaggagagaaggagagtgggagaagatgagggcatggagttgtgggggccaggccactggggtcactgtaaggatttggttgccttgggaatgacaagcagagccagaacatagagttttgaaggaggaacgacaggatctgaggcacgtctcacagggctcactctggctgctgtgttgagagtggactgagggagcaagggggatgcaggggagaagcgggcgtttgcgggtgttatccaggtatgtgaccagaagggctggccctgagccggggtggtagaggtggggagaagccgttagatttgagatcagttctgaaggtgggccagcaacttttgctgtgggattggtagtggggcatgagagaaagaaaggagtcaagattattctgaggttttggctttgcctaatgagtattagtctcacttcctaccctcagaagcaagaggggaaattttttggaaaaggatatctgagtgttctctgggccctgacctgtcctccataacctctttcactctgtgatacttttttcagcacagatgggcaattcccattcatgactaggctttcagacatggagagggcacttggagtccctcctggcacacagcagaggtgaggcagcactgggaattgtctcactttggggtctttgggtcaaaccttgggacccctttagagtgacatggcagggactgagtgtgccctctaggggggtgagatatgcctactggagtccacttccaatgcctgccatctgcaaacactggtgaggccctggctgaagggtaacaacccacaaaagtgcacaaaaggaggaagttctggaatgcgagttgatgctgccagcggtccggttggctccttgccttctgttctttgtgtgttgacatcagacctctctactgcagacaggctgccctacctgagggggcacagctgccagcagcctcagtttacaatcctagcaaaggaggagagcctttctctacatctaggtatcagtttaagggaaaagcctctgtgtttgagagtgggagcggaaactgtttcccacgtacttccttggcagtcatgacctgtcaaggctgaaactggagatgggactttttaatagaccatgatctcactgggagcatatggggaagaaagttcatcttagagatggcagggcgtgagctgtgaaaacagatagtgcacacctactagatgctgggcccccgctaggtattttatttcactggagagcaaaacaatatatcatccctgccctcatggcacagatggcctcaagtggctaaaccatagaatggctagctgagagaaatgatagttctttctttttttctttactgattgcgaatggggttgtatttttaattttggtatccatgtgttcattgctagtatatagaaatccaattgatttttttgtttttatgttgtatcttgcatgtttgctaaactcactaattagtcatagaaatttttttttgtttattccccaggattttctgcatagacaattgtatcacttgcaaatagggattgtttcatttcatcttttccaatctgtatgttttttatttctttttgttgcctgattgtgtggccaggacttctagtcctatgttgaacaagagtgctgggagtgcacatccttgccttgttcctagtcttggggaaagcatcagcctgtcaccattaagtgtaaggtcagctgtggatttgttgtagatgccacttgcactttgctggcatggttgtgagtaggactgtgggttttgtgtgtttgtgtgtgtgtgtgatgtttggctgaaatacagtggttattatctacaagttttctgtcttgaaacagggagatttgttggggcattttctctttgtgctccttggcatttctgagttgctggtctcctcagttccaagtctgagctatatgcagaaaaggaaatgcaggaagctcaccactgtgttgttccttggatcctgaggtcccagctggtctgccttcttcagactgccatttggagtcttcttatagtcatctagcatagaatgcccaggggttttcattgttcttagcaggtggaatcagggaaagtgcacctgctccatcctgctgggagtggaaatggttgggggaaattggagcgtataggtcggggctagtttagatgcaagggctccgttctgtaggtgcaggagggccgtggaggctcagccctgacagcagtgggagggggatgggaagagggggagtggagagagcctaggtggctgctgcctgtgtccaggcaggaggtcctgaagtcctgaggtcctggccgtgacagtagaactgcagcagaaagaaggacaggaagttccatgaggacagtgaggaagtgcaaggagaccaggttggtctgaggtttctagctagagcagctagctggttctgagataacagagacagagggaggggtctaagcgtggcagaggggtgtattctaggcattgtagagcagatctggaagactggacttactgtgcttcccctcaggggaggcttcacagaggaagtctggctgctggggaaaaatccagggagtgtgcattctgggcagaggaattctggctgctgggtaaaaatccagggagtgtgcattctgggcagaggaaacaacgtgggaaaaggcacagatacagaaaacggcgtgatgggcctgttgggactccagctagctgaggcataagtgggtagttactggttccatgactgggaaggatgctgtaggagtgcacaaaaggaagaagttctggaatgcgagttgatgctgccagcggtccagttggctccttgccttctgttctttgtgtgttggcatcagacctctctactgcagacaggctgccctgcctgagggggcacagccaccagcagcctcagttttacaatcccagcgaagggggagagcctttctctacatctaggtatcagtttaagggaaaggctctgattggcccaggttggtgatgtgcctgcctttggacccgtcactgttgcaagggagtggagagttctaatctaggccggatcgtctgcccacccctgttggggcaaccagagtcttttaaaggagaaggcagacaaaatgcatctggggaagataaaaaagactgtttaccatggcttactgtaatagattttgaagaatatgtagtctggcagtgcaggaactcttcatggagattaaagcaggggacttgatcaaagttaggttttattaaaatcattctggacactgtatggggttgtgattggaagtgaatgacaagaggtgtcaaggcgggttcgtaggccactgctttagctccaaggagcactgatgaggcctaagctagcttagaatcctgacttactttgtttgcacttcacctgtagcgacagcatcagtgaggtggagaacagggatagagtcctagagatgttagacaggcaagacttggtggccagatggaggcaaggagaagggggtcttatggaggattccccactgccaccaagggcataaagaatgagtctctggagggctagccttatctttggaaacactattaagtgttggcagactcgatgtaccttattgcttcttcagaagtgttagtgttgttggcttcttgtggtatccagctggaaaaggaagctgattgattgcatttccctccctttaaagagcttccttttttgagaaatcagaagataggtgatacagtcaggactgccagtggagaaataggttggggagagggagacactggcttggagactctcctgcccccagcctgccccgaggcccgcgagtctgctttaggcacattcgtccttttggcatcatccttgctgggaaggcttttaagggatttaaggaaagaaatgacacaatctgattcatattgcaccagatttcctcctctgttcagaatagactatgggtggaggtagagtgactccaagagtagcagcagggaagcagggcaccaattaggagactgtcgcagcaatctaggatggggacggtggaggtggtgagaaatggtcacattctgaatacattttgaaggtaagaaccagttttagtgaggattagatgcggagtgggagagaaaggagatgaaaatgactccaaatttttggtctgggcagctggaagaacattgtcttaaactgaggcggacacaacgctgggaggagcacgtcaggggtctgtgttggacatgtttaagtttgagacacccaccatgtcttacacaaagctcccatctacttcttacttgacacaaacagttggatgtactggtcaggagttcagagcaggggtccaggcttggagagaaatctgagcattgttagcatggaggtgatatgtgtgaatccaggagactagttgagatcaccaagggagtgacagagaagagatgaaaacaaggactgaacacgctgacataagaggtggggagatgagggagaataagcaaagataagccagtgaggtgggcggaaaaccaggagagctagagggcatgattaactggtgtcaaagctgcaaggtaaggactgagactttaccaatggatgtagcaaaatgcaagacaggccaaatgcatatgctgttggacctaagcttaactttgcaaataagtcatagttccttcccagaaggagaatataattttgcaaaaagggatcatttaagatttattaaaataaatctgagaaagatgtgaagatagtaccgtaggaatccagcagaaggaaacagtgcttctggcttttgtggggaggattgagtcagattcattcataccttcattcatttgtgtgttcattcatttggcaaaaacttattgggtgccaggggttgcggggaggagggaagagagagttgttatctagtgggtatagagtttcatttttgcagatgaaaagagttctggagatggcttgtggtaatggttgaataagaatatgaatgtacttaataccattgaactgtacacttaaaaatggttaagactgcaaattttatgtgacatgtattttctcacaattaaaaatggagagagattaaataaaaaacagagcactttttggggccccatcatgaacttggtctgggatatgatgtttgaaatggatgcgccatctcagtagatggaggtaatgtggagaagagtggaggaagacgtccagctcagagggttttgggaactatcagtcctgtttgtctggatggtagggtctatcgggggaaaccatgcaagctgagactgcagccgggccagttggtgcaggcccagcatcctggctgtggatttgggcctgccttcttagattctgggagcctctgatggtttctgcccaggggagtgtcattccaaaggtgtgtatttagattaatttcattagtccttcctgttaaaccattgcctattaaaagcagtggggttgaggcattcatttttatggtgaaaattctggcctagcagaattttagatatccaagcatgtgtcaatgaagtgagtaggttatttttccatccattttacaagtatttattgaggatcatctaagtgcccgtagtgttctaggcagttgggggtatgggacggggtgaatttaacaggtctcttctcttaaaaagcctacagtctagagaaaccccctctccttcctaaacaagaagttatgccacaacgtgccatgtgttaccataggcatgccgccacagttccatgggtactgagaggagggggtgcctggcctgcctggaacactggggaggcttacagggaaaaactgtccaatggatttaaaggacaagcagggattttctaggcaaagaagcagaatgggcatcccaggagtatggtaaatcaaaacttattgggtgctatgaatttaaagctaaacttttatttcattggcttttaggtggtgctggctagagtgtatacgtttggacccaagcttaacttttccaatgtggaatcctgggccttcattggtaagtttgtttgatgccttcttaccaaattatgctatcaaggattggtatttggaatgaaaggcaaggtagttatcattggcaagttctctgtggaggttaccagccctggacctggagaagcctgtagcacaggctgaaggggtacataggaaaagtgaaatctcactgtaggtttctgtggtagatgcagagagggaggccagaggaggggaaccaaggggtgcgggggatggatgcagcgggccttatggagaggtggagctttggctctgttttgaagggcaagctagattgaaaaaagtccggggaggagtgaaagaagattttcgggacttgagaacatagaggtgaggtgtaaacaaagtgggcctagcagcagtcccataggagcaaaatcttcatcgaaaggagtcacgggcaagaactgtggtgggatctgctggcgtctgatgattctagtccatcagcaaactttttctgtagaggaccagatgctaaatatttttggcttcgtaggccatgtggtctctgtcacagctactccactctgctgtggtaacatgcaagcagccatagataatatggaaatgaatgggtgtggcagtgttccagtaaaactttatttacagaagcaggtggtgggctggatttggcctgcgggatgtagtttgccaactccttttctagaccctaaatgcccggctaaggcacatagactttatcctgaaggcagtgggaagccattgaagttattttggataaagaagtgaagtggcagaagtgatgtttacattttaggaacattcatctgatagctggacaagaggcatgggccccttttggaaggcagcagcagtcatccaggcatgaggtcttgcggtgaacagtagtgaaaatggaagcaaaggatcaatggaggagatactgcaaagggagaaccaatagcgttttcagtcttcttagacttaagaggcaggagtcaaagaggatgaaagtttaagcttgcttgtttacggtggtatctttgacagaaatgtagatgttgggggtggaaaggatagctgatgcatctggttttagatatgttgaattcaagataacagtggttcatccataagaaatgtccagcagagaattggaaatgcagggctgaagcctggcctgagaagattaagtctagagatgtggaatggaagccataggattaaacacggtctccccaagatgagcagtgggctgagctgtggggaatatgcgtaactgtgggacgggaagacgatggaagagacccagaggccatggaggagagtcccgggaagggaagagaatggggcagcagagaccagggagaacggacctgaagggaggctgctgaatttgtgacaaggtctttgcagatggccttgagaaatgtaatgtcacaagaggggaagggaagaggaagccaggttacatggagttggacataaatgaaggataaagaattgagatgttacaaaaatagaccgctcatagaaggtttgggtagtaaaagaagggagacacataagatttagatacttgcttgtcagaataacctttgctttagctttgaggcaggcaaagcatgctgtgaccagttttcatttccttctttggagccaagctgtgtttgggagtttgtgtgtaccttgggcttgtgattgtgttcttatgctcccttttgaggtgtggtgttcgtaactctgccacaacttgcaccacggaatccagcccgtgtttggacccttgccatgagacaagatgtgatctgttggggaagtagttgcatttgtataagttggaggagaaagtagagtggaccaaaaattgaaataaaccttcttactacagagtctatccaagtatggggacttgaggataattcctccagtcatgatttaattatgtatcaatttgtgctctgagtattttgagtgtaccttctttggtttgaattctaagtagtttttgacttggtttgtgtgaatatagcagttagagagctggtaacaaaagcaacagttgtaactggtttagagccatgatttattgaacactcattatgtactaagtccagtgctaagtgctattgtgtatcatcccatttcatctttgcaatgacctatgtggggggaattattaatagtattcttatttcagccagaaataagtcatagatgagtaactatgcaaggttacaagggatttgaacccgggtctgtataatccctggcttatgctgcttcctactttatcttgcctgtgtctggaatttttcctcctactaatgtagaaggactagagatagatcgagtccctcaggttaaatattcagaggctgtagtgggtgtttccacttcttaggagtctattgaaagggcagaagaagtgtgggaagtctggaagagactaaggccaaacctcaaacacttactttaactgtttccccagataaaatttagttgaaggcagcagccttgggcttggaaagaaaatagcgctagaaggcatgagagtcagattccagtcctagcattatgacaattataatgtcatttttgtttaaactcttggcatttctctccaattacctccagctttgagctccaaaggcaggctcctattttgtcttgtttttcactgtatccccagcatcgtagcacagaatctggcatgtagtatgttatgtactcactaattatttattgcttcgaatgcaccaagggacttggtacaagacacttagcctctcaggcactgctcttggcatcatggttatagaggtgaaacaggacaaggtctctgctgtcgtgaagcagacgtctacatgtgtgagatgtagaatgtgacgtcaggtatgatcatgctctgaaataaaagacagtgagaccggggtggagagggaagggcctgtccaagaagtgagacagtgagctcgttgggggtaaaatccataaaattcctcttggggtgactacagattgtcagctgcgctgtcagcaccttgttttaattgttttacttggctgccattgccaatgcccagctgactgctccctgcagcgagaactcccacctcaggcctcgctttcttcagctctgctgagcgtgcctctcctgggtcggctcccggttctcctccagctgctgagattccagcctccacagcctgctctgctggttctctgttctttgtccttagcttctggtttggcttggtccctttcacgtcatccttaacgtcctccctgggtgagctcatccaccactcacctctgtcttgaagacacccggatctccatatccggtctgaacctcctcccagtccacactcctagtggtctgccccgagggcacctcaacctgtctgtcccctcctgagtgccacatgcgtctttctccctgtgctgcctgcttggtccacgcccctcagttgcttctgcttcatgagtcgtcctggccttgtcttttccctcatattcccttggttaccacatcctgaagagctcatcttctaatttgtcaactcagttcttctctgtctctccactcctgtgtttaggattcatcattttgttctatgacagcctcttaattggtcatcctgtgttcatctttttcctccctcattccactgcccacattcctatcaacgtgatctttctaacacatgtctgatcagagctttcttttgcttaaagctctccaagagctcctcattgcttagaaaataaaagctaacccccttcagcggggcctgcagtcttctcatcatctggcccttggccccctgcagcttttgctcccccacccccaccccactttgggttttcctttttccctaactcacatttctaacctcagcctagctaccaacagccatcacctcctagtgcctttgcaatgctgggccctctcctgggaatggcgtggtctctgttcaccctcttgggaactcaactccagtttcccccaaatcttcaggacaccatccttccctacccagcacctctccatgacctggaaatgaccttcctcctggctcccagaacaccctcatgtctctcttgcaaagcacttatcggtgttactgttgatttacttacctgttatgctcagcaacctgagctccttaagggtggagaccacacacacacacacacacacacacacacacacacacacacactctgtctctctctctctgttccaagtgccagcatagtttacctggctcaggaagtttttgttgtaagagtgaggagtggtctgtttgtgcagccaagcaacagattcataatgtgataaaatgtacctgaaatgggaggttcattggccattgggtttattggggtgctcttcttgtcagctttgagtgcaggacaggttgtgttgggcttgagtttgtgacgcctgttgtgtctcccagcatgctgagacctcaggaatgtctcttctctatattctttgcccctgactttttatttttttagctcttgtttttgatggaccgataatagcaattcaaaatgaaaaataatccatcaaggaattctcaggaatgaggtccacccaccttggtcctggatgaatcccaaatttcctaaataagccagaatatctattcttgcgaactactgtctgacagcctttttcccccttaatccagctgagaatgcttttcttgaagggtaaggatacctagtggcccttcatgggggtgcctgagggcctctttgtcttcattttaaaccttgtaaagtccccagtgaatactgaggagtctaacaaataggaagaagctctgaccccaggggtcccaagtcagcatctgtactttgcatgggagctagcacaatgcacctagccaatagcatataaactctcctgttttcattcagtgccttaagcttgttgcttgttgtgtcttcttcacttcctatctctgccagagacctgagaagttgtgccaagagtgcagcttttatttggggcctcacagtaatctaggaaagcttttcagaagagagccattctcagcaccgaggtgtcctgcagaccaggacactccagcaggctcttggaactgctttcctgggatggaaatgcttgtgatgctgcctccccttgtagggactttccatatgctgttccctcagcctggaatgcatttttctcctggtttgcctagctcatgcctgttcaccctttggaactcagctgattggcctgcctcctcctcagaagcctccccaacctccctgataagaaggctaggtcttgtcctcaccattcccatgccagcatctagcgcttatggactgctcaccttgtgtcaagtactgttagaatgcttcatgcgtagctactttgtattaggggcttggtagatgttggctgaggtaagtgtcatcattgtcccaaagacactgtgtgaggaaactgaggcctcgacccattgagtaggtgacagagcaggagtttatcccagatgctggactgtgggtttacgctctgacccttctatacgccaccgttccctctgctccaagtccttgcagtctgtccttttccagcacttgtcatggaggtcatgacctcggtttgtgtggttatttgattaatgaatgtttgttccctcactgggcagcccttttgagccccaggatggcaggagtacctaggactctaggcaggtgcgcagcctggagttgaccgagagcatgtgggactgcccacttgcccacagctgcttcttgccttttgcatcacaggagggtgggctaggaccataaaagagccagcccaggcctccccctttctggagctcactgagtgcgtgcatggggtttggccgtcaccctcacttccatggttctgcatcagaaccagctgtgctgaggaaacatctgtgccttgttaaggtctgttccttctgcccactccctttgcccttttctctaccttacaacccctttgttgtccttcttcaaggaaaggggccccctttgtctctcagggcagagccagctgcccttctcctggtcctcttgatctgcacacactctgaggatgactgcccatggcaggtcatgatggtccgtctgccctggactgtggtttctgtggcagagcaatactttgtacagtcagggcccatggccctacggaaggctgagggagagcctgaggtcattgccttaagagaagctgcttcatggtgcagttggtatgtgtgcatgtgtgtgtggatgtgtgcttttttcatgcatgatgtttttatttgtgttatttatccccctgctatatctccctctctcaggggtctaacatggagctttgaatagtagatacatcatagctcttggctaaatacatattttctcccccgctgatctgaaggcacctcccttttcccctacccctcactttggtaccttggtgacttcacagggttgttatgacttcccagacctcattgagattgcagtgatgtgaaaaccctacctagattccagccagctgggcaggggccttggcagcaggggaagcccagttccctagggcaactcaccaggcctccagggctctctagggccaggctggctgagcttcaactgactcatactgtttttgactgggaaaaataaaaattttaaaatggcttctgaccaaatggggaaagtggatgtgggaggaggagaagggggacgttagccacaccctaggtacatttgccagcagcaaactgagatgggcttaaagtgtggctggcctctaagacgcctgcttcaaagggcattcggcacactggtctcaggctttggaggcccacctgcttcagaacatcagctccctgtctgtctagcgttgtgacttaagacaaacccaccaagctcccttagcctccattttctcatctgtaaaatgggattgtaatcattagaataacctttataaggttcttgtgagagtggaatgaagatgtgcttagcaccgtgactggcgtgtagaaagcaccaaatatttattatctgttaacattgtttttgtttgtcaaagtattattgttaataataattataagaagactttggaacagatataaagtctaaaatgcaggctgtgatgaaagggagatggtatataagaaaagtgctttttgaattgcacattatgtccagatattattattagcacaagtatgtttattattgttttgtctttgaaaaaaatgctggagcacaattttatgatgttgagtctatgtcctttgttgttttgttttttgttttggaaaaaggtttgtcacattggcctttattggaatcttgtccagtggatgtatgacccacattggtgaccctgggtgccaaatgcctggacagcacctggcaaagaagagccattatttcaatggtcactattgtttaaaatcgttatggtaaacaatacctgacagaagttcttagaggttcattgacagtaaattgtgggcaatgcactgagttattatttactctagacctgagaaattctccctctccaagttttgtgccttgtatagctaaataaatataaacaatttccttagaatttgatacaaacagctaccattgtcttcacaagtatgttagaaatactttcttaatagcaactacttgactgttttgttttttatctccattccctgccattactctgcctcttcccatctttctgaaataaaagtgagccaaattagccatttaaaaaatacgtagatactttcaggcagaggttgaaaactgtctaccccctggctgcatctggcttgcagatgtgttttgttcagcactcatagtgttttaagatgtttaaattagtggccaacatttaaaaatgggtagatttttgaatcaaaatccagatttccagctcttcataaaaaatcaaaggtctagtgggcctgggcccgtcttccttgtggcagtgcggaagagtggtggtccctcccctgggagcttgtttctccagcctgcctccggctggcccagcctcactgtacctttccatggcctgcttggcccctgtaggaatagagtttgtagtctctgcttaatataactaataccccttagatactgtgtatcagtttagaattatttccactagcaactgtgaccataggtaggaaggatattttacttgctaagttgtcattcttatgatagcccaaatggctataatagtattttaggctcttttggatttaatagaattaccttctctcctctctgtgggatttcctcattaacaatttttaaaaagtgttcagcaaggcttatatagcaacataaaattttaaataatgcaggatataaatttctatagctgctattgaaggggggttgcaatcaagtgaactgctttaattcaacaatttatggtgttgtaaatttgaaaaataaaagacacttagttttttttttttttttttttttttttcagaataaaataattaaatagttgacctttggcagagtctttgttgaaataggcaagggttttgagcttctcagaacttgagaccattgccttctggagtctttcctcagatgagtctgtgcctccttctagctagtgcactctgagcactgtggccacatctggagggtggagaggagacttagcttccaatggtggtcactctaggggaggggggcccttgcaaataccaaaatttttttaaattattattttatgagcttttaaaaacttttttgtttttgtcatcacaaaagtaataaacacttgtgataaattcagacaacactgaagtgctttaacataagcaacaaaatcttctgtgacctcccccaaccttttccaaccattccccaaacataagcacttttgagagtttgcttcttatactcctggacttttgcatttgcttgtttctctccacccctaccctttgccctcaaccacgacatagatactttcccttttgttttctaaagatagactgtccctgtgcatggtgttctgcaactttctttttacagctgtcaattattatggttatttttccaagtccatatgtacagataaatgtacttgttacttttaaaagttgtactccatgttatggttgtatgttaagtaaatttcgttttgtattgatagacactcaggttgtttctgaccttttgccattgcagtcattgctgctgtggaaatttttgtgcacacgtgtgaacttttgcctgagattttctttggtatagatacatagaagtaggacttttggtttaaatggtttgctgtttaaaatttgaatccataatgccaaattaccctccaaaaaggctgtaccaattcatgctcttcctaggagcatcccattatggctttgctaatctagtttttgcttacacatgtgtaagaaagtaaatcttaaaagcctcacaaataatgccatcaaaattacacgtttatcttagaaaagcattcagaatatatgtctgtagatttaattatatgatttttatatcttgactttgatggtggttatcatcctgcaaggtgacaaaaagttccctaaatactgtacacaattattaaataattattaaggatatcagttgtgccaggtagcctttggaagaattacagccaaatcacagcttccttttccacagctctgccaggctggcttgtctttcccaccaagggctgagccattaatactgaggctgggtcagcatttgaaggggccctgccagggagtgccaggccttgggccccagagacctggggagtgggagatggcaagtgactgctgtgaggctgagacaaagtttttgcctacaacaccccatggctgtttcctttactgagctagatgaggaaagcaaagggaagtgatggtccaagacttctggtggtcacttttgttcatagatttctcacaggagtgctaacatttaggctcatgtttacgaaggtttgaaaccttagcatttgggaaggatctgcaaattctcagccaggggccttaactgatcacaggtagttgtgaactcttggtccaggctgtatctcaaggcttcttcttagaaggacaggtcagcttaccacctgctaactgcatgtgaaattttgaattctgccttctctagctctcctctctggctctgagctggtatctggcatttgcaaacagtttaccctttgttgacttcttagcactaacctcacttttatgagtctgagtagacttgatacccaggccatttatcctttgagggtgccctcagcttcatcagacccatgctgggcagtctggcatagtggtaagaggcacttggagccagacagacctgggttcaaatcctgacatcatcacatttactaacagtgtgaccctttggctgatgacctcacctctttgagcatcagtgtctccttctacaaagtagggacagtaattctttcccaggggtattttgaaggatatacgaattaatatttgtcaggtgcctctcagatgttcagcacaaaataaacagtgtataaatatgagtcctctcttatcttcctgctgtagagagaaagttcgttggggatgctccaagttggtggctactggctgaggatcctggagtaagaggaaggctaccatgtaaacccagagatgaatcatgaacaatgtgtattctcaggagcttagtatttgatatgggagcctaacaagcaaatagtgtgtccagtaataggaactgattaatagaggaaagattaattaaccttctaggtgggtggggtggaaaagtaggtggggtattgaaggttcaacaggagttcgacagagaagatagaccataaataataaatatacggctgtatccactagagataaagttacattgttttttatgtacatgttgacttcttttggccttgccaatgcactgatatattcaaattcagctcctctctttttctcttcccttttcccttcactctgcctttcctccagccctgccttgaaatactcagccactgaaaatttcttaaagaatttctttatactttagtaagtcctcagaggataccagttcaccctactgagattttacaagaactttggtgtagctggggttttttttgcattcctttttctacggtagatataagttcttttgggttgcccatcaatgaacaaactaccaaccatttgatgtttactgcgtgactcctgtataccaagcacatgtgccatttcacttagtccccagaatgtcagagcagctttgtgaaatgggctgcccgttctttcttatggatgaagaaactgaggcttaggtaggttaatatactgaatattatacatgtagtgagtgggaaagccacagttcacctccagggtctttttctccctctttgctgccttgcttggggtcctgctcatagtaggtggacagcagatgtttgtctgaacatatgagaacactgcctgccacgtgccggtcagtttgatttgtgctgctggttttgtaacccacatggggcaatgacagctgctcaggtactttcctacctattagtggggccccagggtcacacatcagtcataattgacaaaaaacacaatttccctttcctctcaacttttatttctaaggtacttgtaagcaggtagattagattgttaacttttcattttttgctttgtctctctcctttaaagactatgtgaaagaatacacagtgccctgagagcctggcctgggaatcagaaacttagattccagcttcggttctgctggtaactcctcagtcattatgggtaaataatattccctctccagaactactagattgtgtccttggtgcagtctggggttcgggtggtcctagggaccctgcctactgcatgaacctgttatcaccatgtgaggctggaaggatctcagcgttggtgttgggcaggcctgagtgagcatcctggctcctgtacttcccagctctgtgacctcgggctaatcacctgactccctgatgcttgttcttgtctacgaaggagggctaagaggacctgcttcccaggatcactgtccagattgaatgagaaggaacgtcggcttccttccttctgtctccaactcctgagtgcactggttttagactaactgggtgtttctgcagttgaaaccaaaacaccttcattaggtacaatgttcattatacctcgcaacaccctgagatactcaactcttagatttcttgaagctcttttttgttaagaaactcctcaaaggaagatactcttctaccccattgagctttattagtgcttcaatgacagcaccttattttttcacttttttcccccttgcagacagaagctgcagtgtgaatcagtttgcatttatataatttcttttgcatttctttgcaaagaggaaaactccattcatttagcaaatgtccgtcatgcccaggccttatgttaggtgaagggatttggagagaaatagagtcactgacctcaagaagcttacagggaggaaaggtgtaaatacataaagtgacacatgggtttgtcctgtcaccaaggtatgcagtagatgctgtgggagaagagaggatgacacaggttctctcttggaagacctcatagagaagaggtgacttgtgagcaagtctttttttttttttttttttttttttttttgagagagggtcttgctctgtcacccaggctggagtgcagtggcatgatcctagctcactgcaactttgaaatcttgggcttcaagggatcttcctgcttcagcctcccaagtagctggaactacaggtatgtgccacttgcctgtctgatttttttttttttaattttttgtagagacagcgtctagccatgttgcccaggctgatcttgaactcctggcctccagtgatcctcccaccttggcctcctaaagtgctgggattatagacatgagccactgcacccagccgttgtgagcaagtcttaaaagatgagtaggaaggagtctgtcagctgtagaagtaggaagggcccaggcagaaggagcacagggcagaggctagagccctggtaggaggtgacacactgggtgcatgtctggagctggagccaagaggtggaggacctaagtggctacatcttggcagtcacccatatattggcaagccccaaatctttgtaaccagcccagattgtcttcctgagcccccaactcccatacccactgcccattcagcagctagctgcatgttgaagtgtagtggtcttcccagacctaacataactaaacagaagtcttgatttgttccttcaaaaacaaacaaaaaactagccttgctcctcctcagtcttccccatgttatgaggtccccatcatttttacctggctacccaggcctaaaatgtgggcatcatctttgattctgcttcctcctgtgttcttcacatcatctgtttgcaattctttttttgtttgttttactggttttaaaaattatttatttattgagactgagtcttgctttgtcatccaggctggagtgcaatggtatcatcttggctcactgcaacctccgcctcccgggtttgagaaattctcgtgcctcagcctcccgagtagctgggattacagtcgtgcgctaccactcctggctaatttttgtattttcagtagagatggggtatcaccatgttggccaggctggtctcaaactcctgacctcaagtgatccacccgccttggcctcccaaagtgctgggattataggcatgagccactgcacctggccaatttatttatttttaattaacacataataattgtacatatttatggggtacatagtgatgtttcaatacatataatctgtagtaaccagatcagaataattaacatatctgtcatttcaaacattgcagttcttgacaactcttactgtatgtcctggaagccaccactgctccttattattagtttgtttctttatcaaccaagcaggccagaccactgctctaccctcgttcaaacctccactgtctttcagcaggtctcttgtcagtttgctacataggcaaagaggtcttttaaaaagcaaatttgtgtcatttccctgctctaaactctccagcggctttctggcatctttggaatggaatctaaacatctcgccttggcctgccagcccctcctgctcatcttctctggtctcatcccttggcactctctgctcactccatttcagctgccgcatcttttcttactgttccccctgttgtctcatgggctttgcacttgctgtcctccgcctgagctgctcttccccagacaccgcctgtctcaccttcactccacgctggcctctattcaagtgttctcccacctgtctgaaaaagcaccgttctgccccctctccccgctgcttcaaccattctgtcctacctcgctttggtttctctcattagcactcatcactctctgactttatatgatatgtttgtttgtcttcttatttagtgtttgtcttaccccacaagaatataaatccatgaagatgggacctggtcttatctattgcattcagcactctagggcctaaaacagagcctggcacacagtgggtgatcctgaaacacgaggtgggtggatggacaaatgactgagttaatgcatgcctgcatgcaagcgaagactttggagtttatttcataggcagtgcaaatctagtagacatctttcaggaggtgagtgacgtggtcagcacttttattttagaaagccagctggtggcagtgtgggggctggactgtaggagggaggcagcagaattactttagcggctgtgaaaatcgtccaggaaattgatgctgagtgttgtgctagagctgtggggatggagaagaggggacagatgacaggacctgaagatctttgagtgtctttgatttctattgggataacttggtatagtgattcctttataagaaaagcaggaggggacgaactggtccagggagagactgttgacactctgtggtgtttttctcaccaagaaaacctaagccctgggatgcatgttctctgtagtggcattggctctctggggagtgactctgctgctccgcagcctcccctgttccattttttaataagagaatagtcaagatggtggtgtcagtgagtgggagtcttcttcatgcagatggatccattgatctttgcatactccaagccacactaagtcattggttcttttctcgcagtgggtacatttcaccttatttgattctgatctgacaaatgctgctttttttcttttctttttttttctttttttttgtttaaagaatacctagactgtgctcaagttccaggtggggtttacagataactggggttccagcatctcccttcttacaaacacgaacaggagcctttgccgtccttgggtctcagggaggcagaccggcagcaggcacacattcctggcccaggcgtagccatgctgtctggtgctgccttttgagaccttttgtgtgtgtgtgtgtgtgtgtgtgtgtgtgtgtgtgtgggcttgaatgattccttctttcaaaaattcaaccctctccaaattttgatgaaaaccttttcatctctgagtaagcacattatttcccatcttgatgaggtgtgtcccctctgtgtccctgagagtatgtcatcccagccttttaaattttattgtatttttttattttttattttttcatactagtcaagtgcagtagtgagaagcggggaaagagtagaacaaggggccgggggcggtggctcacatctgtaatcccagcactgtgggaggctgaggtgggtggatcatgaggtcaggagattgataccatcctggccaacatgatgaaaccctgtgtctactaaaaatacaaaaattagctgggtgtggtggcacacgcctgtagtcccagctactcgggaggctgaggcaggagaattgtttgaacccgggaggcagaggttgcagttgagccgatatcatgccaccgcactccagcctggcaacagagcaagactctgtctaaaaaaaaaaaaaagagtagaacaaggagtttgatctgttacagactgaactatcaatggagataactcactaccttcggaccagcctcatcccagtcttttaagcctggtccagaattcctaatcctgcttgtcaggcccttcaaagtgaaatgctgtaccatctgtatagctggattctcacctcctacctctcctctcccttccaaaggttccgatgtcataggaatctacgctagagggcttcctgtgtgccgggcactgtggtaagcacttcacatgcattctctctaatccttaccacttcggggatgtaaggattataatcttctttttacagatgaggaagctgaagcttgccactgcttagtagttaagagtatgggcttacagccaaacagaccctggattgattctcaactagctggggaccttgggcatgctacttaatttttttaacctttttcacatttagaagataaagataatatatagagagataatatagaagattatataggtattatatatatatatatcttctatattatgaagataatacagagttgtgataaaaattaaatgaaatgaccagacatagtggctcactgttgttttgttttgttttgtttttttgagacagagtctcgctctgtcgcccaggctggagtgcagtggtgcgatctcggctcactgcaagctctgcttcccgggttcacgccagtctcctgcctcagcctcccgagtagctgggactacaggcgcccgccaccacgcccggctaattttgttgtatttttagtagagacggggtttcaccgtgttagccaggatggtctcgatctcctgacctcgtgatccacccccctcagcctcccaaagtgctgggattacaggtgtgagccactgcgcccagcccatagcggttcactcatgtaatcccagcactttgagaggctgaggtgggaggtcacttgaggccaggaattcaaggccagcctgggcaacatagcaagaccacttctcttttatgaaaaaaaaaaattaagaaaaataaaaattaaatgaaataacatgtaatttcctaagtacattaagtacgtgcctactatgcgccggacattgtgctgtcagcaaataatagctcatcgcagatgctgttatcatcatcatcatcccaaagccacagattgagtctgtaggtgaggccctgcctggctccaaagattgtgtttttttctcctgttgctcccaagttcacctgtcccaaactttctagcccctaagtttgcttccttgcgcttttctggttgtgccatttgtccctgtctgggcagtgggctcaagctaaggcacagcagttttccagtccctttgagctactgacctcttttctgtcattgactgaacagtttccggtggctgaatcgtctgtgtaagagcttggacaattttttctgattgttaccatcatcgtgtttactgtgaaagggcttcctgtatagttgtttgtgttagcagcattgtctaaatgaaacaagagtggcaacagaaagggttggtgagcagtcctagtcttttggggtcacagatcactttgtgagtctgaagaaatttatagactctctcaaaaaaataaacgacaagacaaatacaagcccagcatttttcatgagacgttttccctgaagttgatctggaaggctatgtgctcttttgtcattgtgctactccacattcacagccatgaagggtgtcatgtttctgcagggtgtttgtatttaagggttgttgggcaatttggcaacactatacctgtttcattgatactatgtgctatttgcatttatttcccatatctgagatacgtattcacacatgagaactggcctggccattttgatgagatgtacctgctgatttgcacataaacacaagccatggcctgcatctagaggatcgactggagaggcttttttttggcccaaaacatcagactagtaggaattttattatgagttatagactaaaaggggggataaacttagcttcagcagggtttaatattctcaattcaggtaagtgtaaatctctacttttcattttaaacatttttgaaatttcagtctttaaaaaaatgcttgttttttttccttccaagttttaaggtatgggtttgggagaaggcagattccaaacactttaactcttcgacctcagacttgcttatgagcctctctttggaacatttccagtgaaccgtggagcaagcctgccacatccagcagccgtaggcatgatgatcactggtgccgatggcccctccactccctgcctggcttttgaggccccgcagaaagaaaggaacagaatcctttcataaggaaggccccagaatcctttctcctgctgtagctatgctgccagtgtcctctgtagatggaaatggaacttggattttgggtgccagaactgaattcatcacagataagattagttgatataaagctgtttctgatgagcagtttttcctccagagttttcatttttgctttttctaaattatacaaaataatagacactcattacaaagggaggatcataatgctccatacctggttttgaattccacttctatcacttattagatgcagccctgggcaaaacacacgccctctctgagccttgatttttctcattgaatgggagatctaattattttacctcataatactgctgtagggattgaaggagattggtataaataatggttttctgagagtctggtgtgtatttgctttttttcagttaatatgaattgagtacctactaagagctggtcactgttctagttgatatggaaccagtcaagagcaagacagagagggtctccgctctcatggtgctcacattctaatcagaggaggcacaagaacacaagatcacttcagttattaagaaattagaacccaggggtagcatgagagtcacaggaaggacccctttacgtcggatggccagcagaaccctccctgaagagctcaatgctttgtgacccccccggtcccaagttttccaggactcctacttttaaaaacactgcccctccaagtatataggtctcaattttgagtttggaaaatctgaccacatattagttctcttgttcattaatgggcttcccatttagagagtgagttcctggggcaggagccatgtcacaggaccttttgaaggtctcagggccaatatggacgacacttctcttgaacactcacccagttgggctgacatgaaaacctcatggtgggaggtggggggtgattagtttccagccagagcccattttgctccattgctgctttgaacattctggtttctaaggagctggaagtagtttctctcagcgagaatgtggcacactgtcatctcctgattctctgcatgcagttcttcaatggcttgttgaggctgcgtggaagcccagaggtcggggcagttccaactcacacactggcatttgaacggcagagcagtaagccctacacctgacataactgcattgccttcttggggtacggtacggatttttaaatgaccatttcagcctgctgggctgggcaacggtgatccaaactgatgagtcaggaagccactgaacagaaaggcaggctgcatctgactcacctgtcatgtcgatagttgacctccttttgtttgaccttgatttgctcagtgcaattaaagatgctgttgtgagtgcacttctgctacctgatttaaataaagtctaacatgtgacagctcagggtcttaaatgcacacacgacttaggcagacggacagatgggtgagtggttagcctttcacttacctctgaattgtaattctatcacaaggaaagggcttaatttcaggaacacggagtaattatttgagactagatacaatgccaaagcagcaggccttgattccttgctacagggcagcttaatcaggaaatggcctagatggccgcctttcaagtaggtccttgcagtagcttggcaacaggcacagggtcataattggaagaatttggctgtgagtgtctgtgggtgtttacagtgcactatagggcagggcttctcttatttatagaatattttgagcaacaagcagcagaaggctgaaaagccactaaaatctcgatttatttttaacaaattccatttttctcctcatcccagaaggagaactgagttattaaaaaacagttaaaaaatacatcattgcagagcatgccatatctaattatggggttgccagcatcggcctgcagccacatttcaagggcttcgtaaatcaaccatccattcaatctgtgaacttatatgactcctgttctccatttagatgtagagcgaaattattggcaagtgggtgctgatcagaaaaagttcttccctgtctaaattaggagatgggagggataaatatagaatagtatacttatgttctcaaaaggagataaaatcattcttcattgtccattatacttagctgcacaaacatccatcccattgcactaaatagccactttagagttttcacacattgcaatggcagttctgtgccactcaaaggcgcagtattgtgatatctcgctgagcctaaacctgagtgattattgctcacgtagtcatgaagagacataaacccagtgcttttttgcctgtgttgtcgtagtgtactagagctacaaggtgggccttcagagagacactagttttaagtatatctcattgtaggtggggaagcagaggcctaggcaagggagtgacttgcctagggtcccattaagagtcatggcagaggtgggctggggcggcagtctctgtgcttctcttgacagtgccctgctgtgctcactggagctactgtattaaacagatacccttcaggggttcacagtcttagaagacacaggcacgaagatggccaaacaatcagcccatgcataagcagaccaagatatgtgtatataacagattagttgagtggtagagaaaatgagagtggggaattttggaatctatttggatagcaaagcaaaggtaacatcagttgctctctgacccacttgggaaaagcttatagagatgctatgaagttttctaatggaaaaaggtgcagtacatttgccatgtgttagtgggaaggtaagtatgatgcagtggtgggtggtaggaggcagtgaagataagtattgcaactttggaggagccctgggaatggattgttgaggtgatttcataggaatacgaaagggagcataggaccagggcacaggccagagacaggcaatcccaagttccctggagtaccctgcccttttctgggaaagcaagtgggtggcatgagtgctatgttcccaatgctctggccccacccctggtagaagaataataactgatcatggtgggttttttctgagcctctgtatctttgagtagcattctggtagccaatatcagtggactggtgccagcctgtgtggtgaacctctatctctttcttgccctgggctgcatgtcaggcacagtgcctaagccggagtgggctttggggagttacttctctttctgaggctggaaggggcagagggacgtagggaaaactttgctagggagggcaaactgtgaaagcctctggagaagtcacctgttgggataccaaaggccagcggttttagaggatgcgaagaggccgggcggggttggtctgggcctaaactaaggctgtagcggctagcatggagaggaacaagcgacggggagtgattacggatgaggaagacgtactaggatttggctacagacagacaaccaaccagagagtaaaagacagtgacatgctaggatgtgaaccacctactacagagaaggtcagaggtggggagggaggaatcagggctgtgggcagatccagcagctgggatccaaagctgaagcccttgggttattgaatccattctttctgagaagagatggttgatcttcctgcccagggagttcctagccagactggacagtggttctcaaacatggtgccaggtgttgtcagatagcaaacaattagtttgtacacagaatgtccccaaggtcacctacacatatttgtttttcctaatctttgatacctacagccacttacctgctttcgagttctcagagttgagaacatataaatttgcagtaacaagtgcacaggaaatacttggaaaatggctgatgagctttagtttggaaatttcatttttttcttggatctggattataatttcagtacaagctagcaatttttcttgttggtaaaatagtttctagttttaaaattatttctgtagttaataaagttaacactatttcatgatggaggctgccccagctctgaaccaattttcaaaaggcagattctcctctttctctctcttatttcttgctcttgaacatttcactgtgttctagcaacttttcctgtgtgtgactcggccaggagactgacttgagtaagatccaggtcaaggggttgtgtgggtgggtcggtggtaaggaggtgctgaagaacactaaaacctttgcctgagaggagtctgggaagtagcctgcgaactggaatgaccccaggcttcctgtcacggtcatagcccatggagttggcagacttgatcactctatattgtgtgcccccaggtaatggcattagtcatcgatactgtcttttttttttttttttctttgagagagagagtctcagtctgtcgcccaggctggagtgcagtggcgtgatctcagctcattgcagcctctgcctgctgggttcaagtgattctcctgcctcagtctcccaagtagctgggattacaggtacatgccaccacacccagctaatttttggatttttagtagagacggggttttgccatgttggccaggctggtctcgaactcctgacctcgggtgatctgctcacctcggcctcccaaagtgctgggattacaggcgtgatccactgcgcccggccaatactgtctttaaatcgtccagagtaagaaaatgttgatagcttgttgtcacagccctgtcattttacacattccctgaattattgtctggcaccagcaggtgttccagaaacacttttggttctttgagccattactggtcattcctgtcaccactgccaccaccagatgtggttctgagagcattaagtaaaagttttgaaggttgtgtatgttaagactggtgcaaagtccatcctccttccttcgggctgatcagccacaccctggctatcagcacttatttactcattttcaaagtgacagaatggtccagtgggcaggggcataaggggtcacttcctctaaccacccgccagtgcaggaggatcccatctgcgcagtggctgcccatgacaggcagttccctagccccagtcggacatctccgcaccaggcatcctgctcctgctttatggacatctttggctcttaaaaatcctcctttattctgaccgcagatctgccttttggcagtgtttccttagtgacctagttctgctttttgtggcaacacagaacaaaggtcggtaggcatggcacaattccagcttagaagtttgaaggtagtgctcatggacccacatcctttccctctccacccactctatctccctccacaaggtttatgttctccagtgccttcagccattctttctatggcatggcagtcagtattaatcccagtaaaggtaacatgtatccagagagtgcttgccatgggccaggcactgttctaagctccgtacgtgaattgtcttatttatgactcaaaatcaccatatgaggtgagccctgtcatcatcctcattttaccaatgaggcaactaaggaacgagggctcacatcttgtcccgagccatgcagtcaagcagcagagcagagatttggggctaggcagtgtgactccagagcccgtgctcttagttgtggtgcaagactatcttacagcctttcctgcatagtgccaaaaataagcccatggtgcactagacttgggctggccctgctttaacttattttgcaagaaatcattagacaggagccttagttgaaccattttctgtgaaaccttcagagtttgttttgacagaacagactgcagggcagaggcatctgcactgtccccaacaaatgggttcatcctgtagctctgccaggccccacagggttcataaaatggtagctttagatcaaggtgacaaatacagggctcttgatgttttttttttttttcctgaacatggtgcctgagcaataggtttcttgtttaaagtgcttagtcatggttttatggccagaaagtagaaggagagaggtacctaagaattgcaaaactgggtcatctcttcaagtgcctaatccaatattcagtctcagagaacaactccagcagttacgggggtggaaggatgtgatgaccacctaccatccaaaactgggatgtaggtgccaaatacacattctcctgaaatgatccctggtgcctctagccaggctcttccaggagtctagagaaagatggcccatgacttcatccagagtctttgcttcctgtgctctgggatgcctgggcttttctggccacagccatacactgacagggccagaagggctgagatgctgggattgaaccatctttctctttgtgagttgctttccagatagcacgcattccggtcactattttccagagatttaagcagcaaagtgagggaccctcgggcatcgactcagagacctggaggggagcagcttgaagcaatgtaaaaagcactggataaaatctggttctaccaaaaatagggctatgagagttacctcacctccctgaaaggtaatatctttatctgaaaaatggggatgataatactactaacctggaagattgacaggaggattagatgagattctgcatggacataacagtccttggcatgatgtctagcagtgaagaaacataaatatgagaataataacttccttcttcctccgctgtctattccttctcttattctagtcctgtctgctgttgggttttgtctgttgttttgggtaaatagctaacctctctgcctctttttgtctgtagaaatgctactggttctgaatgggtacttcgcgccccctataggacatcgtgggaatgtgtgtgggtgatctggatgtcacagtgacccagacgaggcttttactgggggaagaggggaaggcaggggtgctagatataatgcttggggaacaaaagattgcccaacatctgcatagctgcctaatgctcagtgcattcttgtgggcaaaaccctgcttaaaattatctgggcctagagtctgactccaattaacacataaacacaaataatttttgcatgtttttaatatatactgaattttctgcgaacacagctaccaagtatataagatttacctatttgttatgaataggtgcaagcatttcatatatctttcatgatgttttctggtgtagcggtgccccaatacttacatattgatttacatgttgtcttatttttaactatatttcctttcttctttgtattacagttagggcattatattgattatttttggaattataagtgttgtaaggttatattacttacagatttcaagagagctaaagacatatttaaaatatttttattgcatttttgacaatatgaaagagcaagagagagagagtgtgtgtgcgtgcatgcatgcacatgcttacaaattagctagaaaaatcctaagacagactttaaatgaaaagaaatggtttcatagctcctagaaatgtccttttacataaggatatgtagtagaagtccaaatttttaactgcattcattgtcagagaaatgaggtgttttgatgtttcccctgtcccttttagaaagtatatgatcctaaaagagcctgaaacagtttccattgtcatattttttcatttttgcaatctctatttttttcactcctcccacctgtgcatatatatatttaaaagcgtccccatatagacttttaaagaaagaaaagccagccaggctccccactctttactaagtttgttttgattgttttgtggcctctgcctgcacctcggcctgagtcagactgactctgggagctgtgggcaggtccaagggaaagtcaaggaggtaatgaggcttctcgtgggggcaacttgtaggccaagttgggtgggttgaagtcagtctaccagaagcttcctgcctcaagcctgggcctctacctgtcctgaaacctgagggctctccagttggaccacgagggtctgacatccaggaggatccccaggagagagcaaccgtcactagggaatatgctgcccagcactgactgtactgagcagcagtgttgtgtgcctgttgggttgatgccatggatagccaggcgttcagaactgaacacgacacctaaaaggcaaacacgaactgtgaatgtgccagtgtcagatgctgccttggtggtcatgtgtgggctggcagtaagcttttggtcccttaacactcgctgttggaaatttcccaaggctttcatctagggtagctggtgtgtgatttccctgtcctttgttactcctatctggaaactagttgaaatcttttctatgatattgatatagttacagaaaatctgaatacttactactaagttttatagttctgcttagttcaaagtaacacaacctcataagagaaagtttgaaacaggtagagaaattgaaagatgaaaatcactacccattatctcagcccacaaagatagctactatcagcattttggtttgtttcctttcagtcctttctgtgtttatgaaattttattatataaataattcatgtccaatatagaaaaagatggaaaattgagaaattataacgttaaaacaaaactgacccatctcaccagttggagatgtcttaatattctggtgaatttttttttgtcttttttctatagacacataagaagactgggaaatattgtgtatatacgtttgtaccctttttcaccaatgtatatcaatgtatatcagttcactaatgaatactaattaaatgaaaatttattaaatgtatatctatttatatctattgatatattaacagatgccagtgcatatctattaaaagagtactatgtaagagatgatgttcttaaacataaaatttaatttaggcatgaaattactttgtcaaaagatatatcagtttatattcagatatacagtgtactgacctgcccatttaccacatcttcactaatactggtattatctttaaatagaatctttgctaatatgagcagtgaaagtggcatattatctattaaattttgacggttatgagattgagcatgtttttgtatacttactggtctttgtgtttcatcttttggggtttcctattcatagtctctgcttagttttccactgaggtatttgcctttttattgatttataagagattttgttttgttttaactcagaaaaggtagtattgcttcagttgtcacagagctttggagtcagacagagctgggtttgaaccctggctttcctacttgtgagctgagggatttcaggcaatttatctgacccctctcacaattaattagttcttctttgagaactaaacgaaacaacactgactagcatgaaaaaaaagcctggtgtgtggtttctgccaatagtttttgtgttgttatttttgttgtgattcctgcactgagtattttctcagaaaaatgaccttgagctgtacgactcatgcctgttcagacccacagacacatgatactcactatatccaaagctcagaaaaatgaaactgaaatcactgaagtttgtgggttttttttttaaattcttcttgccagaaggagacaaatgaaggaaaaaaaacaagccgatttcattttcattaagaggaatttgtagagttatttctggggtcaggcaggatacattcagacgaacattttagatctagggctgggaagatcccgagactcgttatagattacatcatcttcctccaagtgcacttgccaggcaaatggacaagtgcattttagaaaggttttcagttgttcacgtttaaacagaaaggatcacctggctaacttttagttaacccattgaacagatgtgccattcccccagcccattggttattcatgtccttgttactggtttttgatatccttgccccgtaggtgggaggagggatgggtatgagcctgccctgccctctttctcctacttgggacagagctgttgcttttatttgctgagtcactgaagcaatagagcatgtgcagagtcccagcctggaggtgggcatatctgggttccagtccctgctctagcccttctcagctgtgtgatcttggacaagttgccatacctctctgagcctcagtgtcatcttctatgtgatgtcgatgcctcccccaaaaggtcgttacgaggaccaaaggagacacgtcagggcaggaaccatcctaggcacgtgtttgatgctcagtaaacgggacgtggtcagtgttcagagttgtgggggtggcaggtgactgctctgtttcacctccactcacagcaacagggcctgtggtgtcacctagacatctcataggcatcccacactgaacatgtcccaaaccagcagctcctccctggatgggtggatggtgtacagggacctcttcctccagctgtcacatggggcatgtacctggcaagtggctttgcagccctagctgcccccttggctgggggcctttgtgcagttcatggactgggagtcacccccatgtctagaccgtcaggaaacccattggcttttcctttagagcataccaagaatcaacttctcagaacatagcaagagttgactttttgtcaccctgccgtggccactcagactgactcctcttacacctcacatcccattgatcagcacagcccctggaaatatgtctagaatccagctgcttctcatcacccccacacctaatacagagggctgagtcatagcatctcttccccggactgttgtagccgtctcctaactcagcttcctgccctgcttttacacacacacacacacacacacacacatggtatcttctcaccactgcagccagacttaaaacctaagagggatcatgtcactccccattttactcagagtcaaggccaagatccttactggggtctgcaggcccccacacctggccctctgactgcacccctaccttccttagctgtctcctctccctagcatgccccaggtcgctggtcccctagcactgggcagctccctgcggccctgttcactagctgtcctctgcctggaacacatctgtcacctctcacctcctcctgtccagcctccttggggcctttctaactgcctccctcctgtggtctgcctcctccccatctctgactttcctcccgagcacttactgccatccagcacccgacataacttacttgtttcgtttgcttgccttcctcaccaggaggtgtgccagatgaggacaaggatttttatatccctacccccatctgcagcactgccatggagaacagtgcctggcacttggatgccctcagtaaatatttgttgagagactaataagtgatcgtgggccagcatgccaacagtgtcttcgttattacaaaattgtcccgaattgaaatttggctactacaagcagtttgtggtggaaatttactcaaattaccaattctttcactgaagaaattacctggcatatgtgggttctcaataaactgtgttggattgcctcaaggctttggggcagtggtagccgtctgaggcctccttgccagtcaaccaaaccctgtgctgggtgggacataagagatgcccccagcatccttagctgatgctactatgtcaccccagaatccctggggcagcccacccctcagcagcagctgtcaccctgctgggttccgcttttcctcctgtgggcttcgtctccctaaggaaatcattgtccttgctttctacatcttatctccctgagcagctccaaaattctgttattcatatcccactgacctttctcattgtcctagtccaagcttctcacaggaggagttgtctctctgttttatattaaaacaaagcggttggactcttaaaactctattcacttttcagattctttggagtcctcaatgcttcctgctatgaaatgctgcgctctggaatgccttccagacccacccccaggatacctgtagccttccctgcagccactctcctcaactccctcctcgttcccaggggtcaatgtcctggatctctccagctttaagttccttcatgtcctcttgccacccctgctctcaccatctctgagttcttgtatccccaggatttcaacctgagtttgcatctcctgacatcacttttcccagccttctcccttttcaaccagcacaaggccatccacttccatggccatagtggacgccactgagcatgctaggtgttttcttctattcaactcatgtggtctgcacaacaacccagtgcggggaatccacccctttcacagatgaggcatctctagctcctggaagtcacctaacttgcctaggacatgcagctagtaagtggcagggctgggattggaacccaagaggccccgccctgaccaccatcctgccctgcctctcctcgggcacccagaatcccctcactctattgtcaaaacccaccttgtcctgcctgtctggtacctaggggagaaccctcagcctcttcttctgctgccacttgcttcctcttctgccaggaaggtcccacgcctggccagcctgctctggagacacgcccactgcctggccttgccaggaggctctgatgctctgcaggcttcctgtcccacggatcccttcctgcctgtcctggggtcccaccaccccactttgtagttggccttgctctttattgtggtgaaaggtgcaggccattccatccaagatcctataatattccttttctctgctgttgaatgttcttcccattccccccacattctcaaagaaggcatgtggctttcttcactgcgtctcggcctgccctgagtccagcccctgctgcctggcccagcctgtcttgttggcatcccctaagccctagccagaaacacaagcacctttcaggtgctccatcctaactccaccctccctcacactggcctctctccctttgccaccagataacagcagtgcattcttttgtttcctttagaacaagatgcagatgttttccagaattttcttcaacttcaggcagtaagttttttggtgaaaggagtattactccctgagtctgtagaaccaggctctctcctcttattctgtagcaattaaagacaaagacaggcaagaaaacaatgaaaagaaacaggagccaggctgatgcaccttcatttagctggtccttgagcatgactcattgatccttcttgcttccatcagggattgcaccctgtgccctctttgaatgcaggggcatgtcaaggccaagggtcaggaagagagctttggcctcgccagcctggtccccagagtggaagtggcagggcaggaggggtgtggcagacagagcacatatcgcccccagccttgcccccagatgttgagtgctgggtgccggagtgcagaggggaacaaggcctggaccctgcctggggagaggcagcacctgggagatctttgtggcttcagatcccatgtggtcctccaggtaaagcagagcatctctggggtctaggctgggggaaaactcttgcaaaaaattcctggttctgggacagaatgcatggggtctgcgtgaggggcagaggacagtgccaggccagtgagcacgcactgggcaaaggaagtggccagagaccactcataagaaaaagtgggacatgaacctcagagcctgggctgctttcagaggagccaagagcctgggaaataagcatcttctggtgaggaaatcagcagggggaggggagggtcatacaggaggggacttttaatcctgaatggccttgcagggcatggttcccctagtgtgccccatggaacccttggctgttagatgtgaggtgataaatggtgtgtggatgcatacacttgggactcagactctgctgcccttagactttcaccctccacagggctgcgtttaaaggtccaagaagccctgcagaagaaaaacctaactattgaaccagcattccctatacgtatttggcccctgattttttcccccgaataacatcattacaatcctatgggattagtgttccatggcagaactttgggaagtgttttttgaagaatttgtaaatccctgcaccctctggactgtgcccatttcttagattgcatggaggctgtgctgtacagtggaaggagtatgggctttagatgggactggcctgtgtttaaatctgctttcccattatacaaaatctctgatcttgatcaagttacttactctctcaaacttagtttccttatctgtaagacaggggatgaaacattagctagttgtcttatgaggctgttgtgatggttaatgggaagataataatgacacttacagagggcttgttatgctccagacaccattctgagcactttatatatctcacttacttttcaccacaactgtgaggcaggtaatgttatccttatcctacaggtcaggtcaggagaccaatgacacatacaggctaaatgttgtgcccaacatcacacggctggtaaatgtgggacctaagatttgaaccctaggcactcatacatgatggggtcaggatttgaaacttgaccgtcatctcccatcagagaacatgctctgaatcagtatgttctaaagggtctagagcagtaaaagcactaattggtatcagttcccttttcagatggttcgtggatatgttagggggattgatggttcctgggactccaagtcattctgcagtcattaaaatcagccctgttgaaagagtaatctcctcgatctgcttgcccactcagatgctcccattgtgaccattttgtttgctctgctgcctcatcctgggccacttcaatttgggtggctgctcagcgttcaggtggagtcgggccactttccacagccatctcatctgtggcctgtgcctccacttccaggaccaagagtccccccaggatgcccagtgagttggtagcttgttctctttctacacctcagtgatggacttgacaaagggttaagaagacatcccttttatcattcagcaaactgagtgcctttactgagctagatgcatgccctgggggaactagcactgtttggtgacttagttagacctctgaatccctctaccaaccctcagtagctgtctgggagactgggattctgtggactctcctctatcaacgatattgggggtcttttccacaaagaccagcctggttttgattgacaaagtgcctcagatttacaaatcttaccccttgcaggatcctctcaactgatcaagccccatagctccaaatgccgtctccttgattgatgtttaatttggggatccacaagcatctagagctaccagttgaatttgggtacccaagggccacaaatgggcccccctcacaccctgacccctgacaaccagcacctttgagactgaagtaccactgcatatagtgctgtcctctgctcagggcattctccctaccagccaggccacccggcaaacccctgcaacacctcataagacctcttcgctggtctcatctccttttattaacacctcctcagcacccctccacacacacccaagcccacaagcaaatcattttttcatctgttttgctcttgtaccttacctatgctccactaatacaaaaaaagcacgccttcctcaagacacttgactgccacctgctggagagttgtcatcatggctcaacaaatatctgccacttctaaacccccaggcacctctggagtagggcagtgcattgcttgtacagctgtaaacatggcctgcctgttgaattggtcatgctgtcatgtacttattaaaacactcgtctttctaactggactgaggacatcttgaacgtaaggactgccgatttctgtcttcgtccccattgtggcttctgctaggggctagagaaatgcttattgaatgatccttgtgcaaacacctgttaccttaggttcagggcatctgctgtcattcagtgaaggtcttctaaatctgtctgttgcaaagcaaggctcgccacaggctgtcagagtaaccatggaggtcggacaggacttgcagtggggacagggccccatcagcctctcacctctgctcagaggcaccaccctctgaacagatcagagcataaacaggtcagagcaattcagcattcattccctctacagacatcagggcaggcaccatgtagtggagagtggggccaggggccatctgccatggctgtttgggctggggaaggagagcagtacttctggagcatgtgctgtgctcagggccagctccctgtaggtaggttgtgggaatgcagaggtggcaactcaagcacccctgctggggattcagagttttgtggagaagtagatcagtaagcacatggataccagatagggttgtcaaggatgttgattcactgttgtccctattttcctaagctcgccacatcatggaaggctgctacccaagtgacattcttgggcttcaccaagtgttttaacagagctccacccagctgtcacactaggggtaacacagtgggccagaaggagaggcaggccttccctggggtcccattttaaaaagggggaagtcctctgttcttttacaacacttgtttaccccaagccattcagcatagtattacttaggtcccatacagagaaccttccaacagatagctctccttgctcaggcctgtcctgatgaactccctgatattcttccaggtcttaaaagagtgagagctgagcatttccctctctgccctggctgccaggaagctcagagataacttgtttgctcagttcctgtagctttcctgacccaggacttctttttcttataaattctccttgttccttttccaggaatgcttgctttttatgttttgtttgtttatgttgcttttgtctctgtattatactttggggggtggtttttggaggcaggattggcagcagccatggtagttagaagcaccagcagtaaagctggacacacctgggtttcatccccacttgctagctgtgtcattttaagtaagataagttgcctcttcagttctcggttcctcaccttgaaaattgggataatgatcataatgaatggataggttattgtgaaaattaaacttgtttattgtaaatgcattgtttcctgttcctgctcttggatcaggcttgatctgtggctgtagaatcctagtcttaatttccttcttcctgcctgtgtctgtcagcatatgatgagttgtacaatagtagtgactaggggaccaaccatcccggtttgtctgggacggaggggtttcctgggatgcaggactttcagtgctgaatgggaaggtcccaggcaaatggatgagtcggtcaccctggtaataaacaacctcaacatctcagtggcttactgtagcaaaggtttatttcttcgttgtgctactgtccatccagggccttggctaaaggaggagcctctatcccaggaaattgacagtcatgggcacagacagaggaacacatgttaaaggtcctttagaaagttgtggctgtcacttctgccctcattcactggttggggccagtcacatggccaggcctgccaccaggctgtgcagaaccttcccactgggtgggacagctcagcctggaacactgatccactctgccaggctcacctttctcttcttttgcattttagggtgctggagcagggaccagggaaaggagagagtcacttggtctgaactgggggtcttggatgtgatcatcttcctgtagatggtcggtatgggtttcttaaggggcagggttcagcttcaccctgctctgctcagaggagcagctgtgtctcctttggacgccttctagtggttgatgccctcacctttctcagctgccaaggcctctctcgacagggcaggctgggctgtgacttctcttccaccctccttgctccttcctgtggagcccctgagatcctttccccatgctcctgggtggaatggagggtgccctctcacattcttccaaggcatcttgcgcaagtccctccatgccctgctttctctggcggtccagcatgcctccatctcacctttgggactctctagcttggaagtgggcacacctgcagcccctgactccaggaccacaggctaggctctccccaaagcatcctcatcacacaccatgtggatggccaggtcagggcggccgtcagagcccaccctcggcaaggataccctctcaaaggcacctctgttggctcaaatcccttttggaagtagcccagaaagaggctttcttttttcttatcttttgttgttttatttattgttcttgcatctaagaacaccttcttggtcagaaaacagttttccagaaataatgttaagtaagtgtcacaactggtttagctccctaacctggtctaagcatataagagaggcttttgaggctgggcgtggtggctcatgcccataatcccaatactttgggaggccgagatggagggattgcttgagtccaggagtctgggcagcatagtgagaccttgtctcttctaaaaataaaaaattagctacgtatggtggcacatgcctgtagtcccagctacttgggaggctgaggtgggaagatcacttgaggccaggagttctaggttgcagtgagctatgatcacaccactgcaccctaacctgggcaacagagtgagaccctgtctcaaaaaaaataaaaaaggctttttgatttttgttttgcagaagtaccaaaatctatattagcatttattatttttatttctataaagtaaatttgagtattgggaaaattgatcaaaatgagaaatttcatatggagtttagtacttgaaatttggatccttcatctaaatttcagggaagtcagggctgggcatggtggctcacacctgtaatctcagcattttgagaggccgagatgggcggattgcttgagcccaggactttgagaccagcctgggcaacaatgcaaagcctcctctctacaaaaaatataaaaacaagccagacatggtagtggtgcatacctgtagtcccagctacatgacaaactgaggcaggaggatagtttgagcccaggagatggagattgcagtgagccgagatcatgccattgcactccagcctgggcgacagagcaagactgtctcaaaaaataattaaataagtaagtaaatttcagggaactcagagaacgagaaaggacatgaaattgttcatttatttagcatttgttgagtaccacctggagtgaggcacgagatcaggcacaggagacgcctataaataaggccctacctgcctgaagcttatgggaggtggaggagacacgcctacaagcagagaatggtcacagggcgtgaaggagcctgggcaggagctgctgcaggagagccagggagagaggatacagctctgaaggcttctccaggaggtgtgcccacgggcacaggaaaggaaagcaggagtttatcaggtgactgggtggttgaaaggagccacacctgcaagaaacgtgggcccagcagaggcagggtggttttgggaactcttgtcttttagtctgtcggggggctttgggtagcagatgggagggttgggctgaagactaagcagtgtttcctgctgggtgggtttgaactttgtttggaagacttagggggaacagtgaagctattgcagtggtctgagcaagggggtatcccgcctctgaccacagtggagaggggatggggctggagacgacagcagactgaacagaggcagtgacaaggatctggagggaagtggctgggcccatcccttagagggctgtgtgggggctgtggggtgtgggaggaagagaggaaggaagcccagggtaggttctgggttgctaatttgggggctgggaggatagcgtgtgacctaaacagagaatcagatttagatggaattacctatattaagcctggggatttcatatctatttgctgctgctttaccagttgaggctcaagaatgagaagcacaaaatttctggtcacattatttgcatgtgcccagactggggttaacagaatcggacagtgagcgttcctgaatcagactgcaatggggaatgaatgccttgggaggctggaagcagttgtattcgcagatattcatttggagatctctatagcgatcgaggcaaagataccccaaagactgcaagaattagccagtggaatttgaaatgccaaaattttttttcagaaaggtcaggaaagccccgtttaaaatctaaattttgccatctcaaggcagtgcagggatggattaggaggatgtggggtgacccttttcttcctttcagagccagtttctgccagacacaggaatcctccacatgagtcatagggtggagaggagacccctcagtcctttcagtaaggtgggagggcagtaccgcccggtggctaccatgaaccctgtttcagaatttctttcttaacttcgtgtgtgcccaggtgcacttgagattcactgatgttttctttagaccgaggagctcgcttcagcagttagtttcaggtgttggctctgctggcattatgcttcggcttaatgttttctgaagacttgttttctgttgtttttcattgttcttgttgtctggcttcaggccactaccttcaacctagcaagagctgagtggtgccttcagcagtgaggtagcttctgaaggccaccactctcttgctgtgtgactttggctagtttctccacctctctgtgcctcagtctcttctgtaaaacggagaacacaggagtatctccctcatagagttactttcaggtttcaatgagttaatctacataaaacaataaggatagagcctgacacaaaatcacactcaacaagttttcacaattatgattacttgacccagtaggagaaataaaaaacacaactaacttccttctaaggacatgcccaagaatccagttttagtaactttgaaggcattgtttttcaccgaaaatatctcctgccagattttttcatgtgtttgcagcttagctttaacaaggagctgaaggacggccaggcagcaaggggtggtgagtgccggtagagtgtgacgagctcgcccagccttcctccctgtaattaggagtcatgaaccatctacaccatctcccttagctaataagagatttttacatttacttacctcaaagtgacctgtctgggttttcttttcttgtggcccccactgtaggtttttggaagaagctgaccgcctgaaaagaaattataaaacatgaaaatcgctttgaggtgaccaagtccagaggcccctaactcctcccaagctggatctggggtgtaagaactgtgacttcaggtaacaaagtagtatcccctccctgccccctgtgaactcatgattcttggtagcttgcatggcagttcttcctttaggaagtgtagtttcttccaggaactctgaaacttggggtattctacctcatgcggttgtttggctggtcaaaaaagggagtgggggattctggaggtacttcatgtctgctgcatggcccaagggggccagggctccataaatcaccaagaccctgagggcagggctctgtactcattcctggccctgcttctgtaaatgttaatgacaaaataacaatgtcacccacccaacagggtctttaatatgattaaataatcatgaaatacttcttgaaggataaatcagagagaatagctaggaaatttccaaaaataaagagcagtaggagagtatttgttctgctagctattaaaatgtattctaaagcacagttgtaaaaacagtatagtactgtgatggaaataactagatcagaggaacagagtagagagtccagaaataggtgataaatcaataaaggtgtatttcaagttagtggcaatgggatgcatggactagcaaatggtgttagaaaaaatctcctatccattagagggaaataagaaattcctaagcttaggtagtatatcaaaataatttccaaatagcattaaattaaaaaaatcattaaaatcttagaaaaaagaatatttatattattttgggtaagaaaagacttaaaacatgtcacttttggtcccacatacaaatatcgtaaacaaagttaaaaagcaaaagggtgggaaaagtgtttacaacatcaatgatgaacaaagaattaatattcttagtatacaaatttattcgttcattcaatatttattgagcacttagtatgtactagaaagtattctgggcactaagggcacaagcagtaaataatgttcctgttctcctggtacttagaccctgatggagaggactgccagtgactatggtagattattgtaggtcacattttgataagggctaaggacaaaacattacgtaggtggctgggctagggaggcttggcagggtttgcattatgtggatattcaagggggcttcactgatggaatgacatgtgaagaaaaagggaaagtcattgaatgtcgagctgatagcacatttgctgtttttggaatgtcgagctcataggatttgctgatggattgaatgcgggttgtgaaagaaaggagtcagggtggcttctaggtttggggcctggcaaccagaaggattgacataggaatgactgagaggcttggcttggagatagagttttggttatggatgtttcagtttaacatctctcttgtatattcaagtgaggacgtcagggaggtggtcggccataaatatctgtaattcagggtgacatctaggctggagatataaatttgggaattgttgcagtgttgatagtatttgaaagaatgacactagctagagcccctggagagtgtgtgtagatacagaagagggcccaggacatccatgggaccctcccttagagttgagggagatggagccagctaaagagagcaaaaaggagtgaccactgaaatggaaggagtcccgtgagaagggggatctcccaagccaagagacagtgagaagggcgaggtcagctctcctctggatgtgctgatgggcaaggagagaactggccattggatctagcagtgaggaggtcactggtcaacccaacaagggctgttttatgggaatgatggggagagaatctgtttggagttggattattgagaataagaggaaaaaaactggagacagagaaatgggacaatagctggaggaggatggtattcaagtaagtttatttttcccaagatgggagttacataactcttgttttcacccaagtggaaatgattcagtagcgtggggagagtggatggtgcaggattgggctggggtgagggttctgaaatggtggtctcgaggaggtgggagaggtagaatccaggcatgagctggggaagggatcctaagtaggagcatctaaggaggtggtaggtgtgcacctgcctcttttctcagttcactaagaagcagagtcctcagcggagaatggagactaaggagacgatggaagtttgaggagagagggcaaagtatgaagtccttcatagcagaatgagaaaataaatggccaggggaatgaaggattgctgggcggcatgcaggcctctaaggggtatgtttctccagccatgtcctgttacacaggtgaacacggggtaggaggccattgtggtagaaaaacaggacatgagcagacacaacgtaagacagagaaacgcctgtaaagagaaaaagcaacatcagtaatagctgaagaatacaagtaaaaacaatgaggttttctttttttctctttagactggcaagagctcttgttggggatagaaattattgtcgcttttctggagcacagtgttacagtatgttccagaatacaacgtgtgtcccgttttgacctgtcagtcccacctttagaaatttattctaagaaataattgctcaaatgcaaggaaatatatgcacaaagatgttcaccccagcagtgcttatcaaagtgaaaaaatggcagtcatctaaacaggaggcagctggttcacttatctgtcggcctaacagtgatagtgggaaacagtagctcacactcaccctcctgttttgcagatgagggaagttgggtccagagaggggtagtgacagctccagtcctactccacggagctcagaccccctggctgtaggcaggcaccctgcccaacctcttcaactgggcttggagtcagagtcccttgcaaggcacttgtcaagcccttttcaagggccggtttgcttaatgcttttaaaatacgagttctcaaaatgttttgcaaatttgtttacaatgtcttcatttcatctcatggctttccttgcaaaggatgctgacagtggggggaaaacaggccgactgcctggccgtgatagaggggaccatattttcctgattcccaagtaagacttacagtggaagaaaggatattttctgctttcttacagtgtttacaaaagtcataacaggatgtgaggactatctggctgcaacatctgtcaccccattggtcgccagagttgattgggctgatctggctggttaggcaggtgtcccattcctccctcaccactccatgtgcgtccctcccaaagctgtatgctcagaaaggatgaccatccccgatagaggaggactggtctttggtcaagggtatatgagtagctgcaatcttctgctagggacccccaaacaagctctcaaaagtcataacaggagtacaaagataataaggaacttgcatttatttgtttccttgatcatatgtttattgattagaagaaaataaaattagcagccagccgtggtggctcacacttgaaatctcagcactttgggaggctgagacgggcagatctcttgaggtccagagttcaagaccagcctggccaacatggtgaaaccccatctctactaaaaatacaaatattagccaggtgtggtggtgtatgcctttagtcccagcttcccagcgttttggatggctgaggcacgagagtcacttgaacctgggaggtggaggtggtagtgagctgagattgcaccactgcactccagcctgggtgacagagtgagactttgtctcaaaacaaataaaaaataaaaataaaataaaattagctttgtgtgtggagaaaagggaggaaaaataattagcattgtcagagaacatctgggttatttggtcccctccgtgggaactgccctgggttttcacttctagagtttctggttctggtttaatttttccacgccacagcacagggaccgagaagctgctcagcttctctaggcttttatgtcttcaccagaaaaatgagcgggtgggcttaaatttcctacaaaaactcttaaaataaatatgatgctctttccattctatcacatgcctgttctgggtccgggggtgtgagagatgcattagtgctgctgtaaaccagccccgggtctccccccccggccccccaccaccaaacccccaagcaccaacctgggttctccaccacttttgagagctcatcgaaataaacacacctttgtgcctcttgtaacaattccagatcatccaatggcagaccagagaatggacatttcttcaaccatcagtgatttcatgtccccgggccccaccgacctgctttccagctctcttggtaccagtggtgtggattgcaaccgcaaacggaaaggcagctccactgactaccagtaaggcctttggggcatgtcttcctcttgttaaacttggtgtcagttctcgggcatggaacatctagcagccagctactgtttcatcctggaaaaggggatgggaataaaaaacccaactctaggtggcgacacagttggtttttggctttaccttcccctagtttgtaagcaagaaggagccttcagcagtgctgaggcatttaacttccacttcctgtccccaaaatgttctacacccagagaaaaagaacagccttaaggccaagttctgtcttttacccctttcttcgtcttctttctttgctcctttgagcaagagggttaagtctatgggtgtcatctcagggggttcaaagagagctttgcctgagggcctctctgaggaagacagcaagtgtcaggtgcttaatgaatgtttatggaaggaatgagtggaggtcctctctgaaaacaatttaggaacattgatgttgtccttaaacattatttaaattagtatgaacttgttatattaaatagtatttttgtttatttttagacttgttgacttttcgtttgagtaagtaaattttcacacttacagtcatcccttctatatatgtacaaacacctagggaataaggcagtgtagaatattcaaaggcacattttgttttgccgaagcacctgcgtggaatcttacccaaatgtccatttaagaggttttcttttgtttaatgagggaaaatctccgaggaggtataccccctacagcagatgtcctttctgctgaagttcacaggtcgaatttggggagcacaatggctggaggtcagatgcccactaggagatgctatgattaatatgtaagttatcccagatgattaagacagccaacacccaggggctggagagtgggtatgagggctgtgagggcgttcttccatagcagtaactccccagcagaaagactgcgagatgttggccacaaaccctttgtcttgagcaagcgctaagggagccactgatgtgttctaaggcctctgtcatctggacctgtgggttccagcctggtcaccacccaagatttcccttgtggactctggtttgctaatcttctgtaattcatggagactcaattaattaagcaaccttaatccctttcactatcattttaatgtaactgaagtcatctgtgactgtcaggcagagctttttctcacctgagattatcacctggcctcaaggaacagatagaattctagacaaaagggagaggggagtttttgtccttccgtgcggcctgcgtgatctctgaactttagaactagctggggaaactctctgcctgtgaggaaccccagggcgtctaattgggaacactgttctagaatgcccatgatatgatccagtgctcctagaaacagctatttttgcccttgggattacattgtttgaagggccatgctctctcctttcctgtgggataaaggaaaaaggagagaggcccagctggcagtccatgccctcctgataaatgtatggattggagaaggcggtgagggggatttggaactccttcctctggggatttcagtctgttttcttctactgaaccacaggatgcaacgaaacttggttttctgaagtctgtgaaagggagggagatccttgctgtgaccccaggacttctgtggccctcagccccactacgcccctccatcccaattcctaaaatctaggggttcccacctacctgagaagcagaatatttggcagtagtgcctttgaaaagctgcctggggctctgctcagtactttgttggtactttaattccaccctcctcacttcgtcccttccctgccaaatagatatgtatgcacatttatctttgatgctcaatatgttttgcaaacagaataagcttcatttatccagaatgatggggggggagaatgagaggttatatagatatttcaatcctatggttaactaagcatttttataaacactacatattcccaattttcaaacaatcagaatatggtaaaatatatgttaacacacaaactcttttgagatgataacttttgtttgataacctgagaagctggtccaggttttatagtaagttcaagttaattttcatttgttttacccttattatacatcattaattgatactgtggctgttcgaactttatgattgtttggtttctggataaatgagagccttctgtcttatgataagaagctcttctgtatgtctttattaacatgcagtcacattctcttttgttttttcagagaaagcatggacacagacaaagatgaccctcatggaaggtaccatgaacctagtaatttgaacttcagcatccttatagccattttctttgcactgttacacattctgttacttggggcagcacccatgtcctcaactggagatgagcaaggaggccgtgagcctgtgggcgctcactgtgtccctccaacccccagtccccttgtgtgtctgcagagagatgacaggatcaggcagaagaaaacagcaatgtgtaactttgccattcatctccagagaattatgtttttatcttttgctttttcctccccccaggttagaatatacagaacaccaaggaaggataaaaaatgcaaggtaagcttggaccttattttgtctacaaagcatcctagttctggttgcttagagagcagctgaggaggctctgcatgtttggtcctgtctaagagttctgttgggcactgtcacctccttagggaataggcaggtagtgggccttggccgaggtggccttctgccctccatgctctccatactggctggcctttactctttgctgtctaagcacctttaacctgaagtggatttgaaggtagcagaaatcaatcaaggctcaagtttttccccagtcttcagcagagaacgtcttcctgactggagcgccctccgcaggagacatggctcagtgatttggttcctgggctgggacttgcctctgtcaggggcccctattgcactgcgagttgcaactgaatgcaccacatggggcatgctcggtgtctcgagtagattctctgcctgggtctgtcctgcctccagccacacttgctgacctcttcccattgcgtcctcagttcttctgccgttagtaccaggctgtgttctgaggctgcgtcatgacagactgatacagggggctgcagaaattggctgccctaaggcttcaagctcttccctcggaggccagccttagcaggagctcccatggctctgtatctgcggcagctgcagcaaactacatttccatcgttgctgcacctccttaggaggaccatcaccaatggcaggtgcacatcagtcagtgtcaccctgcctcagcgggaggagtgtgacattcctcagaggaggctcctggggacagatgtagcatctgctgcacctaggtggggacctagttttgatccaaggatgacggcgttggttactgggtgccctagtcagtgaggctgtgactggaaagaattggtgccctgcccaggtcacatggccacacagcgggctcctcacagacctcagggacagcccacggggctctggatgctctgtgctatgaagccaccacctcccttctctttcctttcacccccatttcaaaatccaatttgacaaaggctgagaggaaaagaaacgaggagaaatgaacaattcagtttactctgaagagacaatttttgtagcttttctcctgaattctaaagatgaggtaaacataaaaaaattaatactgacctggcagtgagaccattttcttggagactttagttgaaaagtctaattttaaacattctgcaaattctaaatttgccttgtcagatgaacattgaaaacagttacaactcatttatttttgtcatcttttcttgatgcttggttacattttataagaaatcgtttttcatattgttgttcagggaagctcacagtcagattgaaaagcggcgtcgggataaaatgaacagttttatagatgaattggcttctttggtaccaacatgcaacgcaatgtccaggaaattagataaacttactgtgctaa

SEQ ID NO: 15443 - DNA, 80802 bp, Homo sapiens
cgggcgttcggattggctggcgggaagaggcaggtatccgggcgctgcggctcctccattggtgggcggggaaggggggttgggcacagcgattggtgggcggggggccgggcctgggccggcggggagcggattggtcggaaagtaggttagtggtgcgacatttagggaaggcagaaagtaggtcagggacggaggtgcctgtttacccgcgccggactcaccgccgccgccgccgcgggatccgagtgcgggcgcgggcgcgggcgctcccggcgagccacggtgagtgtcaggccggcggcggccagcgacgcgatcccgcgcaccccgtcgggggccgttagcaccctcgcgggcgctgcgcccctgccgccgccccgggggcaacccggccgccgaagaaccctgcccgacgtgcccgctgccggccttaaagggcccgtgaccgctccctgcccccacccgggccgtggggaggctgcgccccttaaaggcgccgcgcccgtccgcccccatcctcctcgcgggggctgccgctgcgggctagggcaggcagaggtgctgcaggagcccttaaaggggccgggaaagtgttcgctggagtacccaccgcccttccgcgggcatcgctacctggcggggggagggggcagctagctgcctcttaaagggatagctctgcccttgggggcagtgactcggccgaagaggactcctagatgtgtccccgggagcttcggggatccccgaggggaccatgcctggtggctgcccctcaagggcgttgggcgaacggtgccgcgtctgcccttcctccccgcttcacttccctttcgggagcccgcgaggctgggtgggggcggggagggcgtctccgtcgggcttggggagtccaagtccgcccgccccttcggccctgtagccagggctggcgctgcacccgggaatccccggccggcacggggccgaccccagcctgcgaactttcgtggggcctgtgccgtccaggtcctgggcggccctcaaggatgccccgtgggtctgcgggcaggtgcgcgtcggcctggggatgtcgcccggagcccgggtgcgggccggccttggagtcccagagctccgcggagggcgcagcgagcctggctccagctccgggtttgacagatgtcagggaagaaaaggttcccgctcggctattgccgggcgttgacatcccagagagcttcccgtttgcttggaagaagacgaggaaggtagaggtgaacgtcgaccttgtggggcgcatgttagcctccccgaggggtcgcgagagccggcagcggggtgagctcaggtgcccgccggcaggagctggggagggaaggggagtgctggacaccggcgcctgctgtcaagttctcgccggccggtgagagacccgctgccgccgcgcaccccgcacctcctgacccctctcccctctccgcctcggccccttcccggtcacctagcgttgttttggcgctttggcgcttgcggtctcttccttcttccaccgctactcctcagcgaggaattattagccaagttttctcacccagcttccaaaaatcagattccgtatttgtgaacaagcttttcttgacactacccgtatacccgtatttccagcatcgtcgttttattaaacatccataaaagctgccccttagatgcattcatttcccacgacacctgcttgcttgtcatttgtccttctgacatctgctgttgttcacccctttaatctattattaaatgacaactattattttaattcttctggtctcattgatatccggatctgtgaatttgggttggtggagtttttaattaatgtacccgttgaatcatgagcttaaaataatcattgctgctcctgagcagttttgaataatatcatgctctctctgcttgcaagacttaaaaaaattcgctggtgttatatttgatttccatatcaatggaattcccaaatatttttgaaaatacaaaattcagtctttcagtccatgttttgttactcagatcattttactgataagtctttaacgcagcttatagaacatatttagaaggtttggaaatttcctggacaggatttgaaattgcctgtatcatctgaagctggttctgtagaagcattttggttttgattgtagatgcagccagtgaatgataacaataagttaaaactgtagttaaatttgttctttattcaaccctctgaagaacgaacagatctggtagaaaagcactaacctgggagttaggagctggacatcctggttctagtttaggcttgggctctcatggccgttccagtcggggcaagttattaaagatttctaggttgtgtttgcctctgatggaaagtaagacggttgaactaggtgatctcaaaggttcctctcttttgaagttctgtaagtctctaaatatttaatacatttgaattcaggttggtatttacctcctggcacctccagaatatctgagctgaagccctattttcataagaaagttaagcagatcaacagatggtgttttgaagaatccatttcaaatgatttataaaatgatgactacttacgagtttgtctgctatttgcagaagaggtttgcatgccacagggcaggaaaaggaagtggccatgttttcagatttatcccttcacaccaacaatctctgtggaatttatatgctaaaagatggagaagcaccatagaaagatttggctgtattaacaaaactgcatatgaaaaggtaaaaactagatagttaatatctctctttggtgtaagggttataatgtatctgagctttctttgtgatttcatcatcaactctcactgtggtaggaaaatcaatattaaataaacagtttcagccccgtgattacatgcagtgattttaggaagcatcatgataactaaagtaggtacttgcagggaagtaaaatatcctttctagaccttgaggtttcgttgggagctagggacacaggcatgttatccttctccacagtcttttttcattgtcaccttatcacaagactcagatttatcccaaatacccaccttgtcttttcttctccctctcatgaaataagacctgctctgactcaaccccctcagcatctcttacttcccacccaaaatgtcctgtctctatccccatcgtcccctcatctcctcccaattcagagaaagcaagtggacctctcctctgttccttttcttggcctctcaccatgggcaagtgcctgggctctggtggcagaagaatccatggctcaggtttgggctttgtggtcttggatgtgtgcttgactcctctgacctcaggtttctcctcttggtgtaatggcagtgcctgcctcgtggagtctgtgtgaggattaagggagatggtgcatgtaaaaggcctggcacacaggaagcctttcctttgtgccagctgccattccttctcacctctacccgggtcctatcactagaatattatttgtgctgtttgtccttagtctcccctgccccaccctgaaaaccttaggcttgacttaggagaggaaggatggaagaggcagagtcagacttgtggtgagcctgctgtgtaccaggcaatttacatgtgtctttacttggtaccctgggttcgtaagcctctctttcctccctcctgccagcctcccccactctcccatctcctgctccattcttagtacctgccctctggcttctctcgctaccacctttctttatatttcttctcaaagttttctccaaaactttgtcgtgagttcctggggcccatctgcccatccttattcctgagtggttgttcttggcccctttgcagtatttcttttatttttttaaacatggtctcagtcttgcctggttggagtgcagtggtgcaatcgtggctcactgcagcctcccaagtctcaggtaatcctcctgcctcagcctccagagtagctgagcctacagacacgtgccatcacacctggctcatttttgtatttttattagagatggagttttgccatgttgcccaggctggtctcaaactcctgggctcaagtgacccacctgcactggcctcccaaagtgctgggattacaggcgtgagtcactgtgctcagcccctttgaagcttttacctcacttgttttttgtcctttgaaatcctttcctctctcagcctttgggtcatgctggtttcttgattctcttcctgcacccctgtaaagataaatgtctgtcctagcttctgctattcacactgtccgtggcctggggtcccctctctagccctgacctgtctctcctgtgttctgctagcaggtccgttgtggacatgaatggcagcctgtaatctgcatttgtggtctcggagttacaggtttgcagactgcttgcaagcactgtcacattgagtcctcatgacacactggagcctacatcccttcattccccaggctgtcctaaaaggcagtttggttgggtagtttagcatacagactctggagccagatttcacatcctaagtattccctactggcttcgtgacttgtggtcaattttcttttgctctctatgccttggtgtcctcatctataaaactgggatcatagtagcccctacatcagagagttgaggtgtggattaaatgagttaaagcattggaaaaagtgtgccagtctattcatggcacattgcaaacactcagtgaatgttgctgtcagtcttgctgctcttcgttgccttgccggggtgccttggcctggtttgtagtggtctccacattcagcctgcctgtctgccagaccttgccatgtgcctggacactgtagtcaagctgaggggctgtccattccctgtaccagcccttggcccagtccatccctcaattttcacgtgtccaaatcctcctctgcttttaggacccagggccttggtcctgcagcactatttcttcattttgttttccttcctccccacacctggcagcaatgtccacattgatttttctccaattctcttaggttctgctgcattccatattgtgttgggctgtctctgaaaatatctcacctgctcgctcagcctgagcattctgggagaagtttatcttgctttttccaaaatgacaggcacagggagcctttaggccatggttgtccaatgcacattgatcttgtggaggaggagatgggatggggtgggcactcagggacggagcaggtggagggaacaggatgcacactgcatagaggtgggggtgcaacagggccataagtggacatggccgtaagtacttaggtctgcatggaaggagggtttgaattggggacttaacctcagggggagataagattggataaggtttagtcatctttgctgcaggggaacgttgagtactggcatgtaatggagagtggtttttaccttagtatgtgctgtccttttaaatagtgtaaactaattctttatctagcctggttaaagaaggggatggctggtctgcctaatttaatatttggctattgctctacccactgggttttgtgcatatactgaatgaagcattggcttgtatttattccttcaatcactgtttgaaatgtctgacctgggcaagttaattagcttctctgagtgcaaaataggaataataattattacgataatagcagctaacatttattgaacactttctatgtgccagcacatatgtgagtcacctttgcttattaactcatttaaaccccataacaactacatgaggcaggtactattatccttacttcacaaatgaggtggttttataaactgcccaaggtcactcagctgttatggcttggggcagaatttgtgctggtgaactccagagtctgccctgtaacaccctagtagattcctactgggaggaaacaccccgttatatcccttacctcactcagccgcaccatgccaggagcctagtaggctgacagcaattgggaaccagtcttattgttgacaaacatggtatgagcctcttttagagcggagctgcctgaaaccctccgcataagggatgcggacctggatgctacctgagcagcagctccaggggcttgtgaacattctcctcacatcctgttatgcatggctgtctctctggcctccccctgctttctctgcagcattgctctgacccaggccccctgtggctcagccagctcctccccaggcagctccttgtgtgagatgaaccttttaacataactcactaaccccacctcccaccctcatctagccatctgcagagctcctcactggggaggggaccttttcaaaggtccctcaccttcgtccttttctccctgaagaccaacgtccacaactttggtatatccacagtgttggggtgtgtgtgtgtgtgtgtgtgtgtgtgtgtgtgtatatatatgtgtgtgtgtatatatatatatatgtgtatatatatatatgtgtgtatatatatatatgtgtatatatatatatgtgtgtatatatatatgtgtatatatatatatatgtgtgtgtatatatatatatatatatatatatatatatatttttttttttaatgccagttgttccccaaatacatttagatagtaagggacacattgttttatgtcaagaacctgttacataaaaatgtgttatataatgttcaaatatatactgcacagtgaaattagataccactttttttttttcaaagaataaaaggataataaacacaggccgtcctgaatataattaacctcagatttgggaggcatggaaggacgtgccctgccctcagagctctcgtcctgagctctgcctttcttgagtgcgccgggagcaggatggatgggaagttggcctgaatctgccatggtgtggtactgtgagatgctctggaaattgtcttttttttttggcggggggtgggggatgccttcgcatcttgctcacttgtatctttctcacacctaagcagagggaagaagctctttttgccccctcgtacttagaccacccaggtcatcttttgaccagttttctgctctgctcaactcctttcaatcttcccagatgacaggccagctttgcctgctaagaacagccctggtgccagtggcatgcaggtggcacccctgtgtccagtcttccaggctctccagggtctggtcctgttcctcctccccagccctgcttccccgctcaacctccattcccagccacagccctgtgcccgaggttcagtcctccttgcctctccgctgtcctccctaggccacctcacttcacactctccctctggctagcggggtctttgcttaaattgttcccttgaggcctctcttccttgcccgtgcctgccttggatctcacttctctgtgaggtacctctgataacatttgttccctttgtgtgtgctctcccttttgctcttgattgccaaccattcattcgttcagaagcaggggtatgtcataatgagcaaattaccatatcatactgaatcaggatggccagttgtctcattttttaattgtttcatggttaattatcttacgctcacttcccactctccagtttcactcagttactccgtcagtgaagtttattggatgcctagcactgttgtgggcactgaggatacagcagtgaacaaaacaaggggcccgcaggaggggacagatgatgaatagtgaaacacgttcatgccttgttgtgagaagtgctaggagtgctaggatagcaagcaaatagagtaaagcagtagcgatgaggtatggtgggagggagggtaccttatctagatcacaggggagacctctctgaggaggtgacatttgaacttagcttcagaaagatctgggggaaagtatcccaggaagagagaacagcacatgtaaaggccctggggttgaaaggtgcttgatatttttgaggaaagtaaaggctagtgtgactcgattatgagctgcttgtgtacagatgttttctgcctcttttatactccctttaaccctgagcccagtgttaggaaggccttgtaaatacttacatacagaattatagcatttgtcattggttatatattataaaatagtaattttataaaataataatttatcataccctgcttagaaggcttttaataaaacattatattgcatataaacaaattaagggtttgaagggttttcttataaatgcactcctagcatgtttcaccaaatattactgttttaattgtgtttagtgcagaactttagacctcataattctgcttcatgtgcacaaccatcttaaaaacaggttttgttccaaaagtttatttgtaaggcactaggtggaaacttgggataaatttttctataagaaacaatgaagtaaatagtgatgtagtttctaggcgagccctcaaaagctatttagtggtgactgtagctgaaaacatactggttggtatcagcagtcgtcaagccttctgctggtagaccctcctctcagtagcattgtacctcatttgctgttagcaatcataggacccatttacctcagtcacttctcctactgtattttcagtctgttaaagttttatagaagggattttttacctttatacctttaagatttggttgcatgtgttataaatgagacagtagtgcagagagtggggaaaactctggactgggagctgggagaggcctgggctccagactgggcccagccactgactggctgagtaaatttgagtaagttatcctctttgaactttgatttctcaggttcttcttggctgtaaaatcctattgttttctcaccatagcagggaaacgtagatatacttcgttgttcaaacctgccctcaaatggctgcctctgatttcttcttgaagaagtatatggcactcagcaatgaggaactcaagcagttccccatgtgcagagctctgcagtgacattctcagtaggaaccttgattttgatctgctatctttcttgatgagttgaaagaaattttgtcccagaacttttggtccagataagatttctgtgttcttggccaacttatcttccatataattatgtaaattgttttttctttttaactcttagggataaaaatggtgactctggcttgcctgcttataaaatatagttataagtgcccttagggaatggaatgagtttgcaggagagagcagagctgaaagagtgtgggatcaaaaacaactttaaatgttaaatgcaaagctattttcagtaccctgctggaagaaaaaatttttttcaaggttttagaggatagaagaggtttttgctccaaagaagaaaggaacctaaggttttgcagtggtgaaaagtacctgatcctttaaccaactaccaccctcccttcccacctctgagttttgttttcgacatcatgaaccacatttgccatttgagaggtttgatatttaagtgacgttagtggcagagctcaactggcagtgttcaaatgacttaggtgcagagtgctgtgctgcaaacttccccagtgcattctagggtaagggatgcctcatagagagtgacagagcacttttagctctgcctctatttggtcagttgtgaatggtgtgttcctttttttccttacttgaaggcatagcgaggagttggtacaagaagttattgcttcatggacttcactttggagctagagggtggcattagacctagcctgccttcttggatgctggaataccagtggcaatgtcatctcttgttctctgctatacccctagcaatgaaaacagtgtctgtacagaaaagtctctcaataaatacttgtttattccttcaaaaagtgaattcagctttggataaatttttaatttcctccactctctagcagtataggcttatgaggttggtcttgcaaggtactttggagtttaggttgccatttctttttgacatctgtgtttttcttattcttcaggttggtcaggtatcagtgtcttttactgatgatggttgtccctgccctgctgatgttcatcttctgttatctttaattggctccaaactgcagcaaatctatagctgagccacattaactaaaagaaaacttgttgcatatttatttaggcatagtactacacatgtatttattcagtcaacaaatatctgtgagtctatatgccaagaatgttactagacccaaaggaagagcagaaattgttgttgtgaccaaggagcctgcagtttgattgccttgtggaacatctttatgagcattgtagaagggaggaggcttcatagaactggtcaggttttcacctttaaggatggtaggatttcgattcacagacaaggtgaggacaggtatttccaggaagtggctgagcggaaacagcataattaaaaacacagaagtaggaatggaccagtttgcattcatggacacagacttgtctaaaatggaaggttcttaaataatggtgggaatttaagtatggaagatcactgaaggcccaaacctgaagccattttagacacctagtgacttgcctaaagtgacagctgataagtggtagatccaggcttaaaataaggccatgggagctctcgaccactggcactggacttggctgtttcccagcagtctctagatgcaggatttgggtttgattggggattttcttttttctttctttctttctttctttttttttcttttttttttttttgtgatggacactgagattgggggttttagagtcatgagctggaaataggcaaggctctatttagcccactctttcattttgcagttggggaaactcagtgaggttaagtggcaagtcggagtttacctagtgagtcagagactgctaggcaatggataaccactggatttgttttattatgattatgattttagtgacatgaaatatttctctctaaagcatcagtccagtgttagtgttccagttggattggagcaatgaaggactaaatgcagcagagacctgacaggaggctgctagatgaatccaggaaggagagagagaagccagaactgagaattaattgtcaattatgttaatcagcatggtgttatcagtcaccctttagatttctagagtgcggtgaacatctgcctgtgtgagtggctttcaagtgtgtgaatctgcactgtactgtgaccaagataccttaatgaattctccagacagaaagtgccactatggaagtcgaatgttttaaaacaaatgcccacattttctggaaagagcaccagattaggagtcagatgacctgcattttaggctgcttctgctgcttagtcaccatatagccaaagcaaatcacttaatgtctcaaactgagcctgactccttatctgtggaacaggtataacaattcctgttgagcccttttcagtgtatgtgtgatgcttgtgtgagctaaggaaagaataggcattttgaagctgtaaagttgctttctggctgcagggagcagcagtgcagttttaatagtgaagatgtactggcccttacaggaatagcctaggagaaccagaagaaagttcccctacctccagggcatgtttagggaatctggcgctgtccaccaggtgggtgctgatgtgtactactttattggatagggccatgttttttgtttatttgtttgtttttattatactttaagttctagggtacatgtgcacaacacacaggtttgttacataggtatacatgtgccatgttggtttgctgcacccattaactcatcatttacattaggtatatctcctaatgctatccctctcccagccccccagcccctgacaggccccggagtgtgatgttccccgccccgtgtccaagtgttctcattgttcagttcccacctataagtgagaacatgcggtgtttggttttctgtccttgtgatagtttgctcagaatgatggtttctagcttcatccatgtccctgcaaagaacatgaactcatccttttttatggctgcatagtattccatggtacatgtgtgccacattttcttaatccagtctgtcattgatggacatttgggttggttccaagtctttgctattgtgaatagtgccacaataaacatacatatgcatgtgtctttatagtagcatgatttataatcctttgggtatatacccagtaatgggatcactgggtcaaatgatatttctagttctagatccttgaggaatctccacactgtattccacaatgattgaactagtttacactcccaccaacagtgtaaaagcattcctatttctccacatcctctccagcatctgttgtttcctgactttttaatgatcaccattctaactggtgtgagatggtatctcattttggttttgatttgcatttctctgatgaccagtgatgatgagcatttttttcatgtgtctgttggctgcataaatgtcttcttttgagaaatgtctgttcatatcctttgggatagggccatgttttaaagatgattacatttcacccccgtaagcctgggcatggacggaaaagttaggcatggatagccatgtgaatctattatctgtagacacctttcaggatagtgacaggcagctgtgaaccagaaaaacaagtgtcagaatctagccagctggccagtctggcattcttggatgtttcatctgtcctggggcattaggcagcgatccagaggaaccttgattagcctgggggattcatggctgagccagcatgctgtccaggtaatacctggctgcaaagcctgactggagatctgccaaatctaaatttctgccagcattacaagtgtatatattattattattattattattattattattattaatagcagtatctaaccttgactacctaccatatgccagcaactgtgctaagtgcttacatactttttctcattcagtcttcacagtattcatataaggtgggtaatgtcagttctgttttctagttagagagactgaaactcagacgagcttcagctgatacatactaagtgtaaaagccatgattcaaactcagaacagtctcagtccagtgcccagctgcataactgctatgttcttctttctctcttttcctggtacctgaaaatacttcttgtctctggttttgaggtttctgactgtgttattggttgatggatgggttgccacacagaggctcagctcagcacagctcttttttcttcatagcttatgacggacatcctcctggatactctggctggtgagcaaatgggtgccagtggtgaatgcagcagaaagactaactcttgccagctagtgcatgtgggtgaattttaaagacaacaaaagaaatttctgtaggtcagtttttcaaagagtaactggtagcttgtagtctacttaaaggccaagtttgatgttcatcaaagtcaccctgtaaaaacctttccaaatgctgtgattctgataacaataccatagaacattcctgtgtaattgacaagtagtttttacatacaatgtcttgtttagtcatcatcacaaccctatgagggtttgcaactacatatagttgcaaagaagactgggagatatctttagttgggaagccatgagtctagcaaaatctctgtttttaagggtggcgaggggagtgaatgaggggagctagcaatctgatgtgttgtggtggtgatggaagggataagtagagtttgaagctgttgtcagtagagttgggaggatgcctcctagtctatgacatctcctagtgttatgacatctcctcttgtggactgggaaattgcttagagtttaagcaactgtccagggttctacaactggtcagcggcagaggcagcacttaagtattgcttttgtgacttaattcactctctattcaagtttcatctttgctttctctattgaagttcttaaatattctgattcactgtatttagaagtcggcaggaattattaaagtgaacttctttgtggtatacactgttactgaatcagagtaaataaaaggtcacatgattggttgttgtgttaggtttaattgacgtgtactctgtatgatacagaatactcacatatcttttgtgggatatcattggtccaacagctttaaaaatcccaaggctttaatagatgataaaacacggagtttgtgtaatttcttgaaaaagttggccatcgagttcttggtcaggaacacaagcttcaattgtaacagtttccatggagacattagccttggcttgcatcatttcagctttcagtgcctttcctaggaatggagtgaactgctaaaagaagagctctggttgtggttgtcacttagagctctctcccctactgtttctgctggaggctgatttgcttttctgggtcttctcagttttttctgtgacctaagcataaattgtctttgagatcctggtaatctcatattttaaaagttttccacaaaagacaactgaatggaacacttttttttttcacccctttaaagtatttaattggccatcaacggtggctcacgcctgtaatcccagcactttgggaggtcgaggcaggcagatcacgaggtcaggagatcgagaccatcctgctagcacggtgaaaccccgtctctactaaaaatacaaaaaaaaaattacctgggcgtagtggcgggcgcctgtaatcccagctcctcgggaggctgaggcaggagaatggcgtgaacctggggggcggagcttgcagtgagccgagatcgcgccactgcactccagcctgggcgacagagcgagactccatctcaaaaaaaaaaaaataaaataaaatgaaaaataaagtatttaattggtggcaaggggctttgctagaagaatggacacctggtctcactcaagcttcttgtattagttgggataccaggtgagtccctctgttaaagagacccacaggcacaatggctgaaaccaggtagaagttttctctctcatgtactagtccctagtagatagtggtccaggcctagtatttttaacacatggcttccatttgatggttgaaggtaaaaacttaccatctcccagaggaaacacccaagggggcacacatccagtcatttttaagggaaagacccggaagcagcacattctctttttccagtagccggaatttgcaactacatatagttgcaaagaagactgggagatatctttagttgggaagcaatgagtctagcaaaatctctgtttttaagggtggcaaggggactgaatgaggaaagctagcggtctgctgtgttgtggtggcgatggaagggataagtagagtttgaagctgttgtcagtagagttgggaagatgcctgagtcaagggtgagaatctaagcaggcacacagaaaccagggcatgtgcagccatctagaggtcagggaagctcttggctctgaaactaagcagtggggggcacccaggcatggaagggaatgtgaattactcagaagacattaggttgtcagtaaaaggaaattcaccagtgtgactgaatcagtagaaagagcacttagactaggagtcagaagacctaggtttgagtccagcccttttacttcataacctggggcaaaaaactcccataaatatttgctttattatttagataatggcaataacagtgatggcctttcctgcctcccaggcttagtgtgagaccaaagggtgaggaagtactgtgtagactgcagccccatggagatgtgcacagtgtctgcccagcccagggcctgccatgggtgtatttgttgaatgaagtgtgaactattaaaagagttgggaaaaatgcattatactaaggagatcttaatcctggacagtcttctctaccaggcagaaaggttctgctctccactggtcaaggccttgggcctatgtgtaaaactgggtacctaacaaacacatgggcagacgcctgcagctccttactgggtagcacatgacacatagtatgtccttggcaaggccatttgctcattcctctgtgtaggtaaccaagtgcaacagaagtggaggtatagcccatgaatgtgaactaatcatttttaaatgatttggtccatgggcaggttagaagatgaaaccttcccaaggccaccaaaacttgatttcttgcttgaaaatgataagatgcagttataaaatgcttctgttgatttggaaaaaatgtgtgacttgttcaaaacaatatgtattaatagaaaatgtaacataaataagaggatacaaaaaagagcttaatgtttctatcttctgggcctagcaatagtgatttttttttccttttggtaggaaaatgggggctcagtggaataatcagttttatttctttttcttttaacttcatgaagggtttgtattgttcattttgttatttaatttgttcatttgctaaggaaagaacttctttcttggaactctgcggagtgtttttagatggactttactggaaaaaaacaggaattgaaattatattcacagtgcgctctaaactcttttaaaatctcatgcatggatggaggaaaatgcactgaaatatcaatagtggttctcacctcatggaattagaggtgacttttattctcatctccttctctgtggtttcctatttttcaacgagtgtgaattacttttatcatcatgaaagaccagttaaaaattaatctcacaaattaacactctcaagccaaaccacgaatttttgtttttcacaacctggcttggactataaactgtcacactatctcagacctatgcagattcttttctgagtgaggcattgaggaacttgttataaagatgatgctttccttctggaaatcaagaaacaagccaagggcttataatgtgttaggaaagatgtcctgagtaactttcctcctggaatctgactagcctttattacagctacttaaggaaatgagttttgtgggttccctgttcactgtgtcaccatttttttctttatcctgtactcatatgtacctcagggtccccagattttcttatcctgggattgcatgaccttgtccttggctctctcgggcccctgccgtttccagtgttctctgttcatgttcacaatattgttgatttggctgtggcttcttcccgcagtgttcttgtagactgaagagagcacattgctgcccttgtccctgtgcagcttcctcttcctctttatcattgctcaggtgagtggcctgagcagtgctcctgggatgaggtgaagagaagcagtcaagactgcagggaagggctaggggtgctgagctggccgagcttccctgggggaaggcactgggccatctgtccagcagcagttggcccacagctggcagggcaggctcaggagtggctcttgaagatggctgcttggtgtttgaagacagttcccagggcatgcattcatttgttgagcaccttcaatctggcagcctgtgttctagatgctggctgatgaccaaggctgacatggctttggctgtcatgggagtttcattctagtggtagagggagagagagagagacgatgtggtagagggagagagagagagacgattagcaggggaatcaatgaagaagataattacaggttgtaagaacagccccagaggaggttacaggtgcctgtttgtcgagaagtgggagggccagagttgggataggaacctatgtccctgattgcaaggtctggctccttctgtgtcctctgggctttctggtgggaagggaggaggtggaggagaccccttgcgagggccgagcttctcccattcagccagtctggaccagcctggggccttcagatggagatagcaaaagttgagggcataagctagggactggctctcttggtcactccagttgcccatctctgtacttccccaggtgaatagccatgttttttaaagaacacggagcaaatttgcatacaagagtccagatttatgcatgctgcagctttgtctgaaggcaagcttatattttctctcctattattttcaacttttaatgagttaccagcatctcagtgcccctccagcaaggatattgggctggtgttttcagggaacaattttaattaactcctccttgcctccctctcacccagccacccccagtccccttcctggtggctcagagtctggctttggcatgcaataagaatatttttgccttggtgttagcctttctgaaactcttgattaccagtgctcacaggacctttctgcagcactgtctgcttggctgtggactacccagaggagcttggtgtcaggcaaacttaggcgatttccctgagcatccttgttgagtctgcctttgtacttctttgtcaggtctagaggcttggccgtttgtcctgctcttttgtcccctccttctgggaaccctcaggaccctcactccatggagactcagcacccttcctcctgcaaacatcagtgatggggctttcccagccctttcccctatcttccttttcaaagaacaaagcctttgaagcttgtctcatacctgtctgatgcagtatgggaatctgtaagttctttgcctcctgaaggggtctggggaatcacttggctttcagagctttcctcgctcctctcccacccacagaccgattttaaccagagagtaagtcattcatgctgtgcttgaatactccttccagtcccactaggaagactctttgttactaaattctgttttcttgggaaaggggagcttattactatctcattttgttggttgttattaccctcctttaaaaatgtatctacatacacgcatgtgtgtacctacatgtttctatatttcccttgtgaatgtggccctcagagggcctggatttaaaccctgggagtggtagtgaccctttgggaaatgtatactttttgttccaaatcttctctggcttaaatttgtgaagttttgtttcagccttggtttcatagtttttcccagtttccaagataagtttggggctcactgtaatcagcatgtaaaggagaatatggccatcagctctgccccttaaattcatagtcagactcagtggggaagccgttcctgtcccatcttgcgctcgtggctctgtcagcctcaggcagctcctgcaccgtcctcctgcctgtgacagtgttgtcaggagttcttggtacctgggtgctgcttggcctcagggtgccagggctcccatgtggagtgtgcttgctgcagtctctacagcccaggtgtctctgcagccctcctcttacatagccacagcgtggtaaagtacatccagtttgcgctgtagtaagcaattttattaaaaaaataagtttaatatgtaagtggtcccttagttcgtttgaatggctcccctctctggctttggtttgaatgagctacacctggctggagccctgctgctcccctcagcatggagtcacctccctgtgctatggaggaaaggaagaagttattcttaccttggttttgagacaagacaagcctggagaaggctgtagggatgaaggagttgcccatttgtccagcatcagttgagagtctactgtgtgcctggcatcataggaagcctctggagtgctgtgagcaagaaaataatacttgatttatgtttttaagggttcttctcgctgcctgtgggccggcagtgaggaggacaagagcgcagcagggagatgggttaggaggcagttgctccggtgcagggagcagtgccagcttgagggctgctggtgggtattggtgtgagggtgggcaggctgcagataggccttcgcccattgcccttgccatgtgtccccatgtgtccccaggggaggctctgggcatcccaaactgtgagcctgccctttcccaagtgtgctaggccctgccaagctcctgcttcatggcctatgctgttcattccatctggaatgctctcttccccctgctttccatcctagctgagtgacattgggcaagtgaccagatctctcttgagcctcaatctcttattctgtgaaagagtgctcatggaacctactgcatgggaccatgaggataagactatagttgagtgtggtgattgcagtagcctccaaagctgtctcctgcttccaatttcatcccgctactgtgcattctttacacagcgatcctgtgaccgagggtcagatcagggcaggcctctgctcagaatcctctccacagtagcttcctgtcccagtcagaggaaaagccaaatcttagcatggccctcagagcttcctggtacttctgacctcatctcccaccccaaggccatggtgtatggttgatcatgctgggttctgcacagctcattgtggtgcatgtaagtggcactcacttcctccccaacttatgcattgcacaacttgtgcagctgtacatgctgctcctacctgcgcctctctagctccactccagccacagtggaatccgtgttgttcttcaaacacaccaggcatgcttcctgtttaagctctccctactgcctgctcccttggcctggaccattcttcccccagaggtgtgtatggctagttagctcaccttcttcaggtcttttttcaaatgtcaccctatttaaaattgttccatctgggtcactgccccccaaatgttccctttttcccttgctctttatttttcctcctagcacttatcaccatctaatatattatacgttttccttatttatttggtttatttttatttatttatttatttctcaacagaacataagcttgatgcaggcaggcaccagtgttaattttgttcactgctgtatccccagtgcctggattggtgcctggcagtaggggttcagtgatgcatgagtgaatgagtttggatgcacaaaggtaaagtattgggtacggtgcttagcacactggaagcacctaatacatggatgccagtattttcattgtctctgttaactctccaggccctggctcaaatgtggctttctctgagcctttctgcagtcccttctcaggctgaattaagtcaccaccacctgtgctctgtgttccccttcattttgccttctctgtctgctcggcatttatcacactgcagtagtgggcttatctcacactttttcctgttccaattgcaattcctgtggggcaaagactggcctgttcagatttgtatctcaggcggtctgcgcccccagctggcatgtggtaggagcttaggaagtgcttgctgctggtggctgtgggaggtggaaagagctttttaatccatcaggacccttacaagggggactggctccagcatcactgccgtctgatgtttgtgccccctcccaaggggtgtcaagggagagcttggcaaccacttaaatgagagtctccagtggtatatttagagcaaattttggagagaggagtctcttggataacagcatctgggtgacctgattgtttcacatataagagtttggctttttggctactcaggctttgagaggttggggtcattcaagggaggcagtgtaatacccatgtgttcagaggtggctgggacgagagggtgcaggagaaaaggcttgagctggcctgtaagggatctgagttggtgaagggagcacagcttctgggggtggcagaaggaataggagagctgcccctgccatacctggggaggggtggttaggtaggtgccttgggaggcatggttaggtaggtggtttggggccatggggggaaaactgtaatgccagggcaattactttggcctcttgtatttggcaggaggggtccacactggggattgtggtggcgtgagggagagggccctgggagagaagctctagagtcattttcttttccagaggtggagttgtcttggggacctgcacgtggcacgcagagcccatgctctcaggcacctttggggtggcagagtttcaactgaaccaacagaggacaaggggctgagaagtcggaggccttggctgaggtgcccagtttcttggttcactttctttacctgccaggttagcagcaagtgagcaaatccctcctgcctttgctcagcattagcctcagagacttgaggagagctgggccttcaggtgggagcctggtggccacactggagaggaccaagcttgacattgagtgtccgaggggctgaaagttgttcgctcatccagagatggattcgttctgcaaacatagggaaagttcccttcccattcctcatggctgtttgaggatggaattcctgcattgaccttggcctttccctgatcttggcctttcccctgcactatggcctctctactcttaacattacgccccagcccttttccatgggcccctcgtcttccctatggccatctaaaatggccgtataatattctatcaagggaatgttttcagtaagccatgagcttgatatggagcatttagattgcttctaatttttgctctttcagctaatgctacattaagccatctctgtgtattatggaatcatttcattagttggcatttgtctagctaatggcaatggcccaagatttaatagcgaatcagaatttcttttttcaagaagaatgtcatgaggatatataaaaaatttacttaaaatgctaggaatcatctatgttggggttttcatgaatgaggaagcagggaaacagtaacatgaaattagttgtaagtgaaagactgtgtgtataaaagtaactcgtgacttgtttgttcctgagtgtggaggggagccaataaatccttggaaggagcaatctacctgtgaaaatcaaagagatctgtattcctgcatctgatgaaaacataacaaacagtgatctcttcttaaggatatttttagaaatgccctaaaacaagaaaaagtaaataagatttccgagaaaaaacatgtctccttaattccaaatgagcctctctggaaatgccatttagtagtggaagcaggttgtagacttgctgaaaggatttggttctttggttattaggaaataactagaatgaaattgacaaacagacaacactgacttggtccccagtactgctttgagcctgaggtatgtgttggctttggaatgatggggaaggcttcctctgacttgctgatttgttgtagttgttgttgttattgttttgagatggagtctcgttctgtcaccaggctggagtgcagtggcgtgatcttggctcactgcaacttctgactacctgattcaagcgattctcctacctctgcctcccgagaggtgggattataggcacgtgccaccacacccagttaatttttgtattttcagtagaaatggggtttcaccatgttggccaggatggtctcaatctcctgacctcatgatctacctgcctcggcctcccaaagtgttgggattacaggcatgagccactgcgcctggtctgttgttgtttttattgtttcagtctctggtggcttattatgtagacttgggctgtaagctttgcatttcagtttaaaccagcaaatgtttacactatataaggttgcaagggctaaaactttagggagaaagaacccagtgcacccctgtttctgagaagctcatgaccagggagtgggaaggataaagcaatgttaaaaccaatggttattcaagggagattaagaagggggccctgggagagtcagctccatccttttagagaagggaggagttctacctcactgctgggcagggtggggctaaggggcaggagaatcaagaaaggttttatggaactagttgcatttgtcaacatcttgaaggacaggctgaaatggaggctggacattctcagcaaaggtaaaaggcctgagtagaggagatggagatggaaggacatggggcaatgtttgggatttggctgaagaattgcatgcctgtagtaatggtcatagtagcactttatggagagtatcaggtgccaggcatggttctaagagctttatatgtagtaactcacttaatccatgcaatgaaccaaatgaggtactgttattatccccattttacagatgaggaagctaagataaatagcaaggaattaattgcccaggatcacactgctgtggagccaagatcagaccaagttcatctggctccaggctctgtgcttacgaccatgaagctgtcctgtctctgatttggggaaagaacagtcactagaatcagacagatggacagatgccgtatgtttagaggctgggattatcaacattcaggaatgcagaggtggaaaagagaccagagatggagatgaggggcattggagaggtggggatgggaggagggtttggtgagagccgtgaagggccacaggaagacagagctttaaggagaagtttgtcagtgaggcccagagctgcagacaatcccaggaggtgagacctgaggaataggtctgggctgaggagaaagctgtgagggcctcgggagaggggcagcagggtgacccaggctggagctgctgtggtgtcctatcctggctgcagagtgctgcgtgttcctgggggatcatagctgttgatgagtatcactgtccctgtcctcttatctgtagaaagaggtgagtgtgacagagggggcaggtgagagctggcactgctaatttggcaaacctggtgacttttctgcagcctaatgatttttgaaagctgtttgctatgctgaggcacaagtgtgacttcccccatctaaatgctgtgcaatcgctattttccctggaaaattgggcccatgtgggctctgtgtgtggtttatttgagttccatttttatagccttattaccttgtccccatgatgcaagaggcctctctcttttcttgagctttgctgtgaaaattgtttcttaaaaggcacaaagtgatctctcgtcatctgggtggtgctcgctccacaagcagcacttttctcagactccgcacacacttgtcatcgcccctgcccccacttggcaggttcctctgattgttggcaatttactgagaacttttaggcagctcttgaagctcactacctatgtgtttgtcttgatttcttccggaagagtttgtgcatgtaaatatccattcagcctctttctctccgagatgttgccctgccactgaccgtgcttggggctgaaacccagtcttgtcctctggcctcgagctgattaacaatagcagtcatcatgtacagagcctgagtggttatcaggcactaagctaagggatttacgttcgtgatcttaattattcccaatttctttgaggtaggtactattacttcccccattttacagataaagaaaatgagccttcaagggatagagtaagttaccccaggttacatagctagtacatggcagagctgggcttaagcgggcctttctaaccttagactccatgtgctccattcattcattcattggcaacaaatgattgtctgcaacaggctgagaactgttgtagacccagggtgtacagcaaagggaaaaaaggccaaactcccaccttcagcttatattctaacttggggaggtagagatcatataataaatgacatatacattatgctatgtggtaatgagaactatggagaaaaatgaagcaaggaggtcagatgggaagtgggaggattttgaggagtggtcaaagaaggcctcattgagagtacaacaaattgttaggttaacaaacaaacccccaaatctcagtgtagcaacacaacaaaactgcacttctctgcagaaaaaattccaaagtggctgctcctggttagcaggcagccttccttgcagtcatccagggacctagactccttttatcctgtgtctctgccttcttcaagggccttggtttcctttgcattcaaatgctggagcgtgaggaagaagaagagagggtagtttgtgaggaaggctttatggaccagtctggaggaagcatacctccctcccacccactggccagaattcagtcacatgttcactcctgactgcaagggaggctgggaaaggaagtctggccatgtgccgcctaaaaaaaggaagtgggttctggtgaactcatggcatggtgtgttgcagcgagtgaggtgaagaagtgagctatgtgtttagctggaggaagagcattttacacaaaaggagcagcaagacaaaggctgctggaatggagtggggaggagagaaggagagtgggagaagatgagggcatggagttgtgggggccaggccactggggtcactgtaaggatttggttgccttgggaatgacaagcagagccagaacatagagttttgaaggaggaacgacaggatctgaggcacgtctcacagggctcactctggctgctgtgttgagagtggactgagggagcaagggggatgcaggggagaagcgggcgtttgcgggtgttatccaggtatgtgaccagaagggctggccctgagccggggtggtagaggtggggagaagccgttagatttgagatcagttctgaaggtgggccagcaacttttgctgtgggattggtagtggggcatgagagaaagaaaggagtcaagattattctgaggttttggctttgcctaatgagtattagtctcacttcctaccctcagaagcaagaggggaaattttttggaaaaggatatctgagtgttctctgggccctgacctgtcctccataacctctttcactctgtgatacttttttcagcacagatgggcaattcccattcatgactaggctttcagacatggagagggcacttggagtccctcctggcacacagcagaggtgaggcagcactgggaattgtctcactttggggtctttgggtcaaaccttgggacccctttagagtgacatggcagggactgagtgtgccctctaggggggtgagatatgcctactggagtccacttccaatgcctgccatctgcaaacactggtgaggccctggctgaagggtaacaacccacaaaagtgcacaaaaggaggaagttctggaatgcgagttgatgctgccagcggtccggttggctccttgccttctgttctttgtgtgttgacatcagacctctctactgcagacaggctgccctacctgagggggcacagctgccagcagcctcagtttacaatcctagcaaaggaggagagcctttctctacatctaggtatcagtttaagggaaaagcctctgtgtttgagagtgggagcggaaactgtttcccacgtacttccttggcagtcatgacctgtcaaggctgaaactggagatgggactttttaatagaccatgatctcactgggagcatatggggaagaaagttcatcttagagatggcagggcgtgagctgtgaaaacagatagtgcacacctactagatgctgggcccccgctaggtattttatttcactggagagcaaaacaatatatcatccctgccctcatggcacagatggcctcaagtggctaaaccatagaatggctagctgagagaaatgatagttctttctttttttctttactgattgcgaatggggttgtatttttaattttggtatccatgtgttcattgctagtatatagaaatccaattgatttttttgtttttatgttgtatcttgcatgtttgctaaactcactaattagtcatagaaatttttttttgtttattccccaggattttctgcatagacaattgtatcacttgcaaatagggattgtttcatttcatcttttccaatctgtatgttttttatttctttttgttgcctgattgtgtggccaggacttctagtcctatgttgaacaagagtgctgggagtgcacatccttgccttgttcctagtcttggggaaagcatcagcctgtcaccattaagtgtaaggtcagctgtggatttgttgtagatgccacttgcactttgctggcatggttgtgagtaggactgtgggttttgtgtgtttgtgtgtgtgtgtgatgtttggctgaaatacagtggttattatctacaagttttctgtcttgaaacagggagatttgttggggcattttctctttgtgctccttggcatttctgagttgctggtctcctcagttccaagtctgagctatatgcagaaaaggaaatgcaggaagctcaccactgtgttgttccttggatcctgaggtcccagctggtctgccttcttcagactgccatttggagtcttcttatagtcatctagcatagaatgcccaggggttttcattgttcttagcaggtggaatcagggaaagtgcacctgctccatcctgctgggagtggaaatggttgggggaaattggagcgtataggtcggggctagtttagatgcaagggctccgttctgtaggtgcaggagggccgtggaggctcagccctgacagcagtgggagggggatgggaagagggggagtggagagagcctaggtggctgctgcctgtgtccaggcaggaggtcctgaagtcctgaggtcctggccgtgacagtagaactgcagcagaaagaaggacaggaagttccatgaggacagtgaggaagtgcaaggagaccaggttggtctgaggtttctagctagagcagctagctggttctgagataacagagacagagggaggggtctaagcgtggcagaggggtgtattctaggcattgtagagcagatctggaagactggacttactgtgcttcccctcaggggaggcttcacagaggaagtctggctgctggggaaaaatccagggagtgtgcattctgggcagaggaattctggctgctgggtaaaaatccagggagtgtgcattctgggcagaggaaacaacgtgggaaaaggcacagatacagaaaacggcgtgatgggcctgttgggactccagctagctgaggcataagtgggtagttactggttccatgactgggaaggatgctgtaggagtgcacaaaaggaagaagttctggaatgcgagttgatgctgccagcggtccagttggctccttgccttctgttctttgtgtgttggcatcagacctctctactgcagacaggctgccctgcctgagggggcacagccaccagcagcctcagttttacaatcccagcgaagggggagagcctttctctacatctaggtatcagtttaagggaaaggctctgattggcccaggttggtgatgtgcctgcctttggacccgtcactgttgcaagggagtggagagttctaatctaggccggatcgtctgcccacccctgttggggcaaccagagtcttttaaaggagaaggcagacaaaatgcatctggggaagataaaaaagactgtttaccatggcttactgtaatagattttgaagaatatgtagtctggcagtgcaggaactcttcatggagattaaagcaggggacttgatcaaagttaggttttattaaaatcattctggacactgtatggggttgtgattggaagtgaatgacaagaggtgtcaaggcgggttcgtaggccactgctttagctccaaggagcactgatgaggcctaagctagcttagaatcctgacttactttgtttgcacttcacctgtagcgacagcatcagtgaggtggagaacagggatagagtcctagagatgttagacaggcaagacttggtggccagatggaggcaaggagaagggggtcttatggaggattccccactgccaccaagggcataaagaatgagtctctggagggctagccttatctttggaaacactattaagtgttggcagactcgatgtaccttattgcttcttcagaagtgttagtgttgttggcttcttgtggtatccagctggaaaaggaagctgattgattgcatttccctccctttaaagagcttccttttttgagaaatcagaagataggtgatacagtcaggactgccagtggagaaataggttggggagagggagacactggcttggagactctcctgcccccagcctgccccgaggcccgcgagtctgctttaggcacattcgtccttttggcatcatccttgctgggaaggcttttaagggatttaaggaaagaaatgacacaatctgattcatattgcaccagatttcctcctctgttcagaatagactatgggtggaggtagagtgactccaagagtagcagcagggaagcagggcaccaattaggagactgtcgcagcaatctaggatggggacggtggaggtggtgagaaatggtcacattctgaatacattttgaaggtaagaaccagttttagtgaggattagatgcggagtgggagagaaaggagatgaaaatgactccaaatttttggtctgggcagctggaagaacattgtcttaaactgaggcggacacaacgctgggaggagcacgtcaggggtctgtgttggacatgtttaagtttgagacacccaccatgtcttacacaaagctcccatctacttcttacttgacacaaacagttggatgtactggtcaggagttcagagcaggggtccaggcttggagagaaatctgagcattgttagcatggaggtgatatgtgtgaatccaggagactagttgagatcaccaagggagtgacagagaagagatgaaaacaaggactgaacacgctgacataagaggtggggagatgagggagaataagcaaagataagccagtgaggtgggcggaaaaccaggagagctagagggcatgattaactggtgtcaaagctgcaaggtaaggactgagactttaccaatggatgtagcaaaatgcaagacaggccaaatgcatatgctgttggacctaagcttaactttgcaaataagtcatagttccttcccagaaggagaatataattttgcaaaaagggatcatttaagatttattaaaataaatctgagaaagatgtgaagatagtaccgtaggaatccagcagaaggaaacagtgcttctggcttttgtggggaggattgagtcagattcattcataccttcattcatttgtgtgttcattcatttggcaaaaacttattgggtgccaggggttgcggggaggagggaagagagagttgttatctagtgggtatagagtttcatttttgcagatgaaaagagttctggagatggcttgtggtaatggttgaataagaatatgaatgtacttaataccattgaactgtacacttaaaaatggttaagactgcaaattttatgtgacatgtattttctcacaattaaaaatggagagagattaaataaaaaacagagcactttttggggccccatcatgaacttggtctgggatatgatgtttgaaatggatgcgccatctcagtagatggaggtaatgtggagaagagtggaggaagacgtccagctcagagggttttgggaactatcagtcctgtttgtctggatggtagggtctatcgggggaaaccatgcaagctgagactgcagccgggccagttggtgcaggcccagcatcctggctgtggatttgggcctgccttcttagattctgggagcctctgatggtttctgcccaggggagtgtcattccaaaggtgtgtatttagattaatttcattagtccttcctgttaaaccattgcctattaaaagcagtggggttgaggcattcatttttatggtgaaaattctggcctagcagaattttagatatccaagcatgtgtcaatgaagtgagtaggttatttttccatccattttacaagtatttattgaggatcatctaagtgcccgtagtgttctaggcagttgggggtatgggacggggtgaatttaacaggtctcttctcttaaaaagcctacagtctagagaaaccccctctccttcctaaacaagaagttatgccacaacgtgccatgtgttaccataggcatgccgccacagttccatgggtactgagaggagggggtgcctggcctgcctggaacactggggaggcttacagggaaaaactgtccaatggatttaaaggacaagcagggattttctaggcaaagaagcagaatgggcatcccaggagtatggtaaatcaaaacttattgggtgctatgaatttaaagctaaacttttatttcattggcttttaggtggtgctggctagagtgtatacgtttggacccaagcttaacttttccaatgtggaatcctgggccttcattggtaagtttgtttgatgccttcttaccaaattatgctatcaaggattggtatttggaatgaaaggcaaggtagttatcattggcaagttctctgtggaggttaccagccctggacctggagaagcctgtagcacaggctgaaggggtacataggaaaagtgaaatctcactgtaggtttctgtggtagatgcagagagggaggccagaggaggggaaccaaggggtgcgggggatggatgcagcgggccttatggagaggtggagctttggctctgttttgaagggcaagctagattgaaaaaagtccggggaggagtgaaagaagattttcgggacttgagaacatagaggtgaggtgtaaacaaagtgggcctagcagcagtcccataggagcaaaatcttcatcgaaaggagtcacgggcaagaactgtggtgggatctgctggcgtctgatgattctagtccatcagcaaactttttctgtagaggaccagatgctaaatatttttggcttcgtaggccatgtggtctctgtcacagctactccactctgctgtggtaacatgcaagcagccatagataatatggaaatgaatgggtgtggcagtgttccagtaaaactttatttacagaagcaggtggtgggctggatttggcctgcgggatgtagtttgccaactccttttctagaccctaaatgcccggctaaggcacatagactttatcctgaaggcagtgggaagccattgaagttattttggataaagaagtgaagtggcagaagtgatgtttacattttaggaacattcatctgatagctggacaagaggcatgggccccttttggaaggcagcagcagtcatccaggcatgaggtcttgcggtgaacagtagtgaaaatggaagcaaaggatcaatggaggagatactgcaaagggagaaccaatagcgttttcagtcttcttagacttaagaggcaggagtcaaagaggatgaaagtttaagcttgcttgtttacggtggtatctttgacagaaatgtagatgttgggggtggaaaggatagctgatgcatctggttttagatatgttgaattcaagataacagtggttcatccataagaaatgtccagcagagaattggaaatgcagggctgaagcctggcctgagaagattaagtctagagatgtggaatggaagccataggattaaacacggtctccccaagatgagcagtgggctgagctgtggggaatatgcgtaactgtgggacgggaagacgatggaagagacccagaggccatggaggagagtcccgggaagggaagagaatggggcagcagagaccagggagaacggacctgaagggaggctgctgaatttgtgacaaggtctttgcagatggccttgagaaatgtaatgtcacaagaggggaagggaagaggaagccaggttacatggagttggacataaatgaaggataaagaattgagatgttacaaaaatagaccgctcatagaaggtttgggtagtaaaagaagggagacacataagatttagatacttgcttgtcagaataacctttgctttagctttgaggcaggcaaagcatgctgtgaccagttttcatttccttctttggagccaagctgtgtttgggagtttgtgtgtaccttgggcttgtgattgtgttcttatgctcccttttgaggtgtggtgttcgtaactctgccacaacttgcaccacggaatccagcccgtgtttggacccttgccatgagacaagatgtgatctgttggggaagtagttgcatttgtataagttggaggagaaagtagagtggaccaaaaattgaaataaaccttcttactacagagtctatccaagtatggggacttgaggataattcctccagtcatgatttaattatgtatcaatttgtgctctgagtattttgagtgtaccttctttggtttgaattctaagtagtttttgacttggtttgtgtgaatatagcagttagagagctggtaacaaaagcaacagttgtaactggtttagagccatgatttattgaacactcattatgtactaagtccagtgctaagtgctattgtgtatcatcccatttcatctttgcaatgacctatgtggggggaattattaatagtattcttatttcagccagaaataagtcatagatgagtaactatgcaaggttacaagggatttgaacccgggtctgtataatccctggcttatgctgcttcctactttatcttgcctgtgtctggaatttttcctcctactaatgtagaaggactagagatagatcgagtccctcaggttaaatattcagaggctgtagtgggtgtttccacttcttaggagtctattgaaagggcagaagaagtgtgggaagtctggaagagactaaggccaaacctcaaacacttactttaactgtttccccagataaaatttagttgaaggcagcagccttgggcttggaaagaaaatagcgctagaaggcatgagagtcagattccagtcctagcattatgacaattataatgtcatttttgtttaaactcttggcatttctctccaattacctccagctttgagctccaaaggcaggctcctattttgtcttgtttttcactgtatccccagcatcgtagcacagaatctggcatgtagtatgttatgtactcactaattatttattgcttcgaatgcaccaagggacttggtacaagacacttagcctctcaggcactgctcttggcatcatggttatagaggtgaaacaggacaaggtctctgctgtcgtgaagcagacgtctacatgtgtgagatgtagaatgtgacgtcaggtatgatcatgctctgaaataaaagacagtgagaccggggtggagagggaagggcctgtccaagaagtgagacagtgagctcgttgggggtaaaatccataaaattcctcttggggtgactacagattgtcagctgcgctgtcagcaccttgttttaattgttttacttggctgccattgccaatgcccagctgactgctccctgcagcgagaactcccacctcaggcctcgctttcttcagctctgctgagcgtgcctctcctgggtcggctcccggttctcctccagctgctgagattccagcctccacagcctgctctgctggttctctgttctttgtccttagcttctggtttggcttggtccctttcacgtcatccttaacgtcctccctgggtgagctcatccaccactcacctctgtcttgaagacacccggatctccatatccggtctgaacctcctcccagtccacactcctagtggtctgccccgagggcacctcaacctgtctgtcccctcctgagtgccacatgcgtctttctccctgtgctgcctgcttggtccacgcccctcagttgcttctgcttcatgagtcgtcctggccttgtcttttccctcatattcccttggttaccacatcctgaagagctcatcttctaatttgtcaactcagttcttctctgtctctccactcctgtgtttaggattcatcattttgttctatgacagcctcttaattggtcatcctgtgttcatctttttcctccctcattccactgcccacattcctatcaacgtgatctttctaacacatgtctgatcagagctttcttttgcttaaagctctccaagagctcctcattgcttagaaaataaaagctaacccccttcagcggggcctgcagtcttctcatcatctggcccttggccccctgcagcttttgctcccccacccccaccccactttgggttttcctttttccctaactcacatttctaacctcagcctagctaccaacagccatcacctcctagtgcctttgcaatgctgggccctctcctgggaatggcgtggtctctgttcaccctcttgggaactcaactccagtttcccccaaatcttcaggacaccatccttccctacccagcacctctccatgacctggaaatgaccttcctcctggctcccagaacaccctcatgtctctcttgcaaagcacttatcggtgttactgttgatttacttacctgttatgctcagcaacctgagctccttaagggtggagaccacacacacacacacacacacacacacacacacacacacacactctgtctctctctctctgttccaagtgccagcatagtttacctggctcaggaagtttttgttgtaagagtgaggagtggtctgtttgtgcagccaagcaacagattcataatgtgataaaatgtacctgaaatgggaggttcattggccattgggtttattggggtgctcttcttgtcagctttgagtgcaggacaggttgtgttgggcttgagtttgtgacgcctgttgtgtctcccagcatgctgagacctcaggaatgtctcttctctatattctttgcccctgactttttatttttttagctcttgtttttgatggaccgataatagcaattcaaaatgaaaaataatccatcaaggaattctcaggaatgaggtccacccaccttggtcctggatgaatcccaaatttcctaaataagccagaatatctattcttgcgaactactgtctgacagcctttttcccccttaatccagctgagaatgcttttcttgaagggtaaggatacctagtggcccttcatgggggtgcctgagggcctctttgtcttcattttaaaccttgtaaagtccccagtgaatactgaggagtctaacaaataggaagaagctctgaccccaggggtcccaagtcagcatctgtactttgcatgggagctagcacaatgcacctagccaatagcatataaactctcctgttttcattcagtgccttaagcttgttgcttgttgtgtcttcttcacttcctatctctgccagagacctgagaagttgtgccaagagtgcagcttttatttggggcctcacagtaatctaggaaagcttttcagaagagagccattctcagcaccgaggtgtcctgcagaccaggacactccagcaggctcttggaactgctttcctgggatggaaatgcttgtgatgctgcctccccttgtagggactttccatatgctgttccctcagcctggaatgcatttttctcctggtttgcctagctcatgcctgttcaccctttggaactcagctgattggcctgcctcctcctcagaagcctccccaacctccctgataagaaggctaggtcttgtcctcaccattcccatgccagcatctagcgcttatggactgctcaccttgtgtcaagtactgttagaatgcttcatgcgtagctactttgtattaggggcttggtagatgttggctgaggtaagtgtcatcattgtcccaaagacactgtgtgaggaaactgaggcctcgacccattgagtaggtgacagagcaggagtttatcccagatgctggactgtgggtttacgctctgacccttctatacgccaccgttccctctgctccaagtccttgcagtctgtccttttccagcacttgtcatggaggtcatgacctcggtttgtgtggttatttgattaatgaatgtttgttccctcactgggcagcccttttgagccccaggatggcaggagtacctaggactctaggcaggtgcgcagcctggagttgaccgagagcatgtgggactgcccacttgcccacagctgcttcttgccttttgcatcacaggagggtgggctaggaccataaaagagccagcccaggcctccccctttctggagctcactgagtgcgtgcatggggtttggccgtcaccctcacttccatggttctgcatcagaaccagctgtgctgaggaaacatctgtgccttgttaaggtctgttccttctgcccactccctttgcccttttctctaccttacaacccctttgttgtccttcttcaaggaaaggggccccctttgtctctcagggcagagccagctgcccttctcctggtcctcttgatctgcacacactctgaggatgactgcccatggcaggtcatgatggtccgtctgccctggactgtggtttctgtggcagagcaatactttgtacagtcagggcccatggccctacggaaggctgagggagagcctgaggtcattgccttaagagaagctgcttcatggtgcagttggtatgtgtgcatgtgtgtgtggatgtgtgcttttttcatgcatgatgtttttatttgtgttatttatccccctgctatatctccctctctcaggggtctaacatggagctttgaatagtagatacatcatagctcttggctaaatacatattttctcccccgctgatctgaaggcacctcccttttcccctacccctcactttggtaccttggtgacttcacagggttgttatgacttcccagacctcattgagattgcagtgatgtgaaaaccctacctagattccagccagctgggcaggggccttggcagcaggggaagcccagttccctagggcaactcaccaggcctccagggctctctagggccaggctggctgagcttcaactgactcatactgtttttgactgggaaaaataaaaattttaaaatggcttctgaccaaatggggaaagtggatgtgggaggaggagaagggggacgttagccacaccctaggtacatttgccagcagcaaactgagatgggcttaaagtgtggctggcctctaagacgcctgcttcaaagggcattcggcacactggtctcaggctttggaggcccacctgcttcagaacatcagctccctgtctgtctagcgttgtgacttaagacaaacccaccaagctcccttagcctccattttctcatctgtaaaatgggattgtaatcattagaataacctttataaggttcttgtgagagtggaatgaagatgtgcttagcaccgtgactggcgtgtagaaagcaccaaatatttattatctgttaacattgtttttgtttgtcaaagtattattgttaataataattataagaagactttggaacagatataaagtctaaaatgcaggctgtgatgaaagggagatggtatataagaaaagtgctttttgaattgcacattatgtccagatattattattagcacaagtatgtttattattgttttgtctttgaaaaaaatgctggagcacaattttatgatgttgagtctatgtcctttgttgttttgttttttgttttggaaaaaggtttgtcacattggcctttattggaatcttgtccagtggatgtatgacccacattggtgaccctgggtgccaaatgcctggacagcacctggcaaagaagagccattatttcaatggtcactattgtttaaaatcgttatggtaaacaatacctgacagaagttcttagaggttcattgacagtaaattgtgggcaatgcactgagttattatttactctagacctgagaaattctccctctccaagttttgtgccttgtatagctaaataaatataaacaatttccttagaatttgatacaaacagctaccattgtcttcacaagtatgttagaaatactttcttaatagcaactacttgactgttttgttttttatctccattccctgccattactctgcctcttcccatctttctgaaataaaagtgagccaaattagccatttaaaaaatacgtagatactttcaggcagaggttgaaaactgtctaccccctggctgcatctggcttgcagatgtgttttgttcagcactcatagtgttttaagatgtttaaattagtggccaacatttaaaaatgggtagatttttgaatcaaaatccagatttccagctcttcataaaaaatcaaaggtctagtgggcctgggcccgtcttccttgtggcagtgcggaagagtggtggtccctcccctgggagcttgtttctccagcctgcctccggctggcccagcctcactgtacctttccatggcctgcttggcccctgtaggaatagagtttgtagtctctgcttaatataactaataccccttagatactgtgtatcagtttagaattatttccactagcaactgtgaccataggtaggaaggatattttacttgctaagttgtcattcttatgatagcccaaatggctataatagtattttaggctcttttggatttaatagaattaccttctctcctctctgtgggatttcctcattaacaatttttaaaaagtgttcagcaaggcttatatagcaacataaaattttaaataatgcaggatataaatttctatagctgctattgaaggggggttgcaatcaagtgaactgctttaattcaacaatttatggtgttgtaaatttgaaaaataaaagacacttagttttttttttttttttttttttttttcagaataaaataattaaatagttgacctttggcagagtctttgttgaaataggcaagggttttgagcttctcagaacttgagaccattgccttctggagtctttcctcagatgagtctgtgcctccttctagctagtgcactctgagcactgtggccacatctggagggtggagaggagacttagcttccaatggtggtcactctaggggaggggggcccttgcaaataccaaaatttttttaaattattattttatgagcttttaaaaacttttttgtttttgtcatcacaaaagtaataaacacttgtgataaattcagacaacactgaagtgctttaacataagcaacaaaatcttctgtgacctcccccaaccttttccaaccattccccaaacataagcacttttgagagtttgcttcttatactcctggacttttgcatttgcttgtttctctccacccctaccctttgccctcaaccacgacatagatactttcccttttgttttctaaagatagactgtccctgtgcatggtgttctgcaactttctttttacagctgtcaattattatggttatttttccaagtccatatgtacagataaatgtacttgttacttttaaaagttgtactccatgttatggttgtatgttaagtaaatttcgttttgtattgatagacactcaggttgtttctgaccttttgccattgcagtcattgctgctgtggaaatttttgtgcacacgtgtgaacttttgcctgagattttctttggtatagatacatagaagtaggacttttggtttaaatggtttgctgtttaaaatttgaatccataatgccaaattaccctccaaaaaggctgtaccaattcatgctcttcctaggagcatcccattatggctttgctaatctagtttttgcttacacatgtgtaagaaagtaaatcttaaaagcctcacaaataatgccatcaaaattacacgtttatcttagaaaagcattcagaatatatgtctgtagatttaattatatgatttttatatcttgactttgatggtggttatcatcctgcaaggtgacaaaaagttccctaaatactgtacacaattattaaataattattaaggatatcagttgtgccaggtagcctttggaagaattacagccaaatcacagcttccttttccacagctctgccaggctggcttgtctttcccaccaagggctgagccattaatactgaggctgggtcagcatttgaaggggccctgccagggagtgccaggccttgggccccagagacctggggagtgggagatggcaagtgactgctgtgaggctgagacaaagtttttgcctacaacaccccatggctgtttcctttactgagctagatgaggaaagcaaagggaagtgatggtccaagacttctggtggtcacttttgttcatagatttctcacaggagtgctaacatttaggctcatgtttacgaaggtttgaaaccttagcatttgggaaggatctgcaaattctcagccaggggccttaactgatcacaggtagttgtgaactcttggtccaggctgtatctcaaggcttcttcttagaaggacaggtcagcttaccacctgctaactgcatgtgaaattttgaattctgccttctctagctctcctctctggctctgagctggtatctggcatttgcaaacagtttaccctttgttgacttcttagcactaacctcacttttatgagtctgagtagacttgatacccaggccatttatcctttgagggtgccctcagcttcatcagacccatgctgggcagtctggcatagtggtaagaggcacttggagccagacagacctgggttcaaatcctgacatcatcacatttactaacagtgtgaccctttggctgatgacctcacctctttgagcatcagtgtctccttctacaaagtagggacagtaattctttcccaggggtattttgaaggatatacgaattaatatttgtcaggtgcctctcagatgttcagcacaaaataaacagtgtataaatatgagtcctctcttatcttcctgctgtagagagaaagttcgttggggatgctccaagttggtggctactggctgaggatcctggagtaagaggaaggctaccatgtaaacccagagatgaatcatgaacaatgtgtattctcaggagcttagtatttgatatgggagcctaacaagcaaatagtgtgtccagtaataggaactgattaatagaggaaagattaattaaccttctaggtgggtggggtggaaaagtaggtggggtattgaaggttcaacaggagttcgacagagaagatagaccataaataataaatatacggctgtatccactagagataaagttacattgttttttatgtacatgttgacttcttttggccttgccaatgcactgatatattcaaattcagctcctctctttttctcttcccttttcccttcactctgcctttcctccagccctgccttgaaatactcagccactgaaaatttcttaaagaatttctttatactttagtaagtcctcagaggataccagttcaccctactgagattttacaagaactttggtgtagctggggttttttttgcattcctttttctacggtagatataagttcttttgggttgcccatcaatgaacaaactaccaaccatttgatgtttactgcgtgactcctgtataccaagcacatgtgccatttcacttagtccccagaatgtcagagcagctttgtgaaatgggctgcccgttctttcttatggatgaagaaactgaggcttaggtaggttaatatactgaatattatacatgtagtgagtgggaaagccacagttcacctccagggtctttttctccctctttgctgccttgcttggggtcctgctcatagtaggtggacagcagatgtttgtctgaacatatgagaacactgcctgccacgtgccggtcagtttgatttgtgctgctggttttgtaacccacatggggcaatgacagctgctcaggtactttcctacctattagtggggccccagggtcacacatcagtcataattgacaaaaaacacaatttccctttcctctcaacttttatttctaaggtacttgtaagcaggtagattagattgttaacttttcattttttgctttgtctctctcctttaaagactatgtgaaagaatacacagtgccctgagagcctggcctgggaatcagaaacttagattccagcttcggttctgctggtaactcctcagtcattatgggtaaataatattccctctccagaactactagattgtgtccttggtgcagtctggggttcgggtggtcctagggaccctgcctactgcatgaacctgttatcaccatgtgaggctggaaggatctcagcgttggtgttgggcaggcctgagtgagcatcctggctcctgtacttcccagctctgtgacctcgggctaatcacctgactccctgatgcttgttcttgtctacgaaggagggctaagaggacctgcttcccaggatcactgtccagattgaatgagaaggaacgtcggcttccttccttctgtctccaactcctgagtgcactggttttagactaactgggtgtttctgcagttgaaaccaaaacaccttcattaggtacaatgttcattatacctcgcaacaccctgagatactcaactcttagatttcttgaagctcttttttgttaagaaactcctcaaaggaagatactcttctaccccattgagctttattagtgcttcaatgacagcaccttattttttcacttttttcccccttgcagacagaagctgcagtgtgaatcagtttgcatttatataatttcttttgcatttctttgcaaagaggaaaactccattcatttagcaaatgtccgtcatgcccaggccttatgttaggtgaagggatttggagagaaatagagtcactgacctcaagaagcttacagggaggaaaggtgtaaatacataaagtgacacatgggtttgtcctgtcaccaaggtatgcagtagatgctgtgggagaagagaggatgacacaggttctctcttggaagacctcatagagaagaggtgacttgtgagcaagtctttttttttttttttttttttttttttttgagagagggtcttgctctgtcacccaggctggagtgcagtggcatgatcctagctcactgcaactttgaaatcttgggcttcaagggatcttcctgcttcagcctcccaagtagctggaactacaggtatgtgccacttgcctgtctgatttttttttttttaattttttgtagagacagcgtctagccatgttgcccaggctgatcttgaactcctggcctccagtgatcctcccaccttggcctcctaaagtgctgggattatagacatgagccactgcacccagccgttgtgagcaagtcttaaaagatgagtaggaaggagtctgtcagctgtagaagtaggaagggcccaggcagaaggagcacagggcagaggctagagccctggtaggaggtgacacactgggtgcatgtctggagctggagccaagaggtggaggacctaagtggctacatcttggcagtcacccatatattggcaagccccaaatctttgtaaccagcccagattgtcttcctgagcccccaactcccatacccactgcccattcagcagctagctgcatgttgaagtgtagtggtcttcccagacctaacataactaaacagaagtcttgatttgttccttcaaaaacaaacaaaaaactagccttgctcctcctcagtcttccccatgttatgaggtccccatcatttttacctggctacccaggcctaaaatgtgggcatcatctttgattctgcttcctcctgtgttcttcacatcatctgtttgcaattctttttttgtttgttttactggttttaaaaattatttatttattgagactgagtcttgctttgtcatccaggctggagtgcaatggtatcatcttggctcactgcaacctccgcctcccgggtttgagaaattctcgtgcctcagcctcccgagtagctgggattacagtcgtgcgctaccactcctggctaatttttgtattttcagtagagatggggtatcaccatgttggccaggctggtctcaaactcctgacctcaagtgatccacccgccttggcctcccaaagtgctgggattataggcatgagccactgcacctggccaatttatttatttttaattaacacataataattgtacatatttatggggtacatagtgatgtttcaatacatataatctgtagtaaccagatcagaataattaacatatctgtcatttcaaacattgcagttcttgacaactcttactgtatgtcctggaagccaccactgctccttattattagtttgtttctttatcaaccaagcaggccagaccactgctctaccctcgttcaaacctccactgtctttcagcaggtctcttgtcagtttgctacataggcaaagaggtcttttaaaaagcaaatttgtgtcatttccctgctctaaactctccagcggctttctggcatctttggaatggaatctaaacatctcgccttggcctgccagcccctcctgctcatcttctctggtctcatcccttggcactctctgctcactccatttcagctgccgcatcttttcttactgttccccctgttgtctcatgggctttgcacttgctgtcctccgcctgagctgctcttccccagacaccgcctgtctcaccttcactccacgctggcctctattcaagtgttctcccacctgtctgaaaaagcaccgttctgccccctctccccgctgcttcaaccattctgtcctacctcgctttggtttctctcattagcactcatcactctctgactttatatgatatgtttgtttgtcttcttatttagtgtttgtcttaccccacaagaatataaatccatgaagatgggacctggtcttatctattgcattcagcactctagggcctaaaacagagcctggcacacagtgggtgatcctgaaacacgaggtgggtggatggacaaatgactgagttaatgcatgcctgcatgcaagcgaagactttggagtttatttcataggcagtgcaaatctagtagacatctttcaggaggtgagtgacgtggtcagcacttttattttagaaagccagctggtggcagtgtgggggctggactgtaggagggaggcagcagaattactttagcggctgtgaaaatcgtccaggaaattgatgctgagtgttgtgctagagctgtggggatggagaagaggggacagatgacaggacctgaagatctttgagtgtctttgatttctattgggataacttggtatagtgattcctttataagaaaagcaggaggggacgaactggtccagggagagactgttgacactctgtggtgtttttctcaccaagaaaacctaagccctgggatgcatgttctctgtagtggcattggctctctggggagtgactctgctgctccgcagcctcccctgttccattttttaataagagaatagtcaagatggtggtgtcagtgagtgggagtcttcttcatgcagatggatccattgatctttgcatactccaagccacactaagtcattggttcttttctcgcagtgggtacatttcaccttatttgattctgatctgacaaatgctgctttttttcttttctttttttttctttttttttgtttaaagaatacctagactgtgctcaagttccaggtggggtttacagataactggggttccagcatctcccttcttacaaacacgaacaggagcctttgccgtccttgggtctcagggaggcagaccggcagcaggcacacattcctggcccaggcgtagccatgctgtctggtgctgccttttgagaccttttgtgtgtgtgtgtgtgtgtgtgtgtgtgtgtgtgtgtgggcttgaatgattccttctttcaaaaattcaaccctctccaaattttgatgaaaaccttttcatctctgagtaagcacattatttcccatcttgatgaggtgtgtcccctctgtgtccctgagagtatgtcatcccagccttttaaattttattgtatttttttattttttattttttcatactagtcaagtgcagtagtgagaagcggggaaagagtagaacaaggggccgggggcggtggctcacatctgtaatcccagcactgtgggaggctgaggtgggtggatcatgaggtcaggagattgataccatcctggccaacatgatgaaaccctgtgtctactaaaaatacaaaaattagctgggtgtggtggcacacgcctgtagtcccagctactcgggaggctgaggcaggagaattgtttgaacccgggaggcagaggttgcagttgagccgatatcatgccaccgcactccagcctggcaacagagcaagactctgtctaaaaaaaaaaaaaagagtagaacaaggagtttgatctgttacagactgaactatcaatggagataactcactaccttcggaccagcctcatcccagtcttttaagcctggtccagaattcctaatcctgcttgtcaggcccttcaaagtgaaatgctgtaccatctgtatagctggattctcacctcctacctctcctctcccttccaaaggttccgatgtcataggaatctacgctagagggcttcctgtgtgccgggcactgtggtaagcacttcacatgcattctctctaatccttaccacttcggggatgtaaggattataatcttctttttacagatgaggaagctgaagcttgccactgcttagtagttaagagtatgggcttacagccaaacagaccctggattgattctcaactagctggggaccttgggcatgctacttaatttttttaacctttttcacatttagaagataaagataatatatagagagataatatagaagattatataggtattatatatatatatatcttctatattatgaagataatacagagttgtgataaaaattaaatgaaatgaccagacatagtggctcactgttgttttgttttgttttgtttttttgagacagagtctcgctctgtcgcccaggctggagtgcagtggtgcgatctcggctcactgcaagctctgcttcccgggttcacgccagtctcctgcctcagcctcccgagtagctgggactacaggcgcccgccaccacgcccggctaattttgttgtatttttagtagagacggggtttcaccgtgttagccaggatggtctcgatctcctgacctcgtgatccacccccctcagcctcccaaagtgctgggattacaggtgtgagccactgcgcccagcccatagcggttcactcatgtaatcccagcactttgagaggctgaggtgggaggtcacttgaggccaggaattcaaggccagcctgggcaacatagcaagaccacttctcttttatgaaaaaaaaaaattaagaaaaataaaaattaaatgaaataacatgtaatttcctaagtacattaagtacgtgcctactatgcgccggacattgtgctgtcagcaaataatagctcatcgcagatgctgttatcatcatcatcatcccaaagccacagattgagtctgtaggtgaggccctgcctggctccaaagattgtgtttttttctcctgttgctcccaagttcacctgtcccaaactttctagcccctaagtttgcttccttgcgcttttctggttgtgccatttgtccctgtctgggcagtgggctcaagctaaggcacagcagttttccagtccctttgagctactgacctcttttctgtcattgactgaacagtttccggtggctgaatcgtctgtgtaagagcttggacaattttttctgattgttaccatcatcgtgtttactgtgaaagggcttcctgtatagttgtttgtgttagcagcattgtctaaatgaaacaagagtggcaacagaaagggttggtgagcagtcctagtcttttggggtcacagatcactttgtgagtctgaagaaatttatagactctctcaaaaaaataaacgacaagacaaatacaagcccagcatttttcatgagacgttttccctgaagttgatctggaaggctatgtgctcttttgtcattgtgctactccacattcacagccatgaagggtgtcatgtttctgcagggtgtttgtatttaagggttgttgggcaatttggcaacactatacctgtttcattgatactatgtgctatttgcatttatttcccatatctgagatacgtattcacacatgagaactggcctggccattttgatgagatgtacctgctgatttgcacataaacacaagccatggcctgcatctagaggatcgactggagaggcttttttttggcccaaaacatcagactagtaggaattttattatgagttatagactaaaaggggggataaacttagcttcagcagggtttaatattctcaattcaggtaagtgtaaatctctacttttcattttaaacatttttgaaatttcagtctttaaaaaaatgcttgttttttttccttccaagttttaaggtatgggtttgggagaaggcagattccaaacactttaactcttcgacctcagacttgcttatgagcctctctttggaacatttccagtgaaccgtggagcaagcctgccacatccagcagccgtaggcatgatgatcactggtgccgatggcccctccactccctgcctggcttttgaggccccgcagaaagaaaggaacagaatcctttcataaggaaggccccagaatcctttctcctgctgtagctatgctgccagtgtcctctgtagatggaaatggaacttggattttgggtgccagaactgaattcatcacagataagattagttgatataaagctgtttctgatgagcagtttttcctccagagttttcatttttgctttttctaaattatacaaaataatagacactcattacaaagggaggatcataatgctccatacctggttttgaattccacttctatcacttattagatgcagccctgggcaaaacacacgccctctctgagccttgatttttctcattgaatgggagatctaattattttacctcataatactgctgtagggattgaaggagattggtataaataatggttttctgagagtctggtgtgtatttgctttttttcagttaatatgaattgagtacctactaagagctggtcactgttctagttgatatggaaccagtcaagagcaagacagagagggtctccgctctcatggtgctcacattctaatcagaggaggcacaagaacacaagatcacttcagttattaagaaattagaacccaggggtagcatgagagtcacaggaaggacccctttacgtcggatggccagcagaaccctccctgaagagctcaatgctttgtgacccccccggtcccaagttttccaggactcctacttttaaaaacactgcccctccaagtatataggtctcaattttgagtttggaaaatctgaccacatattagttctcttgttcattaatgggcttcccatttagagagtgagttcctggggcaggagccatgtcacaggaccttttgaaggtctcagggccaatatggacgacacttctcttgaacactcacccagttgggctgacatgaaaacctcatggtgggaggtggggggtgattagtttccagccagagcccattttgctccattgctgctttgaacattctggtttctaaggagctggaagtagtttctctcagcgagaatgtggcacactgtcatctcctgattctctgcatgcagttcttcaatggcttgttgaggctgcgtggaagcccagaggtcggggcagttccaactcacacactggcatttgaacggcagagcagtaagccctacacctgacataactgcattgccttcttggggtacggtacggatttttaaatgaccatttcagcctgctgggctgggcaacggtgatccaaactgatgagtcaggaagccactgaacagaaaggcaggctgcatctgactcacctgtcatgtcgatagttgacctccttttgtttgaccttgatttgctcagtgcaattaaagatgctgttgtgagtgcacttctgctacctgatttaaataaagtctaacatgtgacagctcagggtcttaaatgcacacacgacttaggcagacggacagatgggtgagtggttagcctttcacttacctctgaattgtaattctatcacaaggaaagggcttaatttcaggaacacggagtaattatttgagactagatacaatgccaaagcagcaggccttgattccttgctacagggcagcttaatcaggaaatggcctagatggccgcctttcaagtaggtccttgcagtagcttggcaacaggcacagggtcataattggaagaatttggctgtgagtgtctgtgggtgtttacagtgcactatagggcagggcttctcttatttatagaatattttgagcaacaagcagcagaaggctgaaaagccactaaaatctcgatttatttttaacaaattccatttttctcctcatcccagaaggagaactgagttattaaaaaacagttaaaaaatacatcattgcagagcatgccatatctaattatggggttgccagcatcggcctgcagccacatttcaagggcttcgtaaatcaaccatccattcaatctgtgaacttatatgactcctgttctccatttagatgtagagcgaaattattggcaagtgggtgctgatcagaaaaagttcttccctgtctaaattaggagatgggagggataaatatagaatagtatacttatgttctcaaaaggagataaaatcattcttcattgtccattatacttagctgcacaaacatccatcccattgcactaaatagccactttagagttttcacacattgcaatggcagttctgtgccactcaaaggcgcagtattgtgatatctcgctgagcctaaacctgagtgattattgctcacgtagtcatgaagagacataaacccagtgcttttttgcctgtgttgtcgtagtgtactagagctacaaggtgggccttcagagagacactagttttaagtatatctcattgtaggtggggaagcagaggcctaggcaagggagtgacttgcctagggtcccattaagagtcatggcagaggtgggctggggcggcagtctctgtgcttctcttgacagtgccctgctgtgctcactggagctactgtattaaacagatacccttcaggggttcacagtcttagaagacacaggcacgaagatggccaaacaatcagcccatgcataagcagaccaagatatgtgtatataacagattagttgagtggtagagaaaatgagagtggggaattttggaatctatttggatagcaaagcaaaggtaacatcagttgctctctgacccacttgggaaaagcttatagagatgctatgaagttttctaatggaaaaaggtgcagtacatttgccatgtgttagtgggaaggtaagtatgatgcagtggtgggtggtaggaggcagtgaagataagtattgcaactttggaggagccctgggaatggattgttgaggtgatttcataggaatacgaaagggagcataggaccagggcacaggccagagacaggcaatcccaagttccctggagtaccctgcccttttctgggaaagcaagtgggtggcatgagtgctatgttcccaatgctctggccccacccctggtagaagaataataactgatcatggtgggttttttctgagcctctgtatctttgagtagcattctggtagccaatatcagtggactggtgccagcctgtgtggtgaacctctatctctttcttgccctgggctgcatgtcaggcacagtgcctaagccggagtgggctttggggagttacttctctttctgaggctggaaggggcagagggacgtagggaaaactttgctagggagggcaaactgtgaaagcctctggagaagtcacctgttgggataccaaaggccagcggttttagaggatgcgaagaggccgggcggggttggtctgggcctaaactaaggctgtagcggctagcatggagaggaacaagcgacggggagtgattacggatgaggaagacgtactaggatttggctacagacagacaaccaaccagagagtaaaagacagtgacatgctaggatgtgaaccacctactacagagaaggtcagaggtggggagggaggaatcagggctgtgggcagatccagcagctgggatccaaagctgaagcccttgggttattgaatccattctttctgagaagagatggttgatcttcctgcccagggagttcctagccagactggacagtggttctcaaacatggtgccaggtgttgtcagatagcaaacaattagtttgtacacagaatgtccccaaggtcacctacacatatttgtttttcctaatctttgatacctacagccacttacctgctttcgagttctcagagttgagaacatataaatttgcagtaacaagtgcacaggaaatacttggaaaatggctgatgagctttagtttggaaatttcatttttttcttggatctggattataatttcagtacaagctagcaatttttcttgttggtaaaatagtttctagttttaaaattatttctgtagttaataaagttaacactatttcatgatggaggctgccccagctctgaaccaattttcaaaaggcagattctcctctttctctctcttatttcttgctcttgaacatttcactgtgttctagcaacttttcctgtgtgtgactcggccaggagactgacttgagtaagatccaggtcaaggggttgtgtgggtgggtcggtggtaaggaggtgctgaagaacactaaaacctttgcctgagaggagtctgggaagtagcctgcgaactggaatgaccccaggcttcctgtcacggtcatagcccatggagttggcagacttgatcactctatattgtgtgcccccaggtaatggcattagtcatcgatactgtcttttttttttttttttctttgagagagagagtctcagtctgtcgcccaggctggagtgcagtggcgtgatctcagctcattgcagcctctgcctgctgggttcaagtgattctcctgcctcagtctcccaagtagctgggattacaggtacatgccaccacacccagctaatttttggatttttagtagagacggggttttgccatgttggccaggctggtctcgaactcctgacctcgggtgatctgctcacctcggcctcccaaagtgctgggattacaggcgtgatccactgcgcccggccaatactgtctttaaatcgtccagagtaagaaaatgttgatagcttgttgtcacagccctgtcattttacacattccctgaattattgtctggcaccagcaggtgttccagaaacacttttggttctttgagccattactggtcattcctgtcaccactgccaccaccagatgtggttctgagagcattaagtaaaagttttgaaggttgtgtatgttaagactggtgcaaagtccatcctccttccttcgggctgatcagccacaccctggctatcagcacttatttactcattttcaaagtgacagaatggtccagtgggcaggggcataaggggtcacttcctctaaccacccgccagtgcaggaggatcccatctgcgcagtggctgcccatgacaggcagttccctagccccagtcggacatctccgcaccaggcatcctgctcctgctttatggacatctttggctcttaaaaatcctcctttattctgaccgcagatctgccttttggcagtgtttccttagtgacctagttctgctttttgtggcaacacagaacaaaggtcggtaggcatggcacaattccagcttagaagtttgaaggtagtgctcatggacccacatcctttccctctccacccactctatctccctccacaaggtttatgttctccagtgccttcagccattctttctatggcatggcagtcagtattaatcccagtaaaggtaacatgtatccagagagtgcttgccatgggccaggcactgttctaagctccgtacgtgaattgtcttatttatgactcaaaatcaccatatgaggtgagccctgtcatcatcctcattttaccaatgaggcaactaaggaacgagggctcacatcttgtcccgagccatgcagtcaagcagcagagcagagatttggggctaggcagtgtgactccagagcccgtgctcttagttgtggtgcaagactatcttacagcctttcctgcatagtgccaaaaataagcccatggtgcactagacttgggctggccctgctttaacttattttgcaagaaatcattagacaggagccttagttgaaccattttctgtgaaaccttcagagtttgttttgacagaacagactgcagggcagaggcatctgcactgtccccaacaaatgggttcatcctgtagctctgccaggccccacagggttcataaaatggtagctttagatcaaggtgacaaatacagggctcttgatgttttttttttttttcctgaacatggtgcctgagcaataggtttcttgtttaaagtgcttagtcatggttttatggccagaaagtagaaggagagaggtacctaagaattgcaaaactgggtcatctcttcaagtgcctaatccaatattcagtctcagagaacaactccagcagttacgggggtggaaggatgtgatgaccacctaccatccaaaactgggatgtaggtgccaaatacacattctcctgaaatgatccctggtgcctctagccaggctcttccaggagtctagagaaagatggcccatgacttcatccagagtctttgcttcctgtgctctgggatgcctgggcttttctggccacagccatacactgacagggccagaagggctgagatgctgggattgaaccatctttctctttgtgagttgctttccagatagcacgcattccggtcactattttccagagatttaagcagcaaagtgagggaccctcgggcatcgactcagagacctggaggggagcagcttgaagcaatgtaaaaagcactggataaaatctggttctaccaaaaatagggctatgagagttacctcacctccctgaaaggtaatatctttatctgaaaaatggggatgataatactactaacctggaagattgacaggaggattagatgagattctgcatggacataacagtccttggcatgatgtctagcagtgaagaaacataaatatgagaataataacttccttcttcctccgctgtctattccttctcttattctagtcctgtctgctgttgggttttgtctgttgttttgggtaaatagctaacctctctgcctctttttgtctgtagaaatgctactggttctgaatgggtacttcgcgccccctataggacatcgtgggaatgtgtgtgggtgatctggatgtcacagtgacccagacgaggcttttactgggggaagaggggaaggcaggggtgctagatataatgcttggggaacaaaagattgcccaacatctgcatagctgcctaatgctcagtgcattcttgtgggcaaaaccctgcttaaaattatctgggcctagagtctgactccaattaacacataaacacaaataatttttgcatgtttttaatatatactgaattttctgcgaacacagctaccaagtatataagatttacctatttgttatgaataggtgcaagcatttcatatatctttcatgatgttttctggtgtagcggtgccccaatacttacatattgatttacatgttgtcttatttttaactatatttcctttcttctttgtattacagttagggcattatattgattatttttggaattataagtgttgtaaggttatattacttacagatttcaagagagctaaagacatatttaaaatatttttattgcatttttgacaatatgaaagagcaagagagagagagtgtgtgtgcgtgcatgcatgcacatgcttacaaattagctagaaaaatcctaagacagactttaaatgaaaagaaatggtttcatagctcctagaaatgtccttttacataaggatatgtagtagaagtccaaatttttaactgcattcattgtcagagaaatgaggtgttttgatgtttcccctgtcccttttagaaagtatatgatcctaaaagagcctgaaacagtttccattgtcatattttttcatttttgcaatctctatttttttcactcctcccacctgtgcatatatatatttaaaagcgtccccatatagacttttaaagaaagaaaagccagccaggctccccactctttactaagtttgttttgattgttttgtggcctctgcctgcacctcggcctgagtcagactgactctgggagctgtgggcaggtccaagggaaagtcaaggaggtaatgaggcttctcgtgggggcaacttgtaggccaagttgggtgggttgaagtcagtctaccagaagcttcctgcctcaagcctgggcctctacctgtcctgaaacctgagggctctccagttggaccacgagggtctgacatccaggaggatccccaggagagagcaaccgtcactagggaatatgctgcccagcactgactgtactgagcagcagtgttgtgtgcctgttgggttgatgccatggatagccaggcgttcagaactgaacacgacacctaaaaggcaaacacgaactgtgaatgtgccagtgtcagatgctgccttggtggtcatgtgtgggctggcagtaagcttttggtcccttaacactcgctgttggaaatttcccaaggctttcatctagggtagctggtgtgtgatttccctgtcctttgttactcctatctggaaactagttgaaatcttttctatgatattgatatagttacagaaaatctgaatacttactactaagttttatagttctgcttagttcaaagtaacacaacctcataagagaaagtttgaaacaggtagagaaattgaaagatgaaaatcactacccattatctcagcccacaaagatagctactatcagcattttggtttgtttcctttcagtcctttctgtgtttatgaaattttattatataaataattcatgtccaatatagaaaaagatggaaaattgagaaattataacgttaaaacaaaactgacccatctcaccagttggagatgtcttaatattctggtgaatttttttttgtcttttttctatagacacataagaagactgggaaatattgtgtatatacgtttgtaccctttttcaccaatgtatatcaatgtatatcagttcactaatgaatactaattaaatgaaaatttattaaatgtatatctatttatatctattgatatattaacagatgccagtgcatatctattaaaagagtactatgtaagagatgatgttcttaaacataaaatttaatttaggcatgaaattactttgtcaaaagatatatcagtttatattcagatatacagtgtactgacctgcccatttaccacatcttcactaatactggtattatctttaaatagaatctttgctaatatgagcagtgaaagtggcatattatctattaaattttgacggttatgagattgagcatgtttttgtatacttactggtctttgtgtttcatcttttggggtttcctattcatagtctctgcttagttttccactgaggtatttgcctttttattgatttataagagattttgttttgttttaactcagaaaaggtagtattgcttcagttgtcacagagctttggagtcagacagagctgggtttgaaccctggctttcctacttgtgagctgagggatttcaggcaatttatctgacccctctcacaattaattagttcttctttgagaactaaacgaaacaacactgactagcatgaaaaaaaagcctggtgtgtggtttctgccaatagtttttgtgttgttatttttgttgtgattcctgcactgagtattttctcagaaaaatgaccttgagctgtacgactcatgcctgttcagacccacagacacatgatactcactatatccaaagctcagaaaaatgaaactgaaatcactgaagtttgtgggttttttttttaaattcttcttgccagaaggagacaaatgaaggaaaaaaaacaagccgatttcattttcattaagaggaatttgtagagttatttctggggtcaggcaggatacattcagacgaacattttagatctagggctgggaagatcccgagactcgttatagattacatcatcttcctccaagtgcacttgccaggcaaatggacaagtgcattttagaaaggttttcagttgttcacgtttaaacagaaaggatcacctggctaacttttagttaacccattgaacagatgtgccattcccccagcccattggttattcatgtccttgttactggtttttgatatccttgccccgtaggtgggaggagggatgggtatgagcctgccctgccctctttctcctacttgggacagagctgttgcttttatttgctgagtcactgaagcaatagagcatgtgcagagtcccagcctggaggtgggcatatctgggttccagtccctgctctagcccttctcagctgtgtgatcttggacaagttgccatacctctctgagcctcagtgtcatcttctatgtgatgtcgatgcctcccccaaaaggtcgttacgaggaccaaaggagacacgtcagggcaggaaccatcctaggcacgtgtttgatgctcagtaaacgggacgtggtcagtgttcagagttgtgggggtggcaggtgactgctctgtttcacctccactcacagcaacagggcctgtggtgtcacctagacatctcataggcatcccacactgaacatgtcccaaaccagcagctcctccctggatgggtggatggtgtacagggacctcttcctccagctgtcacatggggcatgtacctggcaagtggctttgcagccctagctgcccccttggctgggggcctttgtgcagttcatggactgggagtcacccccatgtctagaccgtcaggaaacccattggcttttcctttagagcataccaagaatcaacttctcagaacatagcaagagttgactttttgtcaccctgccgtggccactcagactgactcctcttacacctcacatcccattgatcagcacagcccctggaaatatgtctagaatccagctgcttctcatcacccccacacctaatacagagggctgagtcatagcatctcttccccggactgttgtagccgtctcctaactcagcttcctgccctgcttttacacacacacacacacacacacacacatggtatcttctcaccactgcagccagacttaaaacctaagagggatcatgtcactccccattttactcagagtcaaggccaagatccttactggggtctgcaggcccccacacctggccctctgactgcacccctaccttccttagctgtctcctctccctagcatgccccaggtcgctggtcccctagcactgggcagctccctgcggccctgttcactagctgtcctctgcctggaacacatctgtcacctctcacctcctcctgtccagcctccttggggcctttctaactgcctccctcctgtggtctgcctcctccccatctctgactttcctcccgagcacttactgccatccagcacccgacataacttacttgtttcgtttgcttgccttcctcaccaggaggtgtgccagatgaggacaaggatttttatatccctacccccatctgcagcactgccatggagaacagtgcctggcacttggatgccctcagtaaatatttgttgagagactaataagtgatcgtgggccagcatgccaacagtgtcttcgttattacaaaattgtcccgaattgaaatttggctactacaagcagtttgtggtggaaatttactcaaattaccaattctttcactgaagaaattacctggcatatgtgggttctcaataaactgtgttggattgcctcaaggctttggggcagtggtagccgtctgaggcctccttgccagtcaaccaaaccctgtgctgggtgggacataagagatgcccccagcatccttagctgatgctactatgtcaccccagaatccctggggcagcccacccctcagcagcagctgtcaccctgctgggttccgcttttcctcctgtgggcttcgtctccctaaggaaatcattgtccttgctttctacatcttatctccctgagcagctccaaaattctgttattcatatcccactgacctttctcattgtcctagtccaagcttctcacaggaggagttgtctctctgttttatattaaaacaaagcggttggactcttaaaactctattcacttttcagattctttggagtcctcaatgcttcctgctatgaaatgctgcgctctggaatgccttccagacccacccccaggatacctgtagccttccctgcagccactctcctcaactccctcctcgttcccaggggtcaatgtcctggatctctccagctttaagttccttcatgtcctcttgccacccctgctctcaccatctctgagttcttgtatccccaggatttcaacctgagtttgcatctcctgacatcacttttcccagccttctcccttttcaaccagcacaaggccatccacttccatggccatagtggacgccactgagcatgctaggtgttttcttctattcaactcatgtggtctgcacaacaacccagtgcggggaatccacccctttcacagatgaggcatctctagctcctggaagtcacctaacttgcctaggacatgcagctagtaagtggcagggctgggattggaacccaagaggccccgccctgaccaccatcctgccctgcctctcctcgggcacccagaatcccctcactctattgtcaaaacccaccttgtcctgcctgtctggtacctaggggagaaccctcagcctcttcttctgctgccacttgcttcctcttctgccaggaaggtcccacgcctggccagcctgctctggagacacgcccactgcctggccttgccaggaggctctgatgctctgcaggcttcctgtcccacggatcccttcctgcctgtcctggggtcccaccaccccactttgtagttggccttgctctttattgtggtgaaaggtgcaggccattccatccaagatcctataatattccttttctctgctgttgaatgttcttcccattccccccacattctcaaagaaggcatgtggctttcttcactgcgtctcggcctgccctgagtccagcccctgctgcctggcccagcctgtcttgttggcatcccctaagccctagccagaaacacaagcacctttcaggtgctccatcctaactccaccctccctcacactggcctctctccctttgccaccagataacagcagtgcattcttttgtttcctttagaacaagatgcagatgttttccagaattttcttcaacttcaggcagtaagttttttggtgaaaggagtattactccctgagtctgtagaaccaggctctctcctcttattctgtagcaattaaagacaaagacaggcaagaaaacaatgaaaagaaacaggagccaggctgatgcaccttcatttagctggtccttgagcatgactcattgatccttcttgcttccatcagggattgcaccctgtgccctctttgaatgcaggggcatgtcaaggccaagggtcaggaagagagctttggcctcgccagcctggtccccagagtggaagtggcagggcaggaggggtgtggcagacagagcacatatcgcccccagccttgcccccagatgttgagtgctgggtgccggagtgcagaggggaacaaggcctggaccctgcctggggagaggcagcacctgggagatctttgtggcttcagatcccatgtggtcctccaggtaaagcagagcatctctggggtctaggctgggggaaaactcttgcaaaaaattcctggttctgggacagaatgcatggggtctgcgtgaggggcagaggacagtgccaggccagtgagcacgcactgggcaaaggaagtggccagagaccactcataagaaaaagtgggacatgaacctcagagcctgggctgctttcagaggagccaagagcctgggaaataagcatcttctggtgaggaaatcagcagggggaggggagggtcatacaggaggggacttttaatcctgaatggccttgcagggcatggttcccctagtgtgccccatggaacccttggctgttagatgtgaggtgataaatggtgtgtggatgcatacacttgggactcagactctgctgcccttagactttcaccctccacagggctgcgtttaaaggtccaagaagccctgcagaagaaaaacctaactattgaaccagcattccctatacgtatttggcccctgattttttcccccgaataacatcattacaatcctatgggattagtgttccatggcagaactttgggaagtgttttttgaagaatttgtaaatccctgcaccctctggactgtgcccatttcttagattgcatggaggctgtgctgtacagtggaaggagtatgggctttagatgggactggcctgtgtttaaatctgctttcccattatacaaaatctctgatcttgatcaagttacttactctctcaaacttagtttccttatctgtaagacaggggatgaaacattagctagttgtcttatgaggctgttgtgatggttaatgggaagataataatgacacttacagagggcttgttatgctccagacaccattctgagcactttatatatctcacttacttttcaccacaactgtgaggcaggtaatgttatccttatcctacaggtcaggtcaggagaccaatgacacatacaggctaaatgttgtgcccaacatcacacggctggtaaatgtgggacctaagatttgaaccctaggcactcatacatgatggggtcaggatttgaaacttgaccgtcatctcccatcagagaacatgctctgaatcagtatgttctaaagggtctagagcagtaaaagcactaattggtatcagttcccttttcagatggttcgtggatatgttagggggattgatggttcctgggactccaagtcattctgcagtcattaaaatcagccctgttgaaagagtaatctcctcgatctgcttgcccactcagatgctcccattgtgaccattttgtttgctctgctgcctcatcctgggccacttcaatttgggtggctgctcagcgttcaggtggagtcgggccactttccacagccatctcatctgtggcctgtgcctccacttccaggaccaagagtccccccaggatgcccagtgagttggtagcttgttctctttctacacctcagtgatggacttgacaaagggttaagaagacatcccttttatcattcagcaaactgagtgcctttactgagctagatgcatgccctgggggaactagcactgtttggtgacttagttagacctctgaatccctctaccaaccctcagtagctgtctgggagactgggattctgtggactctcctctatcaacgatattgggggtcttttccacaaagaccagcctggttttgattgacaaagtgcctcagatttacaaatcttaccccttgcaggatcctctcaactgatcaagccccatagctccaaatgccgtctccttgattgatgtttaatttggggatccacaagcatctagagctaccagttgaatttgggtacccaagggccacaaatgggcccccctcacaccctgacccctgacaaccagcacctttgagactgaagtaccactgcatatagtgctgtcctctgctcagggcattctccctaccagccaggccacccggcaaacccctgcaacacctcataagacctcttcgctggtctcatctccttttattaacacctcctcagcacccctccacacacacccaagcccacaagcaaatcattttttcatctgttttgctcttgtaccttacctatgctccactaatacaaaaaaagcacgccttcctcaagacacttgactgccacctgctggagagttgtcatcatggctcaacaaatatctgccacttctaaacccccaggcacctctggagtagggcagtgcattgcttgtacagctgtaaacatggcctgcctgttgaattggtcatgctgtcatgtacttattaaaacactcgtctttctaactggactgaggacatcttgaacgtaaggactgccgatttctgtcttcgtccccattgtggcttctgctaggggctagagaaatgcttattgaatgatccttgtgcaaacacctgttaccttaggttcagggcatctgctgtcattcagtgaaggtcttctaaatctgtctgttgcaaagcaaggctcgccacaggctgtcagagtaaccatggaggtcggacaggacttgcagtggggacagggccccatcagcctctcacctctgctcagaggcaccaccctctgaacagatcagagcataaacaggtcagagcaattcagcattcattccctctacagacatcagggcaggcaccatgtagtggagagtggggccaggggccatctgccatggctgtttgggctggggaaggagagcagtacttctggagcatgtgctgtgctcagggccagctccctgtaggtaggttgtgggaatgcagaggtggcaactcaagcacccctgctggggattcagagttttgtggagaagtagatcagtaagcacatggataccagatagggttgtcaaggatgttgattcactgttgtccctattttcctaagctcgccacatcatggaaggctgctacccaagtgacattcttgggcttcaccaagtgttttaacagagctccacccagctgtcacactaggggtaacacagtgggccagaaggagaggcaggccttccctggggtcccattttaaaaagggggaagtcctctgttcttttacaacacttgtttaccccaagccattcagcatagtattacttaggtcccatacagagaaccttccaacagatagctctccttgctcaggcctgtcctgatgaactccctgatattcttccaggtcttaaaagagtgagagctgagcatttccctctctgccctggctgccaggaagctcagagataacttgtttgctcagttcctgtagctttcctgacccaggacttctttttcttataaattctccttgttccttttccaggaatgcttgctttttatgttttgtttgtttatgttgcttttgtctctgtattatactttggggggtggtttttggaggcaggattggcagcagccatggtagttagaagcaccagcagtaaagctggacacacctgggtttcatccccacttgctagctgtgtcattttaagtaagataagttgcctcttcagttctcggttcctcaccttgaaaattgggataatgatcataatgaatggataggttattgtgaaaattaaacttgtttattgtaaatgcattgtttcctgttcctgctcttggatcaggcttgatctgtggctgtagaatcctagtcttaatttccttcttcctgcctgtgtctgtcagcatatgatgagttgtacaatagtagtgactaggggaccaaccatcccggtttgtctgggacggaggggtttcctgggatgcaggactttcagtgctgaatgggaaggtcccaggcaaatggatgagtcggtcaccctggtaataaacaacctcaacatctcagtggcttactgtagcaaaggtttatttcttcgttgtgctactgtccatccagggccttggctaaaggaggagcctctatcccaggaaattgacagtcatgggcacagacagaggaacacatgttaaaggtcctttagaaagttgtggctgtcacttctgccctcattcactggttggggccagtcacatggccaggcctgccaccaggctgtgcagaaccttcccactgggtgggacagctcagcctggaacactgatccactctgccaggctcacctttctcttcttttgcattttagggtgctggagcagggaccagggaaaggagagagtcacttggtctgaactgggggtcttggatgtgatcatcttcctgtagatggtcggtatgggtttcttaaggggcagggttcagcttcaccctgctctgctcagaggagcagctgtgtctcctttggacgccttctagtggttgatgccctcacctttctcagctgccaaggcctctctcgacagggcaggctgggctgtgacttctcttccaccctccttgctccttcctgtggagcccctgagatcctttccccatgctcctgggtggaatggagggtgccctctcacattcttccaaggcatcttgcgcaagtccctccatgccctgctttctctggcggtccagcatgcctccatctcacctttgggactctctagcttggaagtgggcacacctgcagcccctgactccaggaccacaggctaggctctccccaaagcatcctcatcacacaccatgtggatggccaggtcagggcggccgtcagagcccaccctcggcaaggataccctctcaaaggcacctctgttggctcaaatcccttttggaagtagcccagaaagaggctttcttttttcttatcttttgttgttttatttattgttcttgcatctaagaacaccttcttggtcagaaaacagttttccagaaataatgttaagtaagtgtcacaactggtttagctccctaacctggtctaagcatataagagaggcttttgaggctgggcgtggtggctcatgcccataatcccaatactttgggaggccgagatggagggattgcttgagtccaggagtctgggcagcatagtgagaccttgtctcttctaaaaataaaaaattagctacgtatggtggcacatgcctgtagtcccagctacttgggaggctgaggtgggaagatcacttgaggccaggagttctaggttgcagtgagctatgatcacaccactgcaccctaacctgggcaacagagtgagaccctgtctcaaaaaaaataaaaaaggctttttgatttttgttttgcagaagtaccaaaatctatattagcatttattatttttatttctataaagtaaatttgagtattgggaaaattgatcaaaatgagaaatttcatatggagtttagtacttgaaatttggatccttcatctaaatttcagggaagtcagggctgggcatggtggctcacacctgtaatctcagcattttgagaggccgagatgggcggattgcttgagcccaggactttgagaccagcctgggcaacaatgcaaagcctcctctctacaaaaaatataaaaacaagccagacatggtagtggtgcatacctgtagtcccagctacatgacaaactgaggcaggaggatagtttgagcccaggagatggagattgcagtgagccgagatcatgccattgcactccagcctgggcgacagagcaagactgtctcaaaaaataattaaataagtaagtaaatttcagggaactcagagaacgagaaaggacatgaaattgttcatttatttagcatttgttgagtaccacctggagtgaggcacgagatcaggcacaggagacgcctataaataaggccctacctgcctgaagcttatgggaggtggaggagacacgcctacaagcagagaatggtcacagggcgtgaaggagcctgggcaggagctgctgcaggagagccagggagagaggatacagctctgaaggcttctccaggaggtgtgcccacgggcacaggaaaggaaagcaggagtttatcaggtgactgggtggttgaaaggagccacacctgcaagaaacgtgggcccagcagaggcagggtggttttgggaactcttgtcttttagtctgtcggggggctttgggtagcagatgggagggttgggctgaagactaagcagtgtttcctgctgggtgggtttgaactttgtttggaagacttagggggaacagtgaagctattgcagtggtctgagcaagggggtatcccgcctctgaccacagtggagaggggatggggctggagacgacagcagactgaacagaggcagtgacaaggatctggagggaagtggctgggcccatcccttagagggctgtgtgggggctgtggggtgtgggaggaagagaggaaggaagcccagggtaggttctgggttgctaatttgggggctgggaggatagcgtgtgacctaaacagagaatcagatttagatggaattacctatattaagcctggggatttcatatctatttgctgctgctttaccagttgaggctcaagaatgagaagcacaaaatttctggtcacattatttgcatgtgcccagactggggttaacagaatcggacagtgagcgttcctgaatcagactgcaatggggaatgaatgccttgggaggctggaagcagttgtattcgcagatattcatttggagatctctatagcgatcgaggcaaagataccccaaagactgcaagaattagccagtggaatttgaaatgccaaaattttttttcagaaaggtcaggaaagccccgtttaaaatctaaattttgccatctcaaggcagtgcagggatggattaggaggatgtggggtgacccttttcttcctttcagagccagtttctgccagacacaggaatcctccacatgagtcatagggtggagaggagacccctcagtcctttcagtaaggtgggagggcagtaccgcccggtggctaccatgaaccctgtttcagaatttctttcttaacttcgtgtgtgcccaggtgcacttgagattcactgatgttttctttagaccgaggagctcgcttcagcagttagtttcaggtgttggctctgctggcattatgcttcggcttaatgttttctgaagacttgttttctgttgtttttcattgttcttgttgtctggcttcaggccactaccttcaacctagcaagagctgagtggtgccttcagcagtgaggtagcttctgaaggccaccactctcttgctgtgtgactttggctagtttctccacctctctgtgcctcagtctcttctgtaaaacggagaacacaggagtatctccctcatagagttactttcaggtttcaatgagttaatctacataaaacaataaggatagagcctgacacaaaatcacactcaacaagttttcacaattatgattacttgacccagtaggagaaataaaaaacacaactaacttccttctaaggacatgcccaagaatccagttttagtaactttgaaggcattgtttttcaccgaaaatatctcctgccagattttttcatgtgtttgcagcttagctttaacaaggagctgaaggacggccaggcagcaaggggtggtgagtgccggtagagtgtgacgagctcgcccagccttcctccctgtaattaggagtcatgaaccatctacaccatctcccttagctaataagagatttttacatttacttacctcaaagtgacctgtctgggttttcttttcttgtggcccccactgtaggtttttggaagaagctgaccgcctgaaaagaaattataaaacatgaaaatcgctttgaggtgaccaagtccagaggcccctaactcctcccaagctggatctggggtgtaagaactgtgacttcaggtaacaaagtagtatcccctccctgccccctgtgaactcatgattcttggtagcttgcatggcagttcttcctttaggaagtgtagtttcttccaggaactctgaaacttggggtattctacctcatgcggttgtttggctggtcaaaaaagggagtgggggattctggaggtacttcatgtctgctgcatggcccaagggggccagggctccataaatcaccaagaccctgagggcagggctctgtactcattcctggccctgcttctgtaaatgttaatgacaaaataacaatgtcacccacccaacagggtctttaatatgattaaataatcatgaaatacttcttgaaggataaatcagagagaatagctaggaaatttccaaaaataaagagcagtaggagagtatttgttctgctagctattaaaatgtattctaaagcacagttgtaaaaacagtatagtactgtgatggaaataactagatcagaggaacagagtagagagtccagaaataggtgataaatcaataaaggtgtatttcaagttagtggcaatgggatgcatggactagcaaatggtgttagaaaaaatctcctatccattagagggaaataagaaattcctaagcttaggtagtatatcaaaataatttccaaatagcattaaattaaaaaaatcattaaaatcttagaaaaaagaatatttatattattttgggtaagaaaagacttaaaacatgtcacttttggtcccacatacaaatatcgtaaacaaagttaaaaagcaaaagggtgggaaaagtgtttacaacatcaatgatgaacaaagaattaatattcttagtatacaaatttattcgttcattcaatatttattgagcacttagtatgtactagaaagtattctgggcactaagggcacaagcagtaaataatgttcctgttctcctggtacttagaccctgatggagaggactgccagtgactatggtagattattgtaggtcacattttgataagggctaaggacaaaacattacgtaggtggctgggctagggaggcttggcagggtttgcattatgtggatattcaagggggcttcactgatggaatgacatgtgaagaaaaagggaaagtcattgaatgtcgagctgatagcacatttgctgtttttggaatgtcgagctcataggatttgctgatggattgaatgcgggttgtgaaagaaaggagtcagggtggcttctaggtttggggcctggcaaccagaaggattgacataggaatgactgagaggcttggcttggagatagagttttggttatggatgtttcagtttaacatctctcttgtatattcaagtgaggacgtcagggaggtggtcggccataaatatctgtaattcagggtgacatctaggctggagatataaatttgggaattgttgcagtgttgatagtatttgaaagaatgacactagctagagcccctggagagtgtgtgtagatacagaagagggcccaggacatccatgggaccctcccttagagttgagggagatggagccagctaaagagagcaaaaaggagtgaccactgaaatggaaggagtcccgtgagaagggggatctcccaagccaagagacagtgagaagggcgaggtcagctctcctctggatgtgctgatgggcaaggagagaactggccattggatctagcagtgaggaggtcactggtcaacccaacaagggctgttttatgggaatgatggggagagaatctgtttggagttggattattgagaataagaggaaaaaaactggagacagagaaatgggacaatagctggaggaggatggtattcaagtaagtttatttttcccaagatgggagttacataactcttgttttcacccaagtggaaatgattcagtagcgtggggagagtggatggtgcaggattgggctggggtgagggttctgaaatggtggtctcgaggaggtgggagaggtagaatccaggcatgagctggggaagggatcctaagtaggagcatctaaggaggtggtaggtgtgcacctgcctcttttctcagttcactaagaagcagagtcctcagcggagaatggagactaaggagacgatggaagtttgaggagagagggcaaagtatgaagtccttcatagcagaatgagaaaataaatggccaggggaatgaaggattgctgggcggcatgcaggcctctaaggggtatgtttctccagccatgtcctgttacacaggtgaacacggggtaggaggccattgtggtagaaaaacaggacatgagcagacacaacgtaagacagagaaacgcctgtaaagagaaaaagcaacatcagtaatagctgaagaatacaagtaaaaacaatgaggttttctttttttctctttagactggcaagagctcttgttggggatagaaattattgtcgcttttctggagcacagtgttacagtatgttccagaatacaacgtgtgtcccgttttgacctgtcagtcccacctttagaaatttattctaagaaataattgctcaaatgcaaggaaatatatgcacaaagatgttcaccccagcagtgcttatcaaagtgaaaaaatggcagtcatctaaacaggaggcagctggttcacttatctgtcggcctaacagtgatagtgggaaacagtagctcacactcaccctcctgttttgcagatgagggaagttgggtccagagaggggtagtgacagctccagtcctactccacggagctcagaccccctggctgtaggcaggcaccctgcccaacctcttcaactgggcttggagtcagagtcccttgcaaggcacttgtcaagcccttttcaagggccggtttgcttaatgcttttaaaatacgagttctcaaaatgttttgcaaatttgtttacaatgtcttcatttcatctcatggctttccttgcaaaggatgctgacagtggggggaaaacaggccgactgcctggccgtgatagaggggaccatattttcctgattcccaagtaagacttacagtggaagaaaggatattttctgctttcttacagtgtttacaaaagtcataacaggatgtgaggactatctggctgcaacatctgtcaccccattggtcgccagagttgattgggctgatctggctggttaggcaggtgtcccattcctccctcaccactccatgtgcgtccctcccaaagctgtatgctcagaaaggatgaccatccccgatagaggaggactggtctttggtcaagggtatatgagtagctgcaatcttctgctagggacccccaaacaagctctcaaaagtcataacaggagtacaaagataataaggaacttgcatttatttgtttccttgatcatatgtttattgattagaagaaaataaaattagcagccagccgtggtggctcacacttgaaatctcagcactttgggaggctgagacgggcagatctcttgaggtccagagttcaagaccagcctggccaacatggtgaaaccccatctctactaaaaatacaaatattagccaggtgtggtggtgtatgcctttagtcccagcttcccagcgttttggatggctgaggcacgagagtcacttgaacctgggaggtggaggtggtagtgagctgagattgcaccactgcactccagcctgggtgacagagtgagactttgtctcaaaacaaataaaaaataaaaataaaataaaattagctttgtgtgtggagaaaagggaggaaaaataattagcattgtcagagaacatctgggttatttggtcccctccgtgggaactgccctgggttttcacttctagagtttctggttctggtttaatttttccacgccacagcacagggaccgagaagctgctcagcttctctaggcttttatgtcttcaccagaaaaatgagcgggtgggcttaaatttcctacaaaaactcttaaaataaatatgatgctctttccattctatcacatgcctgttctgggtccgggggtgtgagagatgcattagtgctgctgtaaaccagccccgggtctccccccccggccccccaccaccaaacccccaagcaccaacctgggttctccaccacttttgagagctcatcgaaataaacacacctttgtgcctcttgtaacaattccagatcatccaatggcagaccagagaatggacatttcttcaaccatcagtgatttcatgtccccgggccccaccgacctgctttccagctctcttggtaccagtggtgtggattgcaaccgcaaacggaaaggcagctccactgactaccagtaaggcctttggggcatgtcttcctcttgttaaacttggtgtcagttctcgggcatggaacatctagcagccagctactgtttcatcctggaaaaggggatgggaataaaaaacccaactctaggtggcgacacagttggtttttggctttaccttcccctagtttgtaagcaagaaggagccttcagcagtgctgaggcatttaacttccacttcctgtccccaaaatgttctacacccagagaaaaagaacagccttaaggccaagttctgtcttttacccctttcttcgtcttctttctttgctcctttgagcaagagggttaagtctatgggtgtcatctcagggggttcaaagagagctttgcctgagggcctctctgaggaagacagcaagtgtcaggtgcttaatgaatgtttatggaaggaatgagtggaggtcctctctgaaaacaatttaggaacattgatgttgtccttaaacattatttaaattagtatgaacttgttatattaaatagtatttttgtttatttttagacttgttgacttttcgtttgagtaagtaaattttcacacttacagtcatcccttctatatatgtacaaacacctagggaataaggcagtgtagaatattcaaaggcacattttgttttgccgaagcacctgcgtggaatcttacccaaatgtccatttaagaggttttcttttgtttaatgagggaaaatctccgaggaggtataccccctacagcagatgtcctttctgctgaagttcacaggtcgaatttggggagcacaatggctggaggtcagatgcccactaggagatgctatgattaatatgtaagttatcccagatgattaagacagccaacacccaggggctggagagtgggtatgagggctgtgagggcgttcttccatagcagtaactccccagcagaaagactgcgagatgttggccacaaaccctttgtcttgagcaagcgctaagggagccactgatgtgttctaaggcctctgtcatctggacctgtgggttccagcctggtcaccacccaagatttcccttgtggactctggtttgctaatcttctgtaattcatggagactcaattaattaagcaaccttaatccctttcactatcattttaatgtaactgaagtcatctgtgactgtcaggcagagctttttctcacctgagattatcacctggcctcaaggaacagatagaattctagacaaaagggagaggggagtttttgtccttccgtgcggcctgcgtgatctctgaactttagaactagctggggaaactctctgcctgtgaggaaccccagggcgtctaattgggaacactgttctagaatgcccatgatatgatccagtgctcctagaaacagctatttttgcccttgggattacattgtttgaagggccatgctctctcctttcctgtgggataaaggaaaaaggagagaggcccagctggcagtccatgccctcctgataaatgtatggattggagaaggcggtgagggggatttggaactccttcctctggggatttcagtctgttttcttctactgaaccacaggatgcaacgaaacttggttttctgaagtctgtgaaagggagggagatccttgctgtgaccccaggacttctgtggccctcagccccactacgcccctccatcccaattcctaaaatctaggggttcccacctacctgagaagcagaatatttggcagtagtgcctttgaaaagctgcctggggctctgctcagtactttgttggtactttaattccaccctcctcacttcgtcccttccctgccaaatagatatgtatgcacatttatctttgatgctcaatatgttttgcaaacagaataagcttcatttatccagaatgatggggggggagaatgagaggttatatagatatttcaatcctatggttaactaagcatttttataaacactacatattcccaattttcaaacaatcagaatatggtaaaatatatgttaacacacaaactcttttgagatgataacttttgtttgataacctgagaagctggtccaggttttatagtaagttcaagttaattttcatttgttttacccttattatacatcattaattgatactgtggctgttcgaactttatgattgtttggtttctggataaatgagagccttctgtcttatgataagaagctcttctgtatgtctttattaacatgcagtcacattctcttttgttttttcagagaaagcatggacacagacaaagatgaccctcatggaaggtaccatgaacctagtaatttgaacttcagcatccttatagccattttctttgcactgttacacattctgttacttggggcagcacccatgtcctcaactggagatgagcaaggaggccgtgagcctgtgggcgctcactgtgtccctccaacccccagtccccttgtgtgtctgcagagagatgacaggatcaggcagaagaaaacagcaatgtgtaactttgccattcatctccagagaattatgtttttatcttttgctttttcctccccccaggttagaatatacagaacaccaaggaaggataaaaaatgcaaggtaagcttggaccttattttgtctacaaagcatcctagttctggttgcttagagagcagctgaggaggctctgcatgtttggtcctgtctaagagttctgttgggcactgtcacctccttagggaataggcaggtagtgggccttggccgaggtggccttctgccctccatgctctccatactggctggcctttactctttgctgtctaagcacctttaacctgaagtggatttgaaggtagcagaaatcaatcaaggctcaagtttttccccagtcttcagcagagaacgtcttcctgactggagcgccctccgcaggagacatggctcagtgatttggttcctgggctgggacttgcctctgtcaggggcccctattgcactgcgagttgcaactgaatgcaccacatggggcatgctcggtgtctcgagtagattctctgcctgggtctgtcctgcctccagccacacttgctgacctcttcccattgcgtcctcagttcttctgccgttagtaccaggctgtgttctgaggctgcgtcatgacagactgatacagggggctgcagaaattggctgccctaaggcttcaagctcttccctcggaggccagccttagcaggagctcccatggctctgtatctgcggcagctgcagcaaactacatttccatcgttgctgcacctccttaggaggaccatcaccaatggcaggtgcacatcagtcagtgtcaccctgcctcagcgggaggagtgtgacattcctcagaggaggctcctggggacagatgtagcatctgctgcacctaggtggggacctagttttgatccaaggatgacggcgttggttactgggtgccctagtcagtgaggctgtgactggaaagaattggtgccctgcccaggtcacatggccacacagcgggctcctcacagacctcagggacagcccacggggctctggatgctctgtgctatgaagccaccacctcccttctctttcctttcacccccatttcaaaatccaatttgacaaaggctgagaggaaaagaaacgaggagaaatgaacaattcagtttactctgaagagacaatttttgtagcttttctcctgaattctaaagatgaggtaaacataaaaaaattaatactgacctggcagtgagaccattttcttggagactttagttgaaaagtctaattttaaacattctgcaaattctaaatttgccttgtcagatgaacattgaaaacagttacaactcatttatttttgtcatcttttcttgatgcttggttacattttataagaaatcgtttttcatattgttgttcagggaagct

SEQ ID NO: 15444 - DNA, 77726 bp, Homo sapiens
accctaccccagcaggcgctaaaggagagctgacatgatggataacgaaaaagaagacgctgtccttctattcagggagtttaacatctggaagagccgggagttctttgtgctaaaggccctctacaaagtgcctgagatgcaaaaataagtcactttctctgtcctctcagcaaccgagtcgcatgtcgttatcaaatttttattttctgtaactgtttccttccgtcttgctccgtagacagctttttgcagcagagagcgctgccgcggggctggtgtctactcttcagtaagtggtcaaaacctggctactggaaggaaatgcaatggaatcgctccgcgctcgagtattctctttggaactacgggaatgacagctccagtgggacacttggaggtcatgatgaacgcaaagaacgtgagaacacttgcagtcctcggggtggaaatgccttctagaaatactaagtatccgttctctcgttgagactttggcaaaccagggattttaggaagggtctggcactcaacgttcctaaaattggtttcctagatggagccggagggagagagggagtcaggaactgctgcttttcgtcggaatgcccggaggggagaagaagaaggaggaggggtgagggcgggcggccaaacgccagccggcaggggacccagagaagagggacatcccgggcgaccccgaggagcgcggcttgggcaccgcagtggccgcggctagtgggagacctgaggggaaagggagagggcaggggcgaggaacccagggagcgcgcgcggattggtcctctcctcggggcgtgcgctcctgtgcgccaaatgattggtggcaggaaagtagcaggtaaaccggctcccgccgcctcgccattggtcagcggcctctctagccgccacacaactggccagcgggctgccgagccgcgcgcggattggctgggggcggccgccgggaccggctcccttcgggcgttcggattggctggcgggaagaggcaggtatccgggcgctgcggctcctccattggtgggcggggaaggggggttgggcacagcgattggtgggcggggggccgggcctgggccggcggggagcggattggtcggaaagtaggttagtggtgcgacatttagggaaggcagaaagtaggtcagggacggaggtgcctgtttacccgcgccggactcaccgccgccgccgccgcgggatccgagtgcgggcgcgggcgcgggcgctcccggcgagccacggtgagtgtcaggccggcggcggccagcgacgcgatcccgcgcaccccgtcgggggccgttagcaccctcgcgggcgctgcgcccctgccgccgccccgggggcaacccggccgccgaagaaccctgcccgacgtgcccgctgccggccttaaagggcccgtgaccgctccctgcccccacccgggccgtggggaggctgcgccccttaaaggcgccgcgcccgtccgcccccatcctcctcgcgggggctgccgctgcgggctagggcaggcagaggtgctgcaggagcccttaaaggggccgggaaagtgttcgctggagtacccaccgcccttccgcgggcatcgctacctggcggggggagggggcagctagctgcctcttaaagggatagctctgcccttgggggcagtgactcggccgaagaggactcctagatgtgtccccgggagcttcggggatccccgaggggaccatgcctggtggctgcccctcaagggcgttgggcgaacggtgccgcgtctgcccttcctccccgcttcacttccctttcgggagcccgcgaggctgggtgggggcggggagggcgtctccgtcgggcttggggagtccaagtccgcccgccccttcggccctgtagccagggctggcgctgcacccgggaatccccggccggcacggggccgaccccagcctgcgaactttcgtggggcctgtgccgtccaggtcctgggcggccctcaaggatgccccgtgggtctgcgggcaggtgcgcgtcggcctggggatgtcgcccggagcccgggtgcgggccggccttggagtcccagagctccgcggagggcgcagcgagcctggctccagctccgggtttgacagatgtcagggaagaaaaggttcccgctcggctattgccgggcgttgacatcccagagagcttcccgtttgcttggaagaagacgaggaaggtagaggtgaacgtcgaccttgtggggcgcatgttagcctccccgaggggtcgcgagagccggcagcggggtgagctcaggtgcccgccggcaggagctggggagggaaggggagtgctggacaccggcgcctgctgtcaagttctcgccggccggtgagagacccgctgccgccgcgcaccccgcacctcctgacccctctcccctctccgcctcggccccttcccggtcacctagcgttgttttggcgctttggcgcttgcggtctcttccttcttccaccgctactcctcagcgaggaattattagccaagttttctcacccagcttccaaaaatcagattccgtatttgtgaacaagcttttcttgacactacccgtatacccgtatttccagcatcgtcgttttattaaacatccataaaagctgccccttagatgcattcatttcccacgacacctgcttgcttgtcatttgtccttctgacatctgctgttgttcacccctttaatctattattaaatgacaactattattttaattcttctggtctcattgatatccggatctgtgaatttgggttggtggagtttttaattaatgtacccgttgaatcatgagcttaaaataatcattgctgctcctgagcagttttgaataatatcatgctctctctgcttgcaagacttaaaaaaattcgctggtgttatatttgatttccatatcaatggaattcccaaatatttttgaaaatacaaaattcagtctttcagtccatgttttgttactcagatcattttactgataagtctttaacgcagcttatagaacatatttagaaggtttggaaatttcctggacaggatttgaaattgcctgtatcatctgaagctggttctgtagaagcattttggttttgattgtagatgcagccagtgaatgataacaataagttaaaactgtagttaaatttgttctttattcaaccctctgaagaacgaacagatctggtagaaaagcactaacctgggagttaggagctggacatcctggttctagtttaggcttgggctctcatggccgttccagtcggggcaagttattaaagatttctaggttgtgtttgcctctgatggaaagtaagacggttgaactaggtgatctcaaaggttcctctcttttgaagttctgtaagtctctaaatatttaatacatttgaattcaggttggtatttacctcctggcacctccagaatatctgagctgaagccctattttcataagaaagttaagcagatcaacagatggtgttttgaagaatccatttcaaatgatttataaaatgatgactacttacgagtttgtctgctatttgcagaagaggtttgcatgccacagggcaggaaaaggaagtggccatgttttcagatttatcccttcacaccaacaatctctgtggaatttatatgctaaaagatggagaagcaccatagaaagatttggctgtattaacaaaactgcatatgaaaaggtaaaaactagatagttaatatctctctttggtgtaagggttataatgtatctgagctttctttgtgatttcatcatcaactctcactgtggtaggaaaatcaatattaaataaacagtttcagccccgtgattacatgcagtgattttaggaagcatcatgataactaaagtaggtacttgcagggaagtaaaatatcctttctagaccttgaggtttcgttgggagctagggacacaggcatgttatccttctccacagtcttttttcattgtcaccttatcacaagactcagatttatcccaaatacccaccttgtcttttcttctccctctcatgaaataagacctgctctgactcaaccccctcagcatctcttacttcccacccaaaatgtcctgtctctatccccatcgtcccctcatctcctcccaattcagagaaagcaagtggacctctcctctgttccttttcttggcctctcaccatgggcaagtgcctgggctctggtggcagaagaatccatggctcaggtttgggctttgtggtcttggatgtgtgcttgactcctctgacctcaggtttctcctcttggtgtaatggcagtgcctgcctcgtggagtctgtgtgaggattaagggagatggtgcatgtaaaaggcctggcacacaggaagcctttcctttgtgccagctgccattccttctcacctctacccgggtcctatcactagaatattatttgtgctgtttgtccttagtctcccctgccccaccctgaaaaccttaggcttgacttaggagaggaaggatggaagaggcagagtcagacttgtggtgagcctgctgtgtaccaggcaatttacatgtgtctttacttggtaccctgggttcgtaagcctctctttcctccctcctgccagcctcccccactctcccatctcctgctccattcttagtacctgccctctggcttctctcgctaccacctttctttatatttcttctcaaagttttctccaaaactttgtcgtgagttcctggggcccatctgcccatccttattcctgagtggttgttcttggcccctttgcagtatttcttttatttttttaaacatggtctcagtcttgcctggttggagtgcagtggtgcaatcgtggctcactgcagcctcccaagtctcaggtaatcctcctgcctcagcctccagagtagctgagcctacagacacgtgccatcacacctggctcatttttgtatttttattagagatggagttttgccatgttgcccaggctggtctcaaactcctgggctcaagtgacccacctgcactggcctcccaaagtgctgggattacaggcgtgagtcactgtgctcagcccctttgaagcttttacctcacttgttttttgtcctttgaaatcctttcctctctcagcctttgggtcatgctggtttcttgattctcttcctgcacccctgtaaagataaatgtctgtcctagcttctgctattcacactgtccgtggcctggggtcccctctctagccctgacctgtctctcctgtgttctgctagcaggtccgttgtggacatgaatggcagcctgtaatctgcatttgtggtctcggagttacaggtttgcagactgcttgcaagcactgtcacattgagtcctcatgacacactggagcctacatcccttcattccccaggctgtcctaaaaggcagtttggttgggtagtttagcatacagactctggagccagatttcacatcctaagtattccctactggcttcgtgacttgtggtcaattttcttttgctctctatgccttggtgtcctcatctataaaactgggatcatagtagcccctacatcagagagttgaggtgtggattaaatgagttaaagcattggaaaaagtgtgccagtctattcatggcacattgcaaacactcagtgaatgttgctgtcagtcttgctgctcttcgttgccttgccggggtgccttggcctggtttgtagtggtctccacattcagcctgcctgtctgccagaccttgccatgtgcctggacactgtagtcaagctgaggggctgtccattccctgtaccagcccttggcccagtccatccctcaattttcacgtgtccaaatcctcctctgcttttaggacccagggccttggtcctgcagcactatttcttcattttgttttccttcctccccacacctggcagcaatgtccacattgatttttctccaattctcttaggttctgctgcattccatattgtgttgggctgtctctgaaaatatctcacctgctcgctcagcctgagcattctgggagaagtttatcttgctttttccaaaatgacaggcacagggagcctttaggccatggttgtccaatgcacattgatcttgtggaggaggagatgggatggggtgggcactcagggacggagcaggtggagggaacaggatgcacactgcatagaggtgggggtgcaacagggccataagtggacatggccgtaagtacttaggtctgcatggaaggagggtttgaattggggacttaacctcagggggagataagattggataaggtttagtcatctttgctgcaggggaacgttgagtactggcatgtaatggagagtggtttttaccttagtatgtgctgtccttttaaatagtgtaaactaattctttatctagcctggttaaagaaggggatggctggtctgcctaatttaatatttggctattgctctacccactgggttttgtgcatatactgaatgaagcattggcttgtatttattccttcaatcactgtttgaaatgtctgacctgggcaagttaattagcttctctgagtgcaaaataggaataataattattacgataatagcagctaacatttattgaacactttctatgtgccagcacatatgtgagtcacctttgcttattaactcatttaaaccccataacaactacatgaggcaggtactattatccttacttcacaaatgaggtggttttataaactgcccaaggtcactcagctgttatggcttggggcagaatttgtgctggtgaactccagagtctgccctgtaacaccctagtagattcctactgggaggaaacaccccgttatatcccttacctcactcagccgcaccatgccaggagcctagtaggctgacagcaattgggaaccagtcttattgttgacaaacatggtatgagcctcttttagagcggagctgcctgaaaccctccgcataagggatgcggacctggatgctacctgagcagcagctccaggggcttgtgaacattctcctcacatcctgttatgcatggctgtctctctggcctccccctgctttctctgcagcattgctctgacccaggccccctgtggctcagccagctcctccccaggcagctccttgtgtgagatgaaccttttaacataactcactaaccccacctcccaccctcatctagccatctgcagagctcctcactggggaggggaccttttcaaaggtccctcaccttcgtccttttctccctgaagaccaacgtccacaactttggtatatccacagtgttggggtgtgtgtgtgtgtgtgtgtgtgtgtgtgtgtgtatatatatgtgtgtgtgtatatatatatatatgtgtatatatatatatgtgtgtatatatatatatgtgtatatatatatatgtgtgtatatatatatgtgtatatatatatatatgtgtgtgtatatatatatatatatatatatatatatatatttttttttttaatgccagttgttccccaaatacatttagatagtaagggacacattgttttatgtcaagaacctgttacataaaaatgtgttatataatgttcaaatatatactgcacagtgaaattagataccactttttttttttcaaagaataaaaggataataaacacaggccgtcctgaatataattaacctcagatttgggaggcatggaaggacgtgccctgccctcagagctctcgtcctgagctctgcctttcttgagtgcgccgggagcaggatggatgggaagttggcctgaatctgccatggtgtggtactgtgagatgctctggaaattgtcttttttttttggcggggggtgggggatgccttcgcatcttgctcacttgtatctttctcacacctaagcagagggaagaagctctttttgccccctcgtacttagaccacccaggtcatcttttgaccagttttctgctctgctcaactcctttcaatcttcccagatgacaggccagctttgcctgctaagaacagccctggtgccagtggcatgcaggtggcacccctgtgtccagtcttccaggctctccagggtctggtcctgttcctcctccccagccctgcttccccgctcaacctccattcccagccacagccctgtgcccgaggttcagtcctccttgcctctccgctgtcctccctaggccacctcacttcacactctccctctggctagcggggtctttgcttaaattgttcccttgaggcctctcttccttgcccgtgcctgccttggatctcacttctctgtgaggtacctctgataacatttgttccctttgtgtgtgctctcccttttgctcttgattgccaaccattcattcgttcagaagcaggggtatgtcataatgagcaaattaccatatcatactgaatcaggatggccagttgtctcattttttaattgtttcatggttaattatcttacgctcacttcccactctccagtttcactcagttactccgtcagtgaagtttattggatgcctagcactgttgtgggcactgaggatacagcagtgaacaaaacaaggggcccgcaggaggggacagatgatgaatagtgaaacacgttcatgccttgttgtgagaagtgctaggagtgctaggatagcaagcaaatagagtaaagcagtagcgatgaggtatggtgggagggagggtaccttatctagatcacaggggagacctctctgaggaggtgacatttgaacttagcttcagaaagatctgggggaaagtatcccaggaagagagaacagcacatgtaaaggccctggggttgaaaggtgcttgatatttttgaggaaagtaaaggctagtgtgactcgattatgagctgcttgtgtacagatgttttctgcctcttttatactccctttaaccctgagcccagtgttaggaaggccttgtaaatacttacatacagaattatagcatttgtcattggttatatattataaaatagtaattttataaaataataatttatcataccctgcttagaaggcttttaataaaacattatattgcatataaacaaattaagggtttgaagggttttcttataaatgcactcctagcatgtttcaccaaatattactgttttaattgtgtttagtgcagaactttagacctcataattctgcttcatgtgcacaaccatcttaaaaacaggttttgttccaaaagtttatttgtaaggcactaggtggaaacttgggataaatttttctataagaaacaatgaagtaaatagtgatgtagtttctaggcgagccctcaaaagctatttagtggtgactgtagctgaaaacatactggttggtatcagcagtcgtcaagccttctgctggtagaccctcctctcagtagcattgtacctcatttgctgttagcaatcataggacccatttacctcagtcacttctcctactgtattttcagtctgttaaagttttatagaagggattttttacctttatacctttaagatttggttgcatgtgttataaatgagacagtagtgcagagagtggggaaaactctggactgggagctgggagaggcctgggctccagactgggcccagccactgactggctgagtaaatttgagtaagttatcctctttgaactttgatttctcaggttcttcttggctgtaaaatcctattgttttctcaccatagcagggaaacgtagatatacttcgttgttcaaacctgccctcaaatggctgcctctgatttcttcttgaagaagtatatggcactcagcaatgaggaactcaagcagttccccatgtgcagagctctgcagtgacattctcagtaggaaccttgattttgatctgctatctttcttgatgagttgaaagaaattttgtcccagaacttttggtccagataagatttctgtgttcttggccaacttatcttccatataattatgtaaattgttttttctttttaactcttagggataaaaatggtgactctggcttgcctgcttataaaatatagttataagtgcccttagggaatggaatgagtttgcaggagagagcagagctgaaagagtgtgggatcaaaaacaactttaaatgttaaatgcaaagctattttcagtaccctgctggaagaaaaaatttttttcaaggttttagaggatagaagaggtttttgctccaaagaagaaaggaacctaaggttttgcagtggtgaaaagtacctgatcctttaaccaactaccaccctcccttcccacctctgagttttgttttcgacatcatgaaccacatttgccatttgagaggtttgatatttaagtgacgttagtggcagagctcaactggcagtgttcaaatgacttaggtgcagagtgctgtgctgcaaacttccccagtgcattctagggtaagggatgcctcatagagagtgacagagcacttttagctctgcctctatttggtcagttgtgaatggtgtgttcctttttttccttacttgaaggcatagcgaggagttggtacaagaagttattgcttcatggacttcactttggagctagagggtggcattagacctagcctgccttcttggatgctggaataccagtggcaatgtcatctcttgttctctgctatacccctagcaatgaaaacagtgtctgtacagaaaagtctctcaataaatacttgtttattccttcaaaaagtgaattcagctttggataaatttttaatttcctccactctctagcagtataggcttatgaggttggtcttgcaaggtactttggagtttaggttgccatttctttttgacatctgtgtttttcttattcttcaggttggtcaggtatcagtgtcttttactgatgatggttgtccctgccctgctgatgttcatcttctgttatctttaattggctccaaactgcagcaaatctatagctgagccacattaactaaaagaaaacttgttgcatatttatttaggcatagtactacacatgtatttattcagtcaacaaatatctgtgagtctatatgccaagaatgttactagacccaaaggaagagcagaaattgttgttgtgaccaaggagcctgcagtttgattgccttgtggaacatctttatgagcattgtagaagggaggaggcttcatagaactggtcaggttttcacctttaaggatggtaggatttcgattcacagacaaggtgaggacaggtatttccaggaagtggctgagcggaaacagcataattaaaaacacagaagtaggaatggaccagtttgcattcatggacacagacttgtctaaaatggaaggttcttaaataatggtgggaatttaagtatggaagatcactgaaggcccaaacctgaagccattttagacacctagtgacttgcctaaagtgacagctgataagtggtagatccaggcttaaaataaggccatgggagctctcgaccactggcactggacttggctgtttcccagcagtctctagatgcaggatttgggtttgattggggattttcttttttctttctttctttctttctttttttttcttttttttttttttgtgatggacactgagattgggggttttagagtcatgagctggaaataggcaaggctctatttagcccactctttcattttgcagttggggaaactcagtgaggttaagtggcaagtcggagtttacctagtgagtcagagactgctaggcaatggataaccactggatttgttttattatgattatgattttagtgacatgaaatatttctctctaaagcatcagtccagtgttagtgttccagttggattggagcaatgaaggactaaatgcagcagagacctgacaggaggctgctagatgaatccaggaaggagagagagaagccagaactgagaattaattgtcaattatgttaatcagcatggtgttatcagtcaccctttagatttctagagtgcggtgaacatctgcctgtgtgagtggctttcaagtgtgtgaatctgcactgtactgtgaccaagataccttaatgaattctccagacagaaagtgccactatggaagtcgaatgttttaaaacaaatgcccacattttctggaaagagcaccagattaggagtcagatgacctgcattttaggctgcttctgctgcttagtcaccatatagccaaagcaaatcacttaatgtctcaaactgagcctgactccttatctgtggaacaggtataacaattcctgttgagcccttttcagtgtatgtgtgatgcttgtgtgagctaaggaaagaataggcattttgaagctgtaaagttgctttctggctgcagggagcagcagtgcagttttaatagtgaagatgtactggcccttacaggaatagcctaggagaaccagaagaaagttcccctacctccagggcatgtttagggaatctggcgctgtccaccaggtgggtgctgatgtgtactactttattggatagggccatgttttttgtttatttgtttgtttttattatactttaagttctagggtacatgtgcacaacacacaggtttgttacataggtatacatgtgccatgttggtttgctgcacccattaactcatcatttacattaggtatatctcctaatgctatccctctcccagccccccagcccctgacaggccccggagtgtgatgttccccgccccgtgtccaagtgttctcattgttcagttcccacctataagtgagaacatgcggtgtttggttttctgtccttgtgatagtttgctcagaatgatggtttctagcttcatccatgtccctgcaaagaacatgaactcatccttttttatggctgcatagtattccatggtacatgtgtgccacattttcttaatccagtctgtcattgatggacatttgggttggttccaagtctttgctattgtgaatagtgccacaataaacatacatatgcatgtgtctttatagtagcatgatttataatcctttgggtatatacccagtaatgggatcactgggtcaaatgatatttctagttctagatccttgaggaatctccacactgtattccacaatgattgaactagtttacactcccaccaacagtgtaaaagcattcctatttctccacatcctctccagcatctgttgtttcctgactttttaatgatcaccattctaactggtgtgagatggtatctcattttggttttgatttgcatttctctgatgaccagtgatgatgagcatttttttcatgtgtctgttggctgcataaatgtcttcttttgagaaatgtctgttcatatcctttgggatagggccatgttttaaagatgattacatttcacccccgtaagcctgggcatggacggaaaagttaggcatggatagccatgtgaatctattatctgtagacacctttcaggatagtgacaggcagctgtgaaccagaaaaacaagtgtcagaatctagccagctggccagtctggcattcttggatgtttcatctgtcctggggcattaggcagcgatccagaggaaccttgattagcctgggggattcatggctgagccagcatgctgtccaggtaatacctggctgcaaagcctgactggagatctgccaaatctaaatttctgccagcattacaagtgtatatattattattattattattattattattattattaatagcagtatctaaccttgactacctaccatatgccagcaactgtgctaagtgcttacatactttttctcattcagtcttcacagtattcatataaggtgggtaatgtcagttctgttttctagttagagagactgaaactcagacgagcttcagctgatacatactaagtgtaaaagccatgattcaaactcagaacagtctcagtccagtgcccagctgcataactgctatgttcttctttctctcttttcctggtacctgaaaatacttcttgtctctggttttgaggtttctgactgtgttattggttgatggatgggttgccacacagaggctcagctcagcacagctcttttttcttcatagcttatgacggacatcctcctggatactctggctggtgagcaaatgggtgccagtggtgaatgcagcagaaagactaactcttgccagctagtgcatgtgggtgaattttaaagacaacaaaagaaatttctgtaggtcagtttttcaaagagtaactggtagcttgtagtctacttaaaggccaagtttgatgttcatcaaagtcaccctgtaaaaacctttccaaatgctgtgattctgataacaataccatagaacattcctgtgtaattgacaagtagtttttacatacaatgtcttgtttagtcatcatcacaaccctatgagggtttgcaactacatatagttgcaaagaagactgggagatatctttagttgggaagccatgagtctagcaaaatctctgtttttaagggtggcgaggggagtgaatgaggggagctagcaatctgatgtgttgtggtggtgatggaagggataagtagagtttgaagctgttgtcagtagagttgggaggatgcctcctagtctatgacatctcctagtgttatgacatctcctcttgtggactgggaaattgcttagagtttaagcaactgtccagggttctacaactggtcagcggcagaggcagcacttaagtattgcttttgtgacttaattcactctctattcaagtttcatctttgctttctctattgaagttcttaaatattctgattcactgtatttagaagtcggcaggaattattaaagtgaacttctttgtggtatacactgttactgaatcagagtaaataaaaggtcacatgattggttgttgtgttaggtttaattgacgtgtactctgtatgatacagaatactcacatatcttttgtgggatatcattggtccaacagctttaaaaatcccaaggctttaatagatgataaaacacggagtttgtgtaatttcttgaaaaagttggccatcgagttcttggtcaggaacacaagcttcaattgtaacagtttccatggagacattagccttggcttgcatcatttcagctttcagtgcctttcctaggaatggagtgaactgctaaaagaagagctctggttgtggttgtcacttagagctctctcccctactgtttctgctggaggctgatttgcttttctgggtcttctcagttttttctgtgacctaagcataaattgtctttgagatcctggtaatctcatattttaaaagttttccacaaaagacaactgaatggaacacttttttttttcacccctttaaagtatttaattggccatcaacggtggctcacgcctgtaatcccagcactttgggaggtcgaggcaggcagatcacgaggtcaggagatcgagaccatcctgctagcacggtgaaaccccgtctctactaaaaatacaaaaaaaaaattacctgggcgtagtggcgggcgcctgtaatcccagctcctcgggaggctgaggcaggagaatggcgtgaacctggggggcggagcttgcagtgagccgagatcgcgccactgcactccagcctgggcgacagagcgagactccatctcaaaaaaaaaaaaataaaataaaatgaaaaataaagtatttaattggtggcaaggggctttgctagaagaatggacacctggtctcactcaagcttcttgtattagttgggataccaggtgagtccctctgttaaagagacccacaggcacaatggctgaaaccaggtagaagttttctctctcatgtactagtccctagtagatagtggtccaggcctagtatttttaacacatggcttccatttgatggttgaaggtaaaaacttaccatctcccagaggaaacacccaagggggcacacatccagtcatttttaagggaaagacccggaagcagcacattctctttttccagtagccggaatttgcaactacatatagttgcaaagaagactgggagatatctttagttgggaagcaatgagtctagcaaaatctctgtttttaagggtggcaaggggactgaatgaggaaagctagcggtctgctgtgttgtggtggcgatggaagggataagtagagtttgaagctgttgtcagtagagttgggaagatgcctgagtcaagggtgagaatctaagcaggcacacagaaaccagggcatgtgcagccatctagaggtcagggaagctcttggctctgaaactaagcagtggggggcacccaggcatggaagggaatgtgaattactcagaagacattaggttgtcagtaaaaggaaattcaccagtgtgactgaatcagtagaaagagcacttagactaggagtcagaagacctaggtttgagtccagcccttttacttcataacctggggcaaaaaactcccataaatatttgctttattatttagataatggcaataacagtgatggcctttcctgcctcccaggcttagtgtgagaccaaagggtgaggaagtactgtgtagactgcagccccatggagatgtgcacagtgtctgcccagcccagggcctgccatgggtgtatttgttgaatgaagtgtgaactattaaaagagttgggaaaaatgcattatactaaggagatcttaatcctggacagtcttctctaccaggcagaaaggttctgctctccactggtcaaggccttgggcctatgtgtaaaactgggtacctaacaaacacatgggcagacgcctgcagctccttactgggtagcacatgacacatagtatgtccttggcaaggccatttgctcattcctctgtgtaggtaaccaagtgcaacagaagtggaggtatagcccatgaatgtgaactaatcatttttaaatgatttggtccatgggcaggttagaagatgaaaccttcccaaggccaccaaaacttgatttcttgcttgaaaatgataagatgcagttataaaatgcttctgttgatttggaaaaaatgtgtgacttgttcaaaacaatatgtattaatagaaaatgtaacataaataagaggatacaaaaaagagcttaatgtttctatcttctgggcctagcaatagtgatttttttttccttttggtaggaaaatgggggctcagtggaataatcagttttatttctttttcttttaacttcatgaagggtttgtattgttcattttgttatttaatttgttcatttgctaaggaaagaacttctttcttggaactctgcggagtgtttttagatggactttactggaaaaaaacaggaattgaaattatattcacagtgcgctctaaactcttttaaaatctcatgcatggatggaggaaaatgcactgaaatatcaatagtggttctcacctcatggaattagaggtgacttttattctcatctccttctctgtggtttcctatttttcaacgagtgtgaattacttttatcatcatgaaagaccagttaaaaattaatctcacaaattaacactctcaagccaaaccacgaatttttgtttttcacaacctggcttggactataaactgtcacactatctcagacctatgcagattcttttctgagtgaggcattgaggaacttgttataaagatgatgctttccttctggaaatcaagaaacaagccaagggcttataatgtgttaggaaagatgtcctgagtaactttcctcctggaatctgactagcctttattacagctacttaaggaaatgagttttgtgggttccctgttcactgtgtcaccatttttttctttatcctgtactcatatgtacctcagggtccccagattttcttatcctgggattgcatgaccttgtccttggctctctcgggcccctgccgtttccagtgttctctgttcatgttcacaatattgttgatttggctgtggcttcttcccgcagtgttcttgtagactgaagagagcacattgctgcccttgtccctgtgcagcttcctcttcctctttatcattgctcaggtgagtggcctgagcagtgctcctgggatgaggtgaagagaagcagtcaagactgcagggaagggctaggggtgctgagctggccgagcttccctgggggaaggcactgggccatctgtccagcagcagttggcccacagctggcagggcaggctcaggagtggctcttgaagatggctgcttggtgtttgaagacagttcccagggcatgcattcatttgttgagcaccttcaatctggcagcctgtgttctagatgctggctgatgaccaaggctgacatggctttggctgtcatgggagtttcattctagtggtagagggagagagagagagacgatgtggtagagggagagagagagagacgattagcaggggaatcaatgaagaagataattacaggttgtaagaacagccccagaggaggttacaggtgcctgtttgtcgagaagtgggagggccagagttgggataggaacctatgtccctgattgcaaggtctggctccttctgtgtcctctgggctttctggtgggaagggaggaggtggaggagaccccttgcgagggccgagcttctcccattcagccagtctggaccagcctggggccttcagatggagatagcaaaagttgagggcataagctagggactggctctcttggtcactccagttgcccatctctgtacttccccaggtgaatagccatgttttttaaagaacacggagcaaatttgcatacaagagtccagatttatgcatgctgcagctttgtctgaaggcaagcttatattttctctcctattattttcaacttttaatgagttaccagcatctcagtgcccctccagcaaggatattgggctggtgttttcagggaacaattttaattaactcctccttgcctccctctcacccagccacccccagtccccttcctggtggctcagagtctggctttggcatgcaataagaatatttttgccttggtgttagcctttctgaaactcttgattaccagtgctcacaggacctttctgcagcactgtctgcttggctgtggactacccagaggagcttggtgtcaggcaaacttaggcgatttccctgagcatccttgttgagtctgcctttgtacttctttgtcaggtctagaggcttggccgtttgtcctgctcttttgtcccctccttctgggaaccctcaggaccctcactccatggagactcagcacccttcctcctgcaaacatcagtgatggggctttcccagccctttcccctatcttccttttcaaagaacaaagcctttgaagcttgtctcatacctgtctgatgcagtatgggaatctgtaagttctttgcctcctgaaggggtctggggaatcacttggctttcagagctttcctcgctcctctcccacccacagaccgattttaaccagagagtaagtcattcatgctgtgcttgaatactccttccagtcccactaggaagactctttgttactaaattctgttttcttgggaaaggggagcttattactatctcattttgttggttgttattaccctcctttaaaaatgtatctacatacacgcatgtgtgtacctacatgtttctatatttcccttgtgaatgtggccctcagagggcctggatttaaaccctgggagtggtagtgaccctttgggaaatgtatactttttgttccaaatcttctctggcttaaatttgtgaagttttgtttcagccttggtttcatagtttttcccagtttccaagataagtttggggctcactgtaatcagcatgtaaaggagaatatggccatcagctctgccccttaaattcatagtcagactcagtggggaagccgttcctgtcccatcttgcgctcgtggctctgtcagcctcaggcagctcctgcaccgtcctcctgcctgtgacagtgttgtcaggagttcttggtacctgggtgctgcttggcctcagggtgccagggctcccatgtggagtgtgcttgctgcagtctctacagcccaggtgtctctgcagccctcctcttacatagccacagcgtggtaaagtacatccagtttgcgctgtagtaagcaattttattaaaaaaataagtttaatatgtaagtggtcccttagttcgtttgaatggctcccctctctggctttggtttgaatgagctacacctggctggagccctgctgctcccctcagcatggagtcacctccctgtgctatggaggaaaggaagaagttattcttaccttggttttgagacaagacaagcctggagaaggctgtagggatgaaggagttgcccatttgtccagcatcagttgagagtctactgtgtgcctggcatcataggaagcctctggagtgctgtgagcaagaaaataatacttgatttatgtttttaagggttcttctcgctgcctgtgggccggcagtgaggaggacaagagcgcagcagggagatgggttaggaggcagttgctccggtgcagggagcagtgccagcttgagggctgctggtgggtattggtgtgagggtgggcaggctgcagataggccttcgcccattgcccttgccatgtgtccccatgtgtccccaggggaggctctgggcatcccaaactgtgagcctgccctttcccaagtgtgctaggccctgccaagctcctgcttcatggcctatgctgttcattccatctggaatgctctcttccccctgctttccatcctagctgagtgacattgggcaagtgaccagatctctcttgagcctcaatctcttattctgtgaaagagtgctcatggaacctactgcatgggaccatgaggataagactatagttgagtgtggtgattgcagtagcctccaaagctgtctcctgcttccaatttcatcccgctactgtgcattctttacacagcgatcctgtgaccgagggtcagatcagggcaggcctctgctcagaatcctctccacagtagcttcctgtcccagtcagaggaaaagccaaatcttagcatggccctcagagcttcctggtacttctgacctcatctcccaccccaaggccatggtgtatggttgatcatgctgggttctgcacagctcattgtggtgcatgtaagtggcactcacttcctccccaacttatgcattgcacaacttgtgcagctgtacatgctgctcctacctgcgcctctctagctccactccagccacagtggaatccgtgttgttcttcaaacacaccaggcatgcttcctgtttaagctctccctactgcctgctcccttggcctggaccattcttcccccagaggtgtgtatggctagttagctcaccttcttcaggtcttttttcaaatgtcaccctatttaaaattgttccatctgggtcactgccccccaaatgttccctttttcccttgctctttatttttcctcctagcacttatcaccatctaatatattatacgttttccttatttatttggtttatttttatttatttatttatttctcaacagaacataagcttgatgcaggcaggcaccagtgttaattttgttcactgctgtatccccagtgcctggattggtgcctggcagtaggggttcagtgatgcatgagtgaatgagtttggatgcacaaaggtaaagtattgggtacggtgcttagcacactggaagcacctaatacatggatgccagtattttcattgtctctgttaactctccaggccctggctcaaatgtggctttctctgagcctttctgcagtcccttctcaggctgaattaagtcaccaccacctgtgctctgtgttccccttcattttgccttctctgtctgctcggcatttatcacactgcagtagtgggcttatctcacactttttcctgttccaattgcaattcctgtggggcaaagactggcctgttcagatttgtatctcaggcggtctgcgcccccagctggcatgtggtaggagcttaggaagtgcttgctgctggtggctgtgggaggtggaaagagctttttaatccatcaggacccttacaagggggactggctccagcatcactgccgtctgatgtttgtgccccctcccaaggggtgtcaagggagagcttggcaaccacttaaatgagagtctccagtggtatatttagagcaaattttggagagaggagtctcttggataacagcatctgggtgacctgattgtttcacatataagagtttggctttttggctactcaggctttgagaggttggggtcattcaagggaggcagtgtaatacccatgtgttcagaggtggctgggacgagagggtgcaggagaaaaggcttgagctggcctgtaagggatctgagttggtgaagggagcacagcttctgggggtggcagaaggaataggagagctgcccctgccatacctggggaggggtggttaggtaggtgccttgggaggcatggttaggtaggtggtttggggccatggggggaaaactgtaatgccagggcaattactttggcctcttgtatttggcaggaggggtccacactggggattgtggtggcgtgagggagagggccctgggagagaagctctagagtcattttcttttccagaggtggagttgtcttggggacctgcacgtggcacgcagagcccatgctctcaggcacctttggggtggcagagtttcaactgaaccaacagaggacaaggggctgagaagtcggaggccttggctgaggtgcccagtttcttggttcactttctttacctgccaggttagcagcaagtgagcaaatccctcctgcctttgctcagcattagcctcagagacttgaggagagctgggccttcaggtgggagcctggtggccacactggagaggaccaagcttgacattgagtgtccgaggggctgaaagttgttcgctcatccagagatggattcgttctgcaaacatagggaaagttcccttcccattcctcatggctgtttgaggatggaattcctgcattgaccttggcctttccctgatcttggcctttcccctgcactatggcctctctactcttaacattacgccccagcccttttccatgggcccctcgtcttccctatggccatctaaaatggccgtataatattctatcaagggaatgttttcagtaagccatgagcttgatatggagcatttagattgcttctaatttttgctctttcagctaatgctacattaagccatctctgtgtattatggaatcatttcattagttggcatttgtctagctaatggcaatggcccaagatttaatagcgaatcagaatttcttttttcaagaagaatgtcatgaggatatataaaaaatttacttaaaatgctaggaatcatctatgttggggttttcatgaatgaggaagcagggaaacagtaacatgaaattagttgtaagtgaaagactgtgtgtataaaagtaactcgtgacttgtttgttcctgagtgtggaggggagccaataaatccttggaaggagcaatctacctgtgaaaatcaaagagatctgtattcctgcatctgatgaaaacataacaaacagtgatctcttcttaaggatatttttagaaatgccctaaaacaagaaaaagtaaataagatttccgagaaaaaacatgtctccttaattccaaatgagcctctctggaaatgccatttagtagtggaagcaggttgtagacttgctgaaaggatttggttctttggttattaggaaataactagaatgaaattgacaaacagacaacactgacttggtccccagtactgctttgagcctgaggtatgtgttggctttggaatgatggggaaggcttcctctgacttgctgatttgttgtagttgttgttgttattgttttgagatggagtctcgttctgtcaccaggctggagtgcagtggcgtgatcttggctcactgcaacttctgactacctgattcaagcgattctcctacctctgcctcccgagaggtgggattataggcacgtgccaccacacccagttaatttttgtattttcagtagaaatggggtttcaccatgttggccaggatggtctcaatctcctgacctcatgatctacctgcctcggcctcccaaagtgttgggattacaggcatgagccactgcgcctggtctgttgttgtttttattgtttcagtctctggtggcttattatgtagacttgggctgtaagctttgcatttcagtttaaaccagcaaatgtttacactatataaggttgcaagggctaaaactttagggagaaagaacccagtgcacccctgtttctgagaagctcatgaccagggagtgggaaggataaagcaatgttaaaaccaatggttattcaagggagattaagaagggggccctgggagagtcagctccatccttttagagaagggaggagttctacctcactgctgggcagggtggggctaaggggcaggagaatcaagaaaggttttatggaactagttgcatttgtcaacatcttgaaggacaggctgaaatggaggctggacattctcagcaaaggtaaaaggcctgagtagaggagatggagatggaaggacatggggcaatgtttgggatttggctgaagaattgcatgcctgtagtaatggtcatagtagcactttatggagagtatcaggtgccaggcatggttctaagagctttatatgtagtaactcacttaatccatgcaatgaaccaaatgaggtactgttattatccccattttacagatgaggaagctaagataaatagcaaggaattaattgcccaggatcacactgctgtggagccaagatcagaccaagttcatctggctccaggctctgtgcttacgaccatgaagctgtcctgtctctgatttggggaaagaacagtcactagaatcagacagatggacagatgccgtatgtttagaggctgggattatcaacattcaggaatgcagaggtggaaaagagaccagagatggagatgaggggcattggagaggtggggatgggaggagggtttggtgagagccgtgaagggccacaggaagacagagctttaaggagaagtttgtcagtgaggcccagagctgcagacaatcccaggaggtgagacctgaggaataggtctgggctgaggagaaagctgtgagggcctcgggagaggggcagcagggtgacccaggctggagctgctgtggtgtcctatcctggctgcagagtgctgcgtgttcctgggggatcatagctgttgatgagtatcactgtccctgtcctcttatctgtagaaagaggtgagtgtgacagagggggcaggtgagagctggcactgctaatttggcaaacctggtgacttttctgcagcctaatgatttttgaaagctgtttgctatgctgaggcacaagtgtgacttcccccatctaaatgctgtgcaatcgctattttccctggaaaattgggcccatgtgggctctgtgtgtggtttatttgagttccatttttatagccttattaccttgtccccatgatgcaagaggcctctctcttttcttgagctttgctgtgaaaattgtttcttaaaaggcacaaagtgatctctcgtcatctgggtggtgctcgctccacaagcagcacttttctcagactccgcacacacttgtcatcgcccctgcccccacttggcaggttcctctgattgttggcaatttactgagaacttttaggcagctcttgaagctcactacctatgtgtttgtcttgatttcttccggaagagtttgtgcatgtaaatatccattcagcctctttctctccgagatgttgccctgccactgaccgtgcttggggctgaaacccagtcttgtcctctggcctcgagctgattaacaatagcagtcatcatgtacagagcctgagtggttatcaggcactaagctaagggatttacgttcgtgatcttaattattcccaatttctttgaggtaggtactattacttcccccattttacagataaagaaaatgagccttcaagggatagagtaagttaccccaggttacatagctagtacatggcagagctgggcttaagcgggcctttctaaccttagactccatgtgctccattcattcattcattggcaacaaatgattgtctgcaacaggctgagaactgttgtagacccagggtgtacagcaaagggaaaaaaggccaaactcccaccttcagcttatattctaacttggggaggtagagatcatataataaatgacatatacattatgctatgtggtaatgagaactatggagaaaaatgaagcaaggaggtcagatgggaagtgggaggattttgaggagtggtcaaagaaggcctcattgagagtacaacaaattgttaggttaacaaacaaacccccaaatctcagtgtagcaacacaacaaaactgcacttctctgcagaaaaaattccaaagtggctgctcctggttagcaggcagccttccttgcagtcatccagggacctagactccttttatcctgtgtctctgccttcttcaagggccttggtttcctttgcattcaaatgctggagcgtgaggaagaagaagagagggtagtttgtgaggaaggctttatggaccagtctggaggaagcatacctccctcccacccactggccagaattcagtcacatgttcactcctgactgcaagggaggctgggaaaggaagtctggccatgtgccgcctaaaaaaaggaagtgggttctggtgaactcatggcatggtgtgttgcagcgagtgaggtgaagaagtgagctatgtgtttagctggaggaagagcattttacacaaaaggagcagcaagacaaaggctgctggaatggagtggggaggagagaaggagagtgggagaagatgagggcatggagttgtgggggccaggccactggggtcactgtaaggatttggttgccttgggaatgacaagcagagccagaacatagagttttgaaggaggaacgacaggatctgaggcacgtctcacagggctcactctggctgctgtgttgagagtggactgagggagcaagggggatgcaggggagaagcgggcgtttgcgggtgttatccaggtatgtgaccagaagggctggccctgagccggggtggtagaggtggggagaagccgttagatttgagatcagttctgaaggtgggccagcaacttttgctgtgggattggtagtggggcatgagagaaagaaaggagtcaagattattctgaggttttggctttgcctaatgagtattagtctcacttcctaccctcagaagcaagaggggaaattttttggaaaaggatatctgagtgttctctgggccctgacctgtcctccataacctctttcactctgtgatacttttttcagcacagatgggcaattcccattcatgactaggctttcagacatggagagggcacttggagtccctcctggcacacagcagaggtgaggcagcactgggaattgtctcactttggggtctttgggtcaaaccttgggacccctttagagtgacatggcagggactgagtgtgccctctaggggggtgagatatgcctactggagtccacttccaatgcctgccatctgcaaacactggtgaggccctggctgaagggtaacaacccacaaaagtgcacaaaaggaggaagttctggaatgcgagttgatgctgccagcggtccggttggctccttgccttctgttctttgtgtgttgacatcagacctctctactgcagacaggctgccctacctgagggggcacagctgccagcagcctcagtttacaatcctagcaaaggaggagagcctttctctacatctaggtatcagtttaagggaaaagcctctgtgtttgagagtgggagcggaaactgtttcccacgtacttccttggcagtcatgacctgtcaaggctgaaactggagatgggactttttaatagaccatgatctcactgggagcatatggggaagaaagttcatcttagagatggcagggcgtgagctgtgaaaacagatagtgcacacctactagatgctgggcccccgctaggtattttatttcactggagagcaaaacaatatatcatccctgccctcatggcacagatggcctcaagtggctaaaccatagaatggctagctgagagaaatgatagttctttctttttttctttactgattgcgaatggggttgtatttttaattttggtatccatgtgttcattgctagtatatagaaatccaattgatttttttgtttttatgttgtatcttgcatgtttgctaaactcactaattagtcatagaaatttttttttgtttattccccaggattttctgcatagacaattgtatcacttgcaaatagggattgtttcatttcatcttttccaatctgtatgttttttatttctttttgttgcctgattgtgtggccaggacttctagtcctatgttgaacaagagtgctgggagtgcacatccttgccttgttcctagtcttggggaaagcatcagcctgtcaccattaagtgtaaggtcagctgtggatttgttgtagatgccacttgcactttgctggcatggttgtgagtaggactgtgggttttgtgtgtttgtgtgtgtgtgtgatgtttggctgaaatacagtggttattatctacaagttttctgtcttgaaacagggagatttgttggggcattttctctttgtgctccttggcatttctgagttgctggtctcctcagttccaagtctgagctatatgcagaaaaggaaatgcaggaagctcaccactgtgttgttccttggatcctgaggtcccagctggtctgccttcttcagactgccatttggagtcttcttatagtcatctagcatagaatgcccaggggttttcattgttcttagcaggtggaatcagggaaagtgcacctgctccatcctgctgggagtggaaatggttgggggaaattggagcgtataggtcggggctagtttagatgcaagggctccgttctgtaggtgcaggagggccgtggaggctcagccctgacagcagtgggagggggatgggaagagggggagtggagagagcctaggtggctgctgcctgtgtccaggcaggaggtcctgaagtcctgaggtcctggccgtgacagtagaactgcagcagaaagaaggacaggaagttccatgaggacagtgaggaagtgcaaggagaccaggttggtctgaggtttctagctagagcagctagctggttctgagataacagagacagagggaggggtctaagcgtggcagaggggtgtattctaggcattgtagagcagatctggaagactggacttactgtgcttcccctcaggggaggcttcacagaggaagtctggctgctggggaaaaatccagggagtgtgcattctgggcagaggaattctggctgctgggtaaaaatccagggagtgtgcattctgggcagaggaaacaacgtgggaaaaggcacagatacagaaaacggcgtgatgggcctgttgggactccagctagctgaggcataagtgggtagttactggttccatgactgggaaggatgctgtaggagtgcacaaaaggaagaagttctggaatgcgagttgatgctgccagcggtccagttggctccttgccttctgttctttgtgtgttggcatcagacctctctactgcagacaggctgccctgcctgagggggcacagccaccagcagcctcagttttacaatcccagcgaagggggagagcctttctctacatctaggtatcagtttaagggaaaggctctgattggcccaggttggtgatgtgcctgcctttggacccgtcactgttgcaagggagtggagagttctaatctaggccggatcgtctgcccacccctgttggggcaaccagagtcttttaaaggagaaggcagacaaaatgcatctggggaagataaaaaagactgtttaccatggcttactgtaatagattttgaagaatatgtagtctggcagtgcaggaactcttcatggagattaaagcaggggacttgatcaaagttaggttttattaaaatcattctggacactgtatggggttgtgattggaagtgaatgacaagaggtgtcaaggcgggttcgtaggccactgctttagctccaaggagcactgatgaggcctaagctagcttagaatcctgacttactttgtttgcacttcacctgtagcgacagcatcagtgaggtggagaacagggatagagtcctagagatgttagacaggcaagacttggtggccagatggaggcaaggagaagggggtcttatggaggattccccactgccaccaagggcataaagaatgagtctctggagggctagccttatctttggaaacactattaagtgttggcagactcgatgtaccttattgcttcttcagaagtgttagtgttgttggcttcttgtggtatccagctggaaaaggaagctgattgattgcatttccctccctttaaagagcttccttttttgagaaatcagaagataggtgatacagtcaggactgccagtggagaaataggttggggagagggagacactggcttggagactctcctgcccccagcctgccccgaggcccgcgagtctgctttaggcacattcgtccttttggcatcatccttgctgggaaggcttttaagggatttaaggaaagaaatgacacaatctgattcatattgcaccagatttcctcctctgttcagaatagactatgggtggaggtagagtgactccaagagtagcagcagggaagcagggcaccaattaggagactgtcgcagcaatctaggatggggacggtggaggtggtgagaaatggtcacattctgaatacattttgaaggtaagaaccagttttagtgaggattagatgcggagtgggagagaaaggagatgaaaatgactccaaatttttggtctgggcagctggaagaacattgtcttaaactgaggcggacacaacgctgggaggagcacgtcaggggtctgtgttggacatgtttaagtttgagacacccaccatgtcttacacaaagctcccatctacttcttacttgacacaaacagttggatgtactggtcaggagttcagagcaggggtccaggcttggagagaaatctgagcattgttagcatggaggtgatatgtgtgaatccaggagactagttgagatcaccaagggagtgacagagaagagatgaaaacaaggactgaacacgctgacataagaggtggggagatgagggagaataagcaaagataagccagtgaggtgggcggaaaaccaggagagctagagggcatgattaactggtgtcaaagctgcaaggtaaggactgagactttaccaatggatgtagcaaaatgcaagacaggccaaatgcatatgctgttggacctaagcttaactttgcaaataagtcatagttccttcccagaaggagaatataattttgcaaaaagggatcatttaagatttattaaaataaatctgagaaagatgtgaagatagtaccgtaggaatccagcagaaggaaacagtgcttctggcttttgtggggaggattgagtcagattcattcataccttcattcatttgtgtgttcattcatttggcaaaaacttattgggtgccaggggttgcggggaggagggaagagagagttgttatctagtgggtatagagtttcatttttgcagatgaaaagagttctggagatggcttgtggtaatggttgaataagaatatgaatgtacttaataccattgaactgtacacttaaaaatggttaagactgcaaattttatgtgacatgtattttctcacaattaaaaatggagagagattaaataaaaaacagagcactttttggggccccatcatgaacttggtctgggatatgatgtttgaaatggatgcgccatctcagtagatggaggtaatgtggagaagagtggaggaagacgtccagctcagagggttttgggaactatcagtcctgtttgtctggatggtagggtctatcgggggaaaccatgcaagctgagactgcagccgggccagttggtgcaggcccagcatcctggctgtggatttgggcctgccttcttagattctgggagcctctgatggtttctgcccaggggagtgtcattccaaaggtgtgtatttagattaatttcattagtccttcctgttaaaccattgcctattaaaagcagtggggttgaggcattcatttttatggtgaaaattctggcctagcagaattttagatatccaagcatgtgtcaatgaagtgagtaggttatttttccatccattttacaagtatttattgaggatcatctaagtgcccgtagtgttctaggcagttgggggtatgggacggggtgaatttaacaggtctcttctcttaaaaagcctacagtctagagaaaccccctctccttcctaaacaagaagttatgccacaacgtgccatgtgttaccataggcatgccgccacagttccatgggtactgagaggagggggtgcctggcctgcctggaacactggggaggcttacagggaaaaactgtccaatggatttaaaggacaagcagggattttctaggcaaagaagcagaatgggcatcccaggagtatggtaaatcaaaacttattgggtgctatgaatttaaagctaaacttttatttcattggcttttaggtggtgctggctagagtgtatacgtttggacccaagcttaacttttccaatgtggaatcctgggccttcattggtaagtttgtttgatgccttcttaccaaattatgctatcaaggattggtatttggaatgaaaggcaaggtagttatcattggcaagttctctgtggaggttaccagccctggacctggagaagcctgtagcacaggctgaaggggtacataggaaaagtgaaatctcactgtaggtttctgtggtagatgcagagagggaggccagaggaggggaaccaaggggtgcgggggatggatgcagcgggccttatggagaggtggagctttggctctgttttgaagggcaagctagattgaaaaaagtccggggaggagtgaaagaagattttcgggacttgagaacatagaggtgaggtgtaaacaaagtgggcctagcagcagtcccataggagcaaaatcttcatcgaaaggagtcacgggcaagaactgtggtgggatctgctggcgtctgatgattctagtccatcagcaaactttttctgtagaggaccagatgctaaatatttttggcttcgtaggccatgtggtctctgtcacagctactccactctgctgtggtaacatgcaagcagccatagataatatggaaatgaatgggtgtggcagtgttccagtaaaactttatttacagaagcaggtggtgggctggatttggcctgcgggatgtagtttgccaactccttttctagaccctaaatgcccggctaaggcacatagactttatcctgaaggcagtgggaagccattgaagttattttggataaagaagtgaagtggcagaagtgatgtttacattttaggaacattcatctgatagctggacaagaggcatgggccccttttggaaggcagcagcagtcatccaggcatgaggtcttgcggtgaacagtagtgaaaatggaagcaaaggatcaatggaggagatactgcaaagggagaaccaatagcgttttcagtcttcttagacttaagaggcaggagtcaaagaggatgaaagtttaagcttgcttgtttacggtggtatctttgacagaaatgtagatgttgggggtggaaaggatagctgatgcatctggttttagatatgttgaattcaagataacagtggttcatccataagaaatgtccagcagagaattggaaatgcagggctgaagcctggcctgagaagattaagtctagagatgtggaatggaagccataggattaaacacggtctccccaagatgagcagtgggctgagctgtggggaatatgcgtaactgtgggacgggaagacgatggaagagacccagaggccatggaggagagtcccgggaagggaagagaatggggcagcagagaccagggagaacggacctgaagggaggctgctgaatttgtgacaaggtctttgcagatggccttgagaaatgtaatgtcacaagaggggaagggaagaggaagccaggttacatggagttggacataaatgaaggataaagaattgagatgttacaaaaatagaccgctcatagaaggtttgggtagtaaaagaagggagacacataagatttagatacttgcttgtcagaataacctttgctttagctttgaggcaggcaaagcatgctgtgaccagttttcatttccttctttggagccaagctgtgtttgggagtttgtgtgtaccttgggcttgtgattgtgttcttatgctcccttttgaggtgtggtgttcgtaactctgccacaacttgcaccacggaatccagcccgtgtttggacccttgccatgagacaagatgtgatctgttggggaagtagttgcatttgtataagttggaggagaaagtagagtggaccaaaaattgaaataaaccttcttactacagagtctatccaagtatggggacttgaggataattcctccagtcatgatttaattatgtatcaatttgtgctctgagtattttgagtgtaccttctttggtttgaattctaagtagtttttgacttggtttgtgtgaatatagcagttagagagctggtaacaaaagcaacagttgtaactggtttagagccatgatttattgaacactcattatgtactaagtccagtgctaagtgctattgtgtatcatcccatttcatctttgcaatgacctatgtggggggaattattaatagtattcttatttcagccagaaataagtcatagatgagtaactatgcaaggttacaagggatttgaacccgggtctgtataatccctggcttatgctgcttcctactttatcttgcctgtgtctggaatttttcctcctactaatgtagaaggactagagatagatcgagtccctcaggttaaatattcagaggctgtagtgggtgtttccacttcttaggagtctattgaaagggcagaagaagtgtgggaagtctggaagagactaaggccaaacctcaaacacttactttaactgtttccccagataaaatttagttgaaggcagcagccttgggcttggaaagaaaatagcgctagaaggcatgagagtcagattccagtcctagcattatgacaattataatgtcatttttgtttaaactcttggcatttctctccaattacctccagctttgagctccaaaggcaggctcctattttgtcttgtttttcactgtatccccagcatcgtagcacagaatctggcatgtagtatgttatgtactcactaattatttattgcttcgaatgcaccaagggacttggtacaagacacttagcctctcaggcactgctcttggcatcatggttatagaggtgaaacaggacaaggtctctgctgtcgtgaagcagacgtctacatgtgtgagatgtagaatgtgacgtcaggtatgatcatgctctgaaataaaagacagtgagaccggggtggagagggaagggcctgtccaagaagtgagacagtgagctcgttgggggtaaaatccataaaattcctcttggggtgactacagattgtcagctgcgctgtcagcaccttgttttaattgttttacttggctgccattgccaatgcccagctgactgctccctgcagcgagaactcccacctcaggcctcgctttcttcagctctgctgagcgtgcctctcctgggtcggctcccggttctcctccagctgctgagattccagcctccacagcctgctctgctggttctctgttctttgtccttagcttctggtttggcttggtccctttcacgtcatccttaacgtcctccctgggtgagctcatccaccactcacctctgtcttgaagacacccggatctccatatccggtctgaacctcctcccagtccacactcctagtggtctgccccgagggcacctcaacctgtctgtcccctcctgagtgccacatgcgtctttctccctgtgctgcctgcttggtccacgcccctcagttgcttctgcttcatgagtcgtcctggccttgtcttttccctcatattcccttggttaccacatcctgaagagctcatcttctaatttgtcaactcagttcttctctgtctctccactcctgtgtttaggattcatcattttgttctatgacagcctcttaattggtcatcctgtgttcatctttttcctccctcattccactgcccacattcctatcaacgtgatctttctaacacatgtctgatcagagctttcttttgcttaaagctctccaagagctcctcattgcttagaaaataaaagctaacccccttcagcggggcctgcagtcttctcatcatctggcccttggccccctgcagcttttgctcccccacccccaccccactttgggttttcctttttccctaactcacatttctaacctcagcctagctaccaacagccatcacctcctagtgcctttgcaatgctgggccctctcctgggaatggcgtggtctctgttcaccctcttgggaactcaactccagtttcccccaaatcttcaggacaccatccttccctacccagcacctctccatgacctggaaatgaccttcctcctggctcccagaacaccctcatgtctctcttgcaaagcacttatcggtgttactgttgatttacttacctgttatgctcagcaacctgagctccttaagggtggagaccacacacacacacacacacacacacacacacacacacacacactctgtctctctctctctgttccaagtgccagcatagtttacctggctcaggaagtttttgttgtaagagtgaggagtggtctgtttgtgcagccaagcaacagattcataatgtgataaaatgtacctgaaatgggaggttcattggccattgggtttattggggtgctcttcttgtcagctttgagtgcaggacaggttgtgttgggcttgagtttgtgacgcctgttgtgtctcccagcatgctgagacctcaggaatgtctcttctctatattctttgcccctgactttttatttttttagctcttgtttttgatggaccgataatagcaattcaaaatgaaaaataatccatcaaggaattctcaggaatgaggtccacccaccttggtcctggatgaatcccaaatttcctaaataagccagaatatctattcttgcgaactactgtctgacagcctttttcccccttaatccagctgagaatgcttttcttgaagggtaaggatacctagtggcccttcatgggggtgcctgagggcctctttgtcttcattttaaaccttgtaaagtccccagtgaatactgaggagtctaacaaataggaagaagctctgaccccaggggtcccaagtcagcatctgtactttgcatgggagctagcacaatgcacctagccaatagcatataaactctcctgttttcattcagtgccttaagcttgttgcttgttgtgtcttcttcacttcctatctctgccagagacctgagaagttgtgccaagagtgcagcttttatttggggcctcacagtaatctaggaaagcttttcagaagagagccattctcagcaccgaggtgtcctgcagaccaggacactccagcaggctcttggaactgctttcctgggatggaaatgcttgtgatgctgcctccccttgtagggactttccatatgctgttccctcagcctggaatgcatttttctcctggtttgcctagctcatgcctgttcaccctttggaactcagctgattggcctgcctcctcctcagaagcctccccaacctccctgataagaaggctaggtcttgtcctcaccattcccatgccagcatctagcgcttatggactgctcaccttgtgtcaagtactgttagaatgcttcatgcgtagctactttgtattaggggcttggtagatgttggctgaggtaagtgtcatcattgtcccaaagacactgtgtgaggaaactgaggcctcgacccattgagtaggtgacagagcaggagtttatcccagatgctggactgtgggtttacgctctgacccttctatacgccaccgttccctctgctccaagtccttgcagtctgtccttttccagcacttgtcatggaggtcatgacctcggtttgtgtggttatttgattaatgaatgtttgttccctcactgggcagcccttttgagccccaggatggcaggagtacctaggactctaggcaggtgcgcagcctggagttgaccgagagcatgtgggactgcccacttgcccacagctgcttcttgccttttgcatcacaggagggtgggctaggaccataaaagagccagcccaggcctccccctttctggagctcactgagtgcgtgcatggggtttggccgtcaccctcacttccatggttctgcatcagaaccagctgtgctgaggaaacatctgtgccttgttaaggtctgttccttctgcccactccctttgcccttttctctaccttacaacccctttgttgtccttcttcaaggaaaggggccccctttgtctctcagggcagagccagctgcccttctcctggtcctcttgatctgcacacactctgaggatgactgcccatggcaggtcatgatggtccgtctgccctggactgtggtttctgtggcagagcaatactttgtacagtcagggcccatggccctacggaaggctgagggagagcctgaggtcattgccttaagagaagctgcttcatggtgcagttggtatgtgtgcatgtgtgtgtggatgtgtgcttttttcatgcatgatgtttttatttgtgttatttatccccctgctatatctccctctctcaggggtctaacatggagctttgaatagtagatacatcatagctcttggctaaatacatattttctcccccgctgatctgaaggcacctcccttttcccctacccctcactttggtaccttggtgacttcacagggttgttatgacttcccagacctcattgagattgcagtgatgtgaaaaccctacctagattccagccagctgggcaggggccttggcagcaggggaagcccagttccctagggcaactcaccaggcctccagggctctctagggccaggctggctgagcttcaactgactcatactgtttttgactgggaaaaataaaaattttaaaatggcttctgaccaaatggggaaagtggatgtgggaggaggagaagggggacgttagccacaccctaggtacatttgccagcagcaaactgagatgggcttaaagtgtggctggcctctaagacgcctgcttcaaagggcattcggcacactggtctcaggctttggaggcccacctgcttcagaacatcagctccctgtctgtctagcgttgtgacttaagacaaacccaccaagctcccttagcctccattttctcatctgtaaaatgggattgtaatcattagaataacctttataaggttcttgtgagagtggaatgaagatgtgcttagcaccgtgactggcgtgtagaaagcaccaaatatttattatctgttaacattgtttttgtttgtcaaagtattattgttaataataattataagaagactttggaacagatataaagtctaaaatgcaggctgtgatgaaagggagatggtatataagaaaagtgctttttgaattgcacattatgtccagatattattattagcacaagtatgtttattattgttttgtctttgaaaaaaatgctggagcacaattttatgatgttgagtctatgtcctttgttgttttgttttttgttttggaaaaaggtttgtcacattggcctttattggaatcttgtccagtggatgtatgacccacattggtgaccctgggtgccaaatgcctggacagcacctggcaaagaagagccattatttcaatggtcactattgtttaaaatcgttatggtaaacaatacctgacagaagttcttagaggttcattgacagtaaattgtgggcaatgcactgagttattatttactctagacctgagaaattctccctctccaagttttgtgccttgtatagctaaataaatataaacaatttccttagaatttgatacaaacagctaccattgtcttcacaagtatgttagaaatactttcttaatagcaactacttgactgttttgttttttatctccattccctgccattactctgcctcttcccatctttctgaaataaaagtgagccaaattagccatttaaaaaatacgtagatactttcaggcagaggttgaaaactgtctaccccctggctgcatctggcttgcagatgtgttttgttcagcactcatagtgttttaagatgtttaaattagtggccaacatttaaaaatgggtagatttttgaatcaaaatccagatttccagctcttcataaaaaatcaaaggtctagtgggcctgggcccgtcttccttgtggcagtgcggaagagtggtggtccctcccctgggagcttgtttctccagcctgcctccggctggcccagcctcactgtacctttccatggcctgcttggcccctgtaggaatagagtttgtagtctctgcttaatataactaataccccttagatactgtgtatcagtttagaattatttccactagcaactgtgaccataggtaggaaggatattttacttgctaagttgtcattcttatgatagcccaaatggctataatagtattttaggctcttttggatttaatagaattaccttctctcctctctgtgggatttcctcattaacaatttttaaaaagtgttcagcaaggcttatatagcaacataaaattttaaataatgcaggatataaatttctatagctgctattgaaggggggttgcaatcaagtgaactgctttaattcaacaatttatggtgttgtaaatttgaaaaataaaagacacttagttttttttttttttttttttttttttcagaataaaataattaaatagttgacctttggcagagtctttgttgaaataggcaagggttttgagcttctcagaacttgagaccattgccttctggagtctttcctcagatgagtctgtgcctccttctagctagtgcactctgagcactgtggccacatctggagggtggagaggagacttagcttccaatggtggtcactctaggggaggggggcccttgcaaataccaaaatttttttaaattattattttatgagcttttaaaaacttttttgtttttgtcatcacaaaagtaataaacacttgtgataaattcagacaacactgaagtgctttaacataagcaacaaaatcttctgtgacctcccccaaccttttccaaccattccccaaacataagcacttttgagagtttgcttcttatactcctggacttttgcatttgcttgtttctctccacccctaccctttgccctcaaccacgacatagatactttcccttttgttttctaaagatagactgtccctgtgcatggtgttctgcaactttctttttacagctgtcaattattatggttatttttccaagtccatatgtacagataaatgtacttgttacttttaaaagttgtactccatgttatggttgtatgttaagtaaatttcgttttgtattgatagacactcaggttgtttctgaccttttgccattgcagtcattgctgctgtggaaatttttgtgcacacgtgtgaacttttgcctgagattttctttggtatagatacatagaagtaggacttttggtttaaatggtttgctgtttaaaatttgaatccataatgccaaattaccctccaaaaaggctgtaccaattcatgctcttcctaggagcatcccattatggctttgctaatctagtttttgcttacacatgtgtaagaaagtaaatcttaaaagcctcacaaataatgccatcaaaattacacgtttatcttagaaaagcattcagaatatatgtctgtagatttaattatatgatttttatatcttgactttgatggtggttatcatcctgcaaggtgacaaaaagttccctaaatactgtacacaattattaaataattattaaggatatcagttgtgccaggtagcctttggaagaattacagccaaatcacagcttccttttccacagctctgccaggctggcttgtctttcccaccaagggctgagccattaatactgaggctgggtcagcatttgaaggggccctgccagggagtgccaggccttgggccccagagacctggggagtgggagatggcaagtgactgctgtgaggctgagacaaagtttttgcctacaacaccccatggctgtttcctttactgagctagatgaggaaagcaaagggaagtgatggtccaagacttctggtggtcacttttgttcatagatttctcacaggagtgctaacatttaggctcatgtttacgaaggtttgaaaccttagcatttgggaaggatctgcaaattctcagccaggggccttaactgatcacaggtagttgtgaactcttggtccaggctgtatctcaaggcttcttcttagaaggacaggtcagcttaccacctgctaactgcatgtgaaattttgaattctgccttctctagctctcctctctggctctgagctggtatctggcatttgcaaacagtttaccctttgttgacttcttagcactaacctcacttttatgagtctgagtagacttgatacccaggccatttatcctttgagggtgccctcagcttcatcagacccatgctgggcagtctggcatagtggtaagaggcacttggagccagacagacctgggttcaaatcctgacatcatcacatttactaacagtgtgaccctttggctgatgacctcacctctttgagcatcagtgtctccttctacaaagtagggacagtaattctttcccaggggtattttgaaggatatacgaattaatatttgtcaggtgcctctcagatgttcagcacaaaataaacagtgtataaatatgagtcctctcttatcttcctgctgtagagagaaagttcgttggggatgctccaagttggtggctactggctgaggatcctggagtaagaggaaggctaccatgtaaacccagagatgaatcatgaacaatgtgtattctcaggagcttagtatttgatatgggagcctaacaagcaaatagtgtgtccagtaataggaactgattaatagaggaaagattaattaaccttctaggtgggtggggtggaaaagtaggtggggtattgaaggttcaacaggagttcgacagagaagatagaccataaataataaatatacggctgtatccactagagataaagttacattgttttttatgtacatgttgacttcttttggccttgccaatgcactgatatattcaaattcagctcctctctttttctcttcccttttcccttcactctgcctttcctccagccctgccttgaaatactcagccactgaaaatttcttaaagaatttctttatactttagtaagtcctcagaggataccagttcaccctactgagattttacaagaactttggtgtagctggggttttttttgcattcctttttctacggtagatataagttcttttgggttgcccatcaatgaacaaactaccaaccatttgatgtttactgcgtgactcctgtataccaagcacatgtgccatttcacttagtccccagaatgtcagagcagctttgtgaaatgggctgcccgttctttcttatggatgaagaaactgaggcttaggtaggttaatatactgaatattatacatgtagtgagtgggaaagccacagttcacctccagggtctttttctccctctttgctgccttgcttggggtcctgctcatagtaggtggacagcagatgtttgtctgaacatatgagaacactgcctgccacgtgccggtcagtttgatttgtgctgctggttttgtaacccacatggggcaatgacagctgctcaggtactttcctacctattagtggggccccagggtcacacatcagtcataattgacaaaaaacacaatttccctttcctctcaacttttatttctaaggtacttgtaagcaggtagattagattgttaacttttcattttttgctttgtctctctcctttaaagactatgtgaaagaatacacagtgccctgagagcctggcctgggaatcagaaacttagattccagcttcggttctgctggtaactcctcagtcattatgggtaaataatattccctctccagaactactagattgtgtccttggtgcagtctggggttcgggtggtcctagggaccctgcctactgcatgaacctgttatcaccatgtgaggctggaaggatctcagcgttggtgttgggcaggcctgagtgagcatcctggctcctgtacttcccagctctgtgacctcgggctaatcacctgactccctgatgcttgttcttgtctacgaaggagggctaagaggacctgcttcccaggatcactgtccagattgaatgagaaggaacgtcggcttccttccttctgtctccaactcctgagtgcactggttttagactaactgggtgtttctgcagttgaaaccaaaacaccttcattaggtacaatgttcattatacctcgcaacaccctgagatactcaactcttagatttcttgaagctcttttttgttaagaaactcctcaaaggaagatactcttctaccccattgagctttattagtgcttcaatgacagcaccttattttttcacttttttcccccttgcagacagaagctgcagtgtgaatcagtttgcatttatataatttcttttgcatttctttgcaaagaggaaaactccattcatttagcaaatgtccgtcatgcccaggccttatgttaggtgaagggatttggagagaaatagagtcactgacctcaagaagcttacagggaggaaaggtgtaaatacataaagtgacacatgggtttgtcctgtcaccaaggtatgcagtagatgctgtgggagaagagaggatgacacaggttctctcttggaagacctcatagagaagaggtgacttgtgagcaagtctttttttttttttttttttttttttttttgagagagggtcttgctctgtcacccaggctggagtgcagtggcatgatcctagctcactgcaactttgaaatcttgggcttcaagggatcttcctgcttcagcctcccaagtagctggaactacaggtatgtgccacttgcctgtctgatttttttttttttaattttttgtagagacagcgtctagccatgttgcccaggctgatcttgaactcctggcctccagtgatcctcccaccttggcctcctaaagtgctgggattatagacatgagccactgcacccagccgttgtgagcaagtcttaaaagatgagtaggaaggagtctgtcagctgtagaagtaggaagggcccaggcagaaggagcacagggcagaggctagagccctggtaggaggtgacacactgggtgcatgtctggagctggagccaagaggtggaggacctaagtggctacatcttggcagtcacccatatattggcaagccccaaatctttgtaaccagcccagattgtcttcctgagcccccaactcccatacccactgcccattcagcagctagctgcatgttgaagtgtagtggtcttcccagacctaacataactaaacagaagtcttgatttgttccttcaaaaacaaacaaaaaactagccttgctcctcctcagtcttccccatgttatgaggtccccatcatttttacctggctacccaggcctaaaatgtgggcatcatctttgattctgcttcctcctgtgttcttcacatcatctgtttgcaattctttttttgtttgttttactggttttaaaaattatttatttattgagactgagtcttgctttgtcatccaggctggagtgcaatggtatcatcttggctcactgcaacctccgcctcccgggtttgagaaattctcgtgcctcagcctcccgagtagctgggattacagtcgtgcgctaccactcctggctaatttttgtattttcagtagagatggggtatcaccatgttggccaggctggtctcaaactcctgacctcaagtgatccacccgccttggcctcccaaagtgctgggattataggcatgagccactgcacctggccaatttatttatttttaattaacacataataattgtacatatttatggggtacatagtgatgtttcaatacatataatctgtagtaaccagatcagaataattaacatatctgtcatttcaaacattgcagttcttgacaactcttactgtatgtcctggaagccaccactgctccttattattagtttgtttctttatcaaccaagcaggccagaccactgctctaccctcgttcaaacctccactgtctttcagcaggtctcttgtcagtttgctacataggcaaagaggtcttttaaaaagcaaatttgtgtcatttccctgctctaaactctccagcggctttctggcatctttggaatggaatctaaacatctcgccttggcctgccagcccctcctgctcatcttctctggtctcatcccttggcactctctgctcactccatttcagctgccgcatcttttcttactgttccccctgttgtctcatgggctttgcacttgctgtcctccgcctgagctgctcttccccagacaccgcctgtctcaccttcactccacgctggcctctattcaagtgttctcccacctgtctgaaaaagcaccgttctgccccctctccccgctgcttcaaccattctgtcctacctcgctttggtttctctcattagcactcatcactctctgactttatatgatatgtttgtttgtcttcttatttagtgtttgtcttaccccacaagaatataaatccatgaagatgggacctggtcttatctattgcattcagcactctagggcctaaaacagagcctggcacacagtgggtgatcctgaaacacgaggtgggtggatggacaaatgactgagttaatgcatgcctgcatgcaagcgaagactttggagtttatttcataggcagtgcaaatctagtagacatctttcaggaggtgagtgacgtggtcagcacttttattttagaaagccagctggtggcagtgtgggggctggactgtaggagggaggcagcagaattactttagcggctgtgaaaatcgtccaggaaattgatgctgagtgttgtgctagagctgtggggatggagaagaggggacagatgacaggacctgaagatctttgagtgtctttgatttctattgggataacttggtatagtgattcctttataagaaaagcaggaggggacgaactggtccagggagagactgttgacactctgtggtgtttttctcaccaagaaaacctaagccctgggatgcatgttctctgtagtggcattggctctctggggagtgactctgctgctccgcagcctcccctgttccattttttaataagagaatagtcaagatggtggtgtcagtgagtgggagtcttcttcatgcagatggatccattgatctttgcatactccaagccacactaagtcattggttcttttctcgcagtgggtacatttcaccttatttgattctgatctgacaaatgctgctttttttcttttctttttttttctttttttttgtttaaagaatacctagactgtgctcaagttccaggtggggtttacagataactggggttccagcatctcccttcttacaaacacgaacaggagcctttgccgtccttgggtctcagggaggcagaccggcagcaggcacacattcctggcccaggcgtagccatgctgtctggtgctgccttttgagaccttttgtgtgtgtgtgtgtgtgtgtgtgtgtgtgtgtgtgtgggcttgaatgattccttctttcaaaaattcaaccctctccaaattttgatgaaaaccttttcatctctgagtaagcacattatttcccatcttgatgaggtgtgtcccctctgtgtccctgagagtatgtcatcccagccttttaaattttattgtatttttttattttttattttttcatactagtcaagtgcagtagtgagaagcggggaaagagtagaacaaggggccgggggcggtggctcacatctgtaatcccagcactgtgggaggctgaggtgggtggatcatgaggtcaggagattgataccatcctggccaacatgatgaaaccctgtgtctactaaaaatacaaaaattagctgggtgtggtggcacacgcctgtagtcccagctactcgggaggctgaggcaggagaattgtttgaacccgggaggcagaggttgcagttgagccgatatcatgccaccgcactccagcctggcaacagagcaagactctgtctaaaaaaaaaaaaaagagtagaacaaggagtttgatctgttacagactgaactatcaatggagataactcactaccttcggaccagcctcatcccagtcttttaagcctggtccagaattcctaatcctgcttgtcaggcccttcaaagtgaaatgctgtaccatctgtatagctggattctcacctcctacctctcctctcccttccaaaggttccgatgtcataggaatctacgctagagggcttcctgtgtgccgggcactgtggtaagcacttcacatgcattctctctaatccttaccacttcggggatgtaaggattataatcttctttttacagatgaggaagctgaagcttgccactgcttagtagttaagagtatgggcttacagccaaacagaccctggattgattctcaactagctggggaccttgggcatgctacttaatttttttaacctttttcacatttagaagataaagataatatatagagagataatatagaagattatataggtattatatatatatatatcttctatattatgaagataatacagagttgtgataaaaattaaatgaaatgaccagacatagtggctcactgttgttttgttttgttttgtttttttgagacagagtctcgctctgtcgcccaggctggagtgcagtggtgcgatctcggctcactgcaagctctgcttcccgggttcacgccagtctcctgcctcagcctcccgagtagctgggactacaggcgcccgccaccacgcccggctaattttgttgtatttttagtagagacggggtttcaccgtgttagccaggatggtctcgatctcctgacctcgtgatccacccccctcagcctcccaaagtgctgggattacaggtgtgagccactgcgcccagcccatagcggttcactcatgtaatcccagcactttgagaggctgaggtgggaggtcacttgaggccaggaattcaaggccagcctgggcaacatagcaagaccacttctcttttatgaaaaaaaaaaattaagaaaaataaaaattaaatgaaataacatgtaatttcctaagtacattaagtacgtgcctactatgcgccggacattgtgctgtcagcaaataatagctcatcgcagatgctgttatcatcatcatcatcccaaagccacagattgagtctgtaggtgaggccctgcctggctccaaagattgtgtttttttctcctgttgctcccaagttcacctgtcccaaactttctagcccctaagtttgcttccttgcgcttttctggttgtgccatttgtccctgtctgggcagtgggctcaagctaaggcacagcagttttccagtccctttgagctactgacctcttttctgtcattgactgaacagtttccggtggctgaatcgtctgtgtaagagcttggacaattttttctgattgttaccatcatcgtgtttactgtgaaagggcttcctgtatagttgtttgtgttagcagcattgtctaaatgaaacaagagtggcaacagaaagggttggtgagcagtcctagtcttttggggtcacagatcactttgtgagtctgaagaaatttatagactctctcaaaaaaataaacgacaagacaaatacaagcccagcatttttcatgagacgttttccctgaagttgatctggaaggctatgtgctcttttgtcattgtgctactccacattcacagccatgaagggtgtcatgtttctgcagggtgtttgtatttaagggttgttgggcaatttggcaacactatacctgtttcattgatactatgtgctatttgcatttatttcccatatctgagatacgtattcacacatgagaactggcctggccattttgatgagatgtacctgctgatttgcacataaacacaagccatggcctgcatctagaggatcgactggagaggcttttttttggcccaaaacatcagactagtaggaattttattatgagttatagactaaaaggggggataaacttagcttcagcagggtttaatattctcaattcaggtaagtgtaaatctctacttttcattttaaacatttttgaaatttcagtctttaaaaaaatgcttgttttttttccttccaagttttaaggtatgggtttgggagaaggcagattccaaacactttaactcttcgacctcagacttgcttatgagcctctctttggaacatttccagtgaaccgtggagcaagcctgccacatccagcagccgtaggcatgatgatcactggtgccgatggcccctccactccctgcctggcttttgaggccccgcagaaagaaaggaacagaatcctttcataaggaaggccccagaatcctttctcctgctgtagctatgctgccagtgtcctctgtagatggaaatggaacttggattttgggtgccagaactgaattcatcacagataagattagttgatataaagctgtttctgatgagcagtttttcctccagagttttcatttttgctttttctaaattatacaaaataatagacactcattacaaagggaggatcataatgctccatacctggttttgaattccacttctatcacttattagatgcagccctgggcaaaacacacgccctctctgagccttgatttttctcattgaatgggagatctaattattttacctcataatactgctgtagggattgaaggagattggtataaataatggttttctgagagtctggtgtgtatttgctttttttcagttaatatgaattgagtacctactaagagctggtcactgttctagttgatatggaaccagtcaagagcaagacagagagggtctccgctctcatggtgctcacattctaatcagaggaggcacaagaacacaagatcacttcagttattaagaaattagaacccaggggtagcatgagagtcacaggaaggacccctttacgtcggatggccagcagaaccctccctgaagagctcaatgctttgtgacccccccggtcccaagttttccaggactcctacttttaaaaacactgcccctccaagtatataggtctcaattttgagtttggaaaatctgaccacatattagttctcttgttcattaatgggcttcccatttagagagtgagttcctggggcaggagccatgtcacaggaccttttgaaggtctcagggccaatatggacgacacttctcttgaacactcacccagttgggctgacatgaaaacctcatggtgggaggtggggggtgattagtttccagccagagcccattttgctccattgctgctttgaacattctggtttctaaggagctggaagtagtttctctcagcgagaatgtggcacactgtcatctcctgattctctgcatgcagttcttcaatggcttgttgaggctgcgtggaagcccagaggtcggggcagttccaactcacacactggcatttgaacggcagagcagtaagccctacacctgacataactgcattgccttcttggggtacggtacggatttttaaatgaccatttcagcctgctgggctgggcaacggtgatccaaactgatgagtcaggaagccactgaacagaaaggcaggctgcatctgactcacctgtcatgtcgatagttgacctccttttgtttgaccttgatttgctcagtgcaattaaagatgctgttgtgagtgcacttctgctacctgatttaaataaagtctaacatgtgacagctcagggtcttaaatgcacacacgacttaggcagacggacagatgggtgagtggttagcctttcacttacctctgaattgtaattctatcacaaggaaagggcttaatttcaggaacacggagtaattatttgagactagatacaatgccaaagcagcaggccttgattccttgctacagggcagcttaatcaggaaatggcctagatggccgcctttcaagtaggtccttgcagtagcttggcaacaggcacagggtcataattggaagaatttggctgtgagtgtctgtgggtgtttacagtgcactatagggcagggcttctcttatttatagaatattttgagcaacaagcagcagaaggctgaaaagccactaaaatctcgatttatttttaacaaattccatttttctcctcatcccagaaggagaactgagttattaaaaaacagttaaaaaatacatcattgcagagcatgccatatctaattatggggttgccagcatcggcctgcagccacatttcaagggcttcgtaaatcaaccatccattcaatctgtgaacttatatgactcctgttctccatttagatgtagagcgaaattattggcaagtgggtgctgatcagaaaaagttcttccctgtctaaattaggagatgggagggataaatatagaatagtatacttatgttctcaaaaggagataaaatcattcttcattgtccattatacttagctgcacaaacatccatcccattgcactaaatagccactttagagttttcacacattgcaatggcagttctgtgccactcaaaggcgcagtattgtgatatctcgctgagcctaaacctgagtgattattgctcacgtagtcatgaagagacataaacccagtgcttttttgcctgtgttgtcgtagtgtactagagctacaaggtgggccttcagagagacactagttttaagtatatctcattgtaggtggggaagcagaggcctaggcaagggagtgacttgcctagggtcccattaagagtcatggcagaggtgggctggggcggcagtctctgtgcttctcttgacagtgccctgctgtgctcactggagctactgtattaaacagatacccttcaggggttcacagtcttagaagacacaggcacgaagatggccaaacaatcagcccatgcataagcagaccaagatatgtgtatataacagattagttgagtggtagagaaaatgagagtggggaattttggaatctatttggatagcaaagcaaaggtaacatcagttgctctctgacccacttgggaaaagcttatagagatgctatgaagttttctaatggaaaaaggtgcagtacatttgccatgtgttagtgggaaggtaagtatgatgcagtggtgggtggtaggaggcagtgaagataagtattgcaactttggaggagccctgggaatggattgttgaggtgatttcataggaatacgaaagggagcataggaccagggcacaggccagagacaggcaatcccaagttccctggagtaccctgcccttttctgggaaagcaagtgggtggcatgagtgctatgttcccaatgctctggccccacccctggtagaagaataataactgatcatggtgggttttttctgagcctctgtatctttgagtagcattctggtagccaatatcagtggactggtgccagcctgtgtggtgaacctctatctctttcttgccctgggctgcatgtcaggcacagtgcctaagccggagtgggctttggggagttacttctctttctgaggctggaaggggcagagggacgtagggaaaactttgctagggagggcaaactgtgaaagcctctggagaagtcacctgttgggataccaaaggccagcggttttagaggatgcgaagaggccgggcggggttggtctgggcctaaactaaggctgtagcggctagcatggagaggaacaagcgacggggagtgattacggatgaggaagacgtactaggatttggctacagacagacaaccaaccagagagtaaaagacagtgacatgctaggatgtgaaccacctactacagagaaggtcagaggtggggagggaggaatcagggctgtgggcagatccagcagctgggatccaaagctgaagcccttgggttattgaatccattctttctgagaagagatggttgatcttcctgcccagggagttcctagccagactggacagtggttctcaaacatggtgccaggtgttgtcagatagcaaacaattagtttgtacacagaatgtccccaaggtcacctacacatatttgtttttcctaatctttgatacctacagccacttacctgctttcgagttctcagagttgagaacatataaatttgcagtaacaagtgcacaggaaatacttggaaaatggctgatgagctttagtttggaaatttcatttttttcttggatctggattataatttcagtacaagctagcaatttttcttgttggtaaaatagtttctagttttaaaattatttctgtagttaataaagttaacactatttcatgatggaggctgccccagctctgaaccaattttcaaaaggcagattctcctctttctctctcttatttcttgctcttgaacatttcactgtgttctagcaacttttcctgtgtgtgactcggccaggagactgacttgagtaagatccaggtcaaggggttgtgtgggtgggtcggtggtaaggaggtgctgaagaacactaaaacctttgcctgagaggagtctgggaagtagcctgcgaactggaatgaccccaggcttcctgtcacggtcatagcccatggagttggcagacttgatcactctatattgtgtgcccccaggtaatggcattagtcatcgatactgtcttttttttttttttttctttgagagagagagtctcagtctgtcgcccaggctggagtgcagtggcgtgatctcagctcattgcagcctctgcctgctgggttcaagtgattctcctgcctcagtctcccaagtagctgggattacaggtacatgccaccacacccagctaatttttggatttttagtagagacggggttttgccatgttggccaggctggtctcgaactcctgacctcgggtgatctgctcacctcggcctcccaaagtgctgggattacaggcgtgatccactgcgcccggccaatactgtctttaaatcgtccagagtaagaaaatgttgatagcttgttgtcacagccctgtcattttacacattccctgaattattgtctggcaccagcaggtgttccagaaacacttttggttctttgagccattactggtcattcctgtcaccactgccaccaccagatgtggttctgagagcattaagtaaaagttttgaaggttgtgtatgttaagactggtgcaaagtccatcctccttccttcgggctgatcagccacaccctggctatcagcacttatttactcattttcaaagtgacagaatggtccagtgggcaggggcataaggggtcacttcctctaaccacccgccagtgcaggaggatcccatctgcgcagtggctgcccatgacaggcagttccctagccccagtcggacatctccgcaccaggcatcctgctcctgctttatggacatctttggctcttaaaaatcctcctttattctgaccgcagatctgccttttggcagtgtttccttagtgacctagttctgctttttgtggcaacacagaacaaaggtcggtaggcatggcacaattccagcttagaagtttgaaggtagtgctcatggacccacatcctttccctctccacccactctatctccctccacaaggtttatgttctccagtgccttcagccattctttctatggcatggcagtcagtattaatcccagtaaaggtaacatgtatccagagagtgcttgccatgggccaggcactgttctaagctccgtacgtgaattgtcttatttatgactcaaaatcaccatatgaggtgagccctgtcatcatcctcattttaccaatgaggcaactaaggaacgagggctcacatcttgtcccgagccatgcagtcaagcagcagagcagagatttggggctaggcagtgtgactccagagcccgtgctcttagttgtggtgcaagactatcttacagcctttcctgcatagtgccaaaaataagcccatggtgcactagacttgggctggccctgctttaacttattttgcaagaaatcattagacaggagccttagttgaaccattttctgtgaaaccttcagagtttgttttgacagaacagactgcagggcagaggcatctgcactgtccccaacaaatgggttcatcctgtagctctgccaggccccacagggttcataaaatggtagctttagatcaaggtgacaaatacagggctcttgatgttttttttttttttcctgaacatggtgcctgagcaataggtttcttgtttaaagtgcttagtcatggttttatggccagaaagtagaaggagagaggtacctaagaattgcaaaactgggtcatctcttcaagtgcctaatccaatattcagtctcagagaacaactccagcagttacgggggtggaaggatgtgatgaccacctaccatccaaaactgggatgtaggtgccaaatacacattctcctgaaatgatccctggtgcctctagccaggctcttccaggagtctagagaaagatggcccatgacttcatccagagtctttgcttcctgtgctctgggatgcctgggcttttctggccacagccatacactgacagggccagaagggctgagatgctgggattgaaccatctttctctttgtgagttgctttccagatagcacgcattccggtcactattttccagagatttaagcagcaaagtgagggaccctcgggcatcgactcagagacctggaggggagcagcttgaagcaatgtaaaaagcactggataaaatctggttctaccaaaaatagggctatgagagttacctcacctccctgaaaggtaatatctttatctgaaaaatggggatgataatactactaacctggaagattgacaggaggattagatgagattctgcatggacataacagtccttggcatgatgtctagcagtgaagaaacataaatatgagaataataacttccttcttcctccgctgtctattccttctcttattctagtcctgtctgctgttgggttttgtctgttgttttgggtaaatagctaacctctctgcctctttttgtctgtagaaatgctactggttctgaatgggtacttcgcgccccctataggacatcgtgggaatgtgtgtgggtgatctggatgtcacagtgacccagacgaggcttttactgggggaagaggggaaggcaggggtgctagatataatgcttggggaacaaaagattgcccaacatctgcatagctgcctaatgctcagtgcattcttgtgggcaaaaccctgcttaaaattatctgggcctagagtctgactccaattaacacataaacacaaataatttttgcatgtttttaatatatactgaattttctgcgaacacagctaccaagtatataagatttacctatttgttatgaataggtgcaagcatttcatatatctttcatgatgttttctggtgtagcggtgccccaatacttacatattgatttacatgttgtcttatttttaactatatttcctttcttctttgtattacagttagggcattatattgattatttttggaattataagtgttgtaaggttatattacttacagatttcaagagagctaaagacatatttaaaatatttttattgcatttttgacaatatgaaagagcaagagagagagagtgtgtgtgcgtgcatgcatgcacatgcttacaaattagctagaaaaatcctaagacagactttaaatgaaaagaaatggtttcatagctcctagaaatgtccttttacataaggatatgtagtagaagtccaaatttttaactgcattcattgtcagagaaatgaggtgttttgatgtttcccctgtcccttttagaaagtatatgatcctaaaagagcctgaaacagtttccattgtcatattttttcatttttgcaatctctatttttttcactcctcccacctgtgcatatatatatttaaaagcgtccccatatagacttttaaagaaagaaaagccagccaggctccccactctttactaagtttgttttgattgttttgtggcctctgcctgcacctcggcctgagtcagactgactctgggagctgtgggcaggtccaagggaaagtcaaggaggtaatgaggcttctcgtgggggcaacttgtaggccaagttgggtgggttgaagtcagtctaccagaagcttcctgcctcaagcctgggcctctacctgtcctgaaacctgagggctctccagttggaccacgagggtctgacatccaggaggatccccaggagagagcaaccgtcactagggaatatgctgcccagcactgactgtactgagcagcagtgttgtgtgcctgttgggttgatgccatggatagccaggcgttcagaactgaacacgacacctaaaaggcaaacacgaactgtgaatgtgccagtgtcagatgctgccttggtggtcatgtgtgggctggcagtaagcttttggtcccttaacactcgctgttggaaatttcccaaggctttcatctagggtagctggtgtgtgatttccctgtcctttgttactcctatctggaaactagttgaaatcttttctatgatattgatatagttacagaaaatctgaatacttactactaagttttatagttctgcttagttcaaagtaacacaacctcataagagaaagtttgaaacaggtagagaaattgaaagatgaaaatcactacccattatctcagcccacaaagatagctactatcagcattttggtttgtttcctttcagtcctttctgtgtttatgaaattttattatataaataattcatgtccaatatagaaaaagatggaaaattgagaaattataacgttaaaacaaaactgacccatctcaccagttggagatgtcttaatattctggtgaatttttttttgtcttttttctatagacacataagaagactgggaaatattgtgtatatacgtttgtaccctttttcaccaatgtatatcaatgtatatcagttcactaatgaatactaattaaatgaaaatttattaaatgtatatctatttatatctattgatatattaacagatgccagtgcatatctattaaaagagtactatgtaagagatgatgttcttaaacataaaatttaatttaggcatgaaattactttgtcaaaagatatatcagtttatattcagatatacagtgtactgacctgcccatttaccacatcttcactaatactggtattatctttaaatagaatctttgctaatatgagcagtgaaagtggcatattatctattaaattttgacggttatgagattgagcatgtttttgtatacttactggtctttgtgtttcatcttttggggtttcctattcatagtctctgcttagttttccactgaggtatttgcctttttattgatttataagagattttgttttgttttaactcagaaaaggtagtattgcttcagttgtcacagagctttggagtcagacagagctgggtttgaaccctggctttcctacttgtgagctgagggatttcaggcaatttatctgacccctctcacaattaattagttcttctttgagaactaaacgaaacaacactgactagcatgaaaaaaaagcctggtgtgtggtttctgccaatagtttttgtgttgttatttttgttgtgattcctgcactgagtattttctcagaaaaatgaccttgagctgtacgactcatgcctgttcagacccacagacacatgatactcactatatccaaagctcagaaaaatgaaactgaaatcactgaagtttgtgggttttttttttaaattcttcttgccagaaggagacaaatgaaggaaaaaaaacaagccgatttcattttcattaagaggaatttgtagagttatttctggggtcaggcaggatacattcagacgaacattttagatctagggctgggaagatcccgagactcgttatagattacatcatcttcctccaagtgcacttgccaggcaaatggacaagtgcattttagaaaggttttcagttgttcacgtttaaacagaaaggatcacctggctaacttttagttaacccattgaacagatgtgccattcccccagcccattggttattcatgtccttgttactggtttttgatatccttgccccgtaggtgggaggagggatgggtatgagcctgccctgccctctttctcctacttgggacagagctgttgcttttatttgctgagtcactgaagcaatagagcatgtgcagagtcccagcctggaggtgggcatatctgggttccagtccctgctctagcccttctcagctgtgtgatcttggacaagttgccatacctctctgagcctcagtgtcatcttctatgtgatgtcgatgcctcccccaaaaggtcgttacgaggaccaaaggagacacgtcagggcaggaaccatcctaggcacgtgtttgatgctcagtaaacgggacgtggtcagtgttcagagttgtgggggtggcaggtgactgctctgtttcacctccactcacagcaacagggcctgtggtgtcacctagacatctcataggcatcccacactgaacatgtcccaaaccagcagctcctccctggatgggtggatggtgtacagggacctcttcctccagctgtcacatggggcatgtacctggcaagtggctttgcagccctagctgcccccttggctgggggcctttgtgcagttcatggactgggagtcacccccatgtctagaccgtcaggaaacccattggcttttcctttagagcataccaagaatcaacttctcagaacatagcaagagttgactttttgtcaccctgccgtggccactcagactgactcctcttacacctcacatcccattgatcagcacagcccctggaaatatgtctagaatccagctgcttctcatcacccccacacctaatacagagggctgagtcatagcatctcttccccggactgttgtagccgtctcctaactcagcttcctgccctgcttttacacacacacacacacacacacacacatggtatcttctcaccactgcagccagacttaaaacctaagagggatcatgtcactccccattttactcagagtcaaggccaagatccttactggggtctgcaggcccccacacctggccctctgactgcacccctaccttccttagctgtctcctctccctagcatgccccaggtcgctggtcccctagcactgggcagctccctgcggccctgttcactagctgtcctctgcctggaacacatctgtcacctctcacctcctcctgtccagcctccttggggcctttctaactgcctccctcctgtggtctgcctcctccccatctctgactttcctcccgagcacttactgccatccagcacccgacataacttacttgtttcgtttgcttgccttcctcaccaggaggtgtgccagatgaggacaaggatttttatatccctacccccatctgcagcactgccatggagaacagtgcctggcacttggatgccctcagtaaatatttgttgagagactaataagtgatcgtgggccagcatgccaacagtgtcttcgttattacaaaattgtcccgaattgaaatttggctactacaagcagtttgtggtggaaatttactcaaattaccaattctttcactgaagaaattacctggcatatgtgggttctcaataaactgtgttggattgcctcaaggctttggggcagtggtagccgtctgaggcctccttgccagtcaaccaaaccctgtgctgggtgggacataagagatgcccccagcatccttagctgatgctactatgtcaccccagaatccctggggcagcccacccctcagcagcagctgtcaccctgctgggttccgcttttcctcctgtgggcttcgtctccctaaggaaatcattgtccttgctttctacatcttatctccctgagcagctccaaaattctgttattcatatcccactgacctttctcattgtcctagtccaagcttctcacaggaggagttgtctctctgttttatattaaaacaaagcggttggactcttaaaactctattcacttttcagattctttggagtcctcaatgcttcctgctatgaaatgctgcgctctggaatgccttccagacccacccccaggatacctgtagccttccctgcagccactctcctcaactccctcctcgttcccaggggtcaatgtcctggatctctccagctttaagttccttcatgtcctcttgccacccctgctctcaccatctctgagttcttgtatccccaggatttcaacctgagtttgcatctcctgacatcacttttcccagccttctcccttttcaaccagcacaaggccatccacttccatggccatagtggacgccactgagcatgctaggtgttttcttctattcaactcatgtggtctgcacaacaacccagtgcggggaatccacccctttcacagatgaggcatctctagctcctggaagtcacctaacttgcctaggacatgcagctagtaagtggcagggctgggattggaacccaagaggccccgccctgaccaccatcctgccctgcctctcctcgggcacccagaatcccctcactctattgtcaaaacccaccttgtcctgcctgtctggtacctaggggagaaccctcagcctcttcttctgctgccacttgcttcctcttctgccaggaaggtcccacgcctggccagcctgctctggagacacgcccactgcctggccttgccaggaggctctgatgctctgcaggcttcctgtcccacggatcccttcctgcctgtcctggggtcccaccaccccactttgtagttggccttgctctttattgtggtgaaaggtgcaggccattccatccaagatcctataatattccttttctctgctgttgaatgttcttcccattccccccacattctcaaagaaggcatgtggctttcttcactgcgtctcggcctgccctgagtccagcccctgctgcctggcccagcctgtcttgttggcatcccctaagccctagccagaaacacaagcacctttcaggtgctccatcctaactccaccctccctcacactggcctctctccctttgccaccagataacagcagtgcattcttttgtttcctttagaacaagatgcagatgttttccagaattttcttcaacttcaggcagtaagttttttggtgaaaggagtattactccctgagtctgtagaaccaggctctctcctcttattctgtagcaattaaagacaaagacaggcaagaaaacaatgaaaagaaacaggagccaggctgatgcaccttcatttagctggtccttgagcatgactcattgatccttcttgcttccatcagggattgcaccctgtgccctctttgaatgcaggggcatgtcaaggccaagggtcaggaagagagctttggcctcgccagcctggtccccagagtggaagtggcagggcaggaggggtgtggcagacagagcacatatcgcccccagccttgcccccagatgttgagtgctgggtgccggagtgcagaggggaacaaggcctggaccctgcctggggagaggcagcacctgggagatctttgtggcttcagatcccatgtggtcctccaggtaaagcagagcatctctggggtctaggctgggggaaaactcttgcaaaaaattcctggttctgggacagaatgcatggggtctgcgtgaggggcagaggacagtgccaggccagtgagcacgcactgggcaaaggaagtggccagagaccactcataagaaaaagtgggacatgaacctcagagcctgggctgctttcagaggagccaagagcctgggaaataagcatcttctggtgaggaaatcagcagggggaggggagggtcatacaggaggggacttttaatcctgaatggccttgcagggcatggttcccctagtgtgccccatggaacccttggctgttagatgtgaggtgataaatggtgtgtggatgcatacacttgggactcagactctgctgcccttagactttcaccctccacagggctgcgtttaaaggtccaagaagccctgcagaagaaaaacctaactattgaaccagcattccctatacgtatttggcccctgattttttcccccgaataacatcattacaatcctatgggattagtgttccatggcagaactttgggaagtgttttttgaagaatttgtaaatccctgcaccctctggactgtgcccatttcttagattgcatggaggctgtgctgtacagtggaaggagtatgggctttagatgggactggcctgtgtttaaatctgctttcccattatacaaaatctctgatcttgatcaagttacttactctctcaaacttagtttccttatctgtaagacaggggatgaaacattagctagttgtcttatgaggctgttgtgatggttaatgggaagataataatgacacttacagagggcttgttatgctccagacaccattctgagcactttatatatctcacttacttttcaccacaactgtgaggcaggtaatgttatccttatcctacaggtcaggtcaggagaccaatgacacatacaggctaaatgttgtgcccaacatcacacggctggtaaatgtgggacctaagatttgaaccctaggcactcatacatgatggggtcaggatttgaaacttgaccgtcatctcccatcagagaacatgctctgaatcagtatgttctaaagggtctagagcagtaaaagcactaattggtatcagttcccttttcagatggttcgtggatatgttagggggattgatggttcctgggactccaagtcattctgcagtcattaaaatcagccctgttgaaagagtaatctcctcgatctgcttgcccactcagatgctcccattgtgaccattttgtttgctctgctgcctcatcctgggccacttcaatttgggtggctgctcagcgttcaggtggagtcgggccactttccacagccatctcatctgtggcctgtgcctccacttccaggaccaagagtccccccaggatgcccagtgagttggtagcttgttctctttctacacctcagtgatggacttgacaaagggttaagaagacatcccttttatcattcagcaaactgagtgcctttactgagctagatgcatgccctgggggaactagcactgtttggtgacttagttagacctctgaatccctctaccaaccctcagtagctgtctgggagactgggattctgtggactctcctctatcaacgatattgggggtcttttccacaaagaccagcctggttttgattgacaaagtgcctcagatttacaaatcttaccccttgcaggatcctctcaactgatcaagccccatagctccaaatgccgtctccttgattgatgtttaatttggggatccacaagcatctagagctaccagttgaatttgggtacccaagggccacaaatgggcccccctcacaccctgacccctgacaaccagcacctttgagactgaagtaccactgcatatagtgctgtcctctgctcagggcattctccctaccagccaggccacccggcaaacccctgcaacacctcataagacctcttcgctggtctcatctccttttattaacacctcctcagcacccctccacacacacccaagcccacaagcaaatcattttttcatctgttttgctcttgtaccttacctatgctccactaatacaaaaaaagcacgccttcctcaagacacttgactgccacctgctggagagttgtcatcatggctcaacaaatatctgccacttctaaacccccaggcacctctggagtagggcagtgcattgcttgtacagctgtaaacatggcctgcctgttgaattggtcatgctgtcatgtacttattaaaacactcgtctttctaactggactgaggacatcttgaacgtaaggactgccgatttctgtcttcgtccccattgtggcttctgctaggggctagagaaatgcttattgaatgatccttgtgcaaacacctgttaccttaggttcagggcatctgctgtcattcagtgaaggtcttctaaatctgtctgttgcaaagcaaggctcgccacaggctgtcagagtaaccatggaggtcggacaggacttgcagtggggacagggccccatcagcctctcacctctgctcagaggcaccaccctctgaacagatcagagcataaacaggtcagagcaattcagcattcattccctctacagacatcagggcaggcaccatgtagtggagagtggggccaggggccatctgccatggctgtttgggctggggaaggagagcagtacttctggagcatgtgctgtgctcagggccagctccctgtaggtaggttgtgggaatgcagaggtggcaactcaagcacccctgctggggattcagagttttgtggagaagtagatcagtaagcacatggataccagatagggttgtcaaggatgttgattcactgttgtccctattttcctaagctcgccacatcatggaaggctgctacccaagtgacattcttgggcttcaccaagtgttttaacagagctccacccagctgtcacactaggggtaacacagtgggccagaaggagaggcaggccttccctggggtcccattttaaaaagggggaagtcctctgttcttttacaacacttgtttaccccaagccattcagcatagtattacttaggtcccatacagagaaccttccaacagatagctctccttgctcaggcctgtcctgatgaactccctgatattcttccaggtcttaaaagagtgagagctgagcatttccctctctgccctggctgccaggaagctcagagataacttgtttgctcagttcctgtagctttcctgacccaggacttctttttcttataaattctccttgttccttttccaggaatgcttgctttttatgttttgtttgtttatgttgcttttgtctctgtattatactttggggggtggtttttggaggcaggattggcagcagccatggtagttagaagcaccagcagtaaagctggacacacctgggtttcatccccacttgctagctgtgtcattttaagtaagataagttgcctcttcagttctcggttcctcaccttgaaaattgggataatgatcataatgaatggataggttattgtgaaaattaaacttgtttattgtaaatgcattgtttcctgttcctgctcttggatcaggcttgatctgtggctgtagaatcctagtcttaatttccttcttcctgcctgtgtctgtcagcatatgatgagttgtacaatagtagtgactaggggaccaaccatcccggtttgtctgggacggaggggtttcctgggatgcaggactttcagtgctgaatgggaaggtcccaggcaaatggatgagtcggtcaccctggtaataaacaacctcaacatctcagtggcttactgtagcaaaggtttatttcttcgttgtgctactgtccatccagggccttggctaaaggaggagcctctatcccaggaaattgacagtcatgggcacagacagaggaacacatgttaaaggtcctttagaaagttgtggctgtcacttctgccctcattcactggttggggccagtcacatggccaggcctgccaccaggctgtgcagaaccttcccactgggtgggacagctcagcctggaacactgatccactctgccaggctcacctttctcttcttttgcattttagggtgctggagcagggaccagggaaaggagagagtcacttggtctgaactgggggtcttggatgtgatcatcttcctgtagatggtcggtatgggtttcttaaggggcagggttcagcttcaccctgctctgctcagaggagcagctgtgtctcctttggacgccttctagtggttgatgccctcacctttctcagctgccaaggcctctctcgacagggcaggctgggctgtgacttctcttccaccctccttgctccttcctgtggagcccctgagatcctttccccatgctcctgggtggaatggagggtgccctctcacattcttccaaggcatcttgcgcaagtccctccatgccctgctttctctggcggtccagcatgcctccatctcacctttgggactctctagcttggaagtgggcacacctgcagcccctgactccaggaccacaggctaggctctccccaaagcatcctcatcacacaccatgtggatggccaggtcagggcggccgtcagagcccaccctcggcaaggataccctctcaaaggcacctctgttggctcaaatcccttttggaagtagcccagaaagaggctttcttttttcttatcttttgttgttttatttattgttcttgcatctaagaacaccttcttggtcagaaaacagttttccagaaataatgttaagtaagtgtcacaactggtttagctccctaacctggtctaagcatataagagaggcttttgaggctgggcgtggtggctcatgcccataatcccaatactttgggaggccgagatggagggattgcttgagtccaggagtctgggcagcatagtgagaccttgtctcttctaaaaataaaaaattagctacgtatggtggcacatgcctgtagtcccagctacttgggaggctgaggtgggaagatcacttgaggccaggagttctaggttgcagtgagctatgatcacaccactgcaccctaacctgggcaacagagtgagaccctgtctcaaaaaaaataaaaaaggctttttgatttttgttttgcagaagtaccaaaatctatattagcatttattatttttatttctataaagtaaatttgagtattgggaaaattgatcaaaatgagaaatttcatatggagtttagtacttgaaatttggatccttcatctaaatttcagggaagtcagggctgggcatggtggctcacacctgtaatctcagcattttgagaggccgagatgggcggattgcttgagcccaggactttgagaccagcctgggcaacaatgcaaagcctcctctctacaaaaaatataaaaacaagccagacatggtagtggtgcatacctgtagtcccagctacatgacaaactgaggcaggaggatagtttgagcccaggagatggagattgcagtgagccgagatcatgccattgcactccagcctgggcgacagagcaagactgtctcaaaaaataattaaataagtaagtaaatttcagggaactcagagaacgagaaaggacatgaaattgttcatttatttagcatttgttgagtaccacctggagtgaggcacgagatcaggcacaggagacgcctataaataaggccctacctgcctgaagcttatgggaggtggaggagacacgcctacaagcagagaatggtcacagggcgtgaaggagcctgggcaggagctgctgcaggagagccagggagagaggatacagctctgaaggcttctccaggaggtgtgcccacgggcacaggaaaggaaagcaggagtttatcaggtgactgggtggttgaaaggagccacacctgcaagaaacgtgggcccagcagaggcagggtggttttgggaactcttgtcttttagtctgtcggggggctttgggtagcagatgggagggttgggctgaagactaagcagtgtttcctgctgggtgggtttgaactttgtttggaagacttagggggaacagtgaagctattgcagtggtctgagcaagggggtatcccgcctctgaccacagtggagaggggatggggctggagacgacagcagactgaacagaggcagtgacaaggatctggagggaagtggctgggcccatcccttagagggctgtgtgggggctgtggggtgtgggaggaagagaggaaggaagcccagggtaggttctgggttgctaatttgggggctgggaggatagcgtgtgacctaaacagagaatcagatttagatggaattacctatattaagcctggggatttcatatctatttgctgctgctttaccagttgaggctcaagaatgagaagcacaaaatttctggtcacattatttgcatgtgcccagactggggttaacagaatcggacagtgagcgttcctgaatcagactgcaatggggaatgaatgccttgggaggctggaagcagttgtattcgcagatattcatttggagatctctatagcgatcgaggcaaagataccccaaagactgcaagaattagccagtggaatttgaaatgccaaaattttttttcagaaaggtcaggaaagccccgtttaaaatctaaattttgccatctcaaggcagtgcagggatggattaggaggatgtggggtgacccttttcttcctttcagagccagtttctgccagacacaggaatcctccacatgagtcatagggtggagaggagacccctcagtcctttcagtaaggtgggagggcagtaccgcccggtggctaccatgaaccctgtttcagaatttctttcttaacttcgtgtgtgcccaggtgcacttgagattcactgatgttttctttagaccgaggagctcgcttcagcagttagtttcaggtgttggctctgctggcattatgcttcggcttaatgttttctgaagacttgttttctgttgtttttcattgttcttgttgtctggcttcaggccactaccttcaacctagcaagagctgagtggtgccttcagcagtgaggtagcttctgaaggccaccactctcttgctgtgtgactttggctagtttctccacctctctgtgcctcagtctcttctgtaaaacggagaacacaggagtatctccctcatagagttactttcaggtttcaatgagttaatctacataaaacaataaggatagagcctgacacaaaatcacactcaacaagttttcacaattatgattacttgacccagtaggagaaataaaaaacacaactaacttccttctaaggacatgcccaagaatccagttttagtaactttgaaggcattgtttttcaccgaaaatatctcctgccagattttttcatgtgtttgcagcttagctttaacaaggagctgaaggacggccaggcagcaaggggtggtgagtgccggtagagtgtgacgagctcgcccagccttcctccctgtaattaggagtcatgaaccatctacaccatctcccttagctaataagagatttttacatttacttacctcaaagtgacctgtctgggttttcttttcttgtggcccccactgtaggtttttggaagaagctgaccgcctgaaaagaaattataaaacatgaaaatcgctttgaggtgaccaagtccagaggcccctaactcctcccaagctggatctggggtgtaagaactgtgacttcaggtaacaaagtagtatcccctccctgccccctgtgaactcatgattcttggtagcttgcatggcagttcttcctttaggaagtgtagtttcttccaggaactctgaaacttggggtattctacctcatgcggttgtttggctggtcaaaaaagggagtgggggattctggaggtacttcatgtctgctgcatggcccaagggggccagggctccataaatcaccaagaccctgagggcagggctctgtactcattcctggccctgcttctgtaaatgttaatgacaaaataacaatgtcacccacccaacagggtctttaatatgattaaataatcatgaaatacttcttgaaggataaatcagagagaatagctaggaaatttccaaaaataaagagcagtaggagagtatttgttctgctagctattaaaatgtattctaaagcacagttgtaaaaacagtatagtactgtgatggaaataactagatcagaggaacagagtagagagtccagaaataggtgataaatcaataaaggtgtatttcaagttagtggcaatgggatgcatggactagcaaatggtgttagaaaaaatctcctatccattagagggaaataagaaattcctaagcttaggtagtatatcaaaataatttccaaatagcattaaattaaaaaaatcattaaaatcttagaaaaaagaatatttatattattttgggtaagaaaagacttaaaacatgtcacttttggtcccacatacaaatatcgtaaacaaagttaaaaagcaaaagggtgggaaaagtgtttacaacatcaatgatgaacaaagaattaatattcttagtatacaaatttattcgttcattcaatatttattgagcacttagtatgtactagaaagtattctgggcactaagggcacaagcagtaaataatgttcctgttctcctggtacttagaccctgatggagaggactgccagtgactatggtagattattgtaggtcacattttgataagggctaaggacaaaacattacgtaggtggctgggctagggaggcttggcagggtttgcattatgtggatattcaagggggcttcactgatggaatgacatgtgaagaaaaagggaaagtcattgaatgtcgagctgatagcacatttgctgtttttggaatgtcgagctcataggatttgctgatggattgaatgcgggttgtgaaagaaaggagtcagggtggcttctaggtttggggcctggcaaccagaaggattgacataggaatgactgagaggcttggcttggagatagagttttggttatggatgtttcagtttaacatctctcttgtatattcaagtgaggacgtcagggaggtggtcggccataaatatctgtaattcagggtgacatctaggctggagatataaatttgggaattgttgcagtgttgatagtatttgaaagaatgacactagctagagcccctggagagtgtgtgtagatacagaagagggcccaggacatccatgggaccctcccttagagttgagggagatggagccagctaaagagagcaaaaaggagtgaccactgaaatggaaggagtcccgtgagaagggggatctcccaagccaagagacagtgagaagggcgaggtcagctctcctctggatgtgctgatgggcaaggagagaactggccattggatctagcagtgaggaggtcactggtcaacccaacaagggctgttttatgggaatgatggggagagaatctgtttggagttggattattgagaataagaggaaaaaaactggagacagagaaatgggacaatagctggaggaggatggtattcaagtaagtttatttttcccaagatgggagttacataactcttgttttcacccaagtggaaatgattcagtagcgtggggagagtggatggtgcaggattgggctggggtgagggttctgaaatggtggtctcgaggaggtgggagaggtagaatccaggcatgagctggggaagggatcctaagtaggagcatctaaggaggtggtaggtgtgcacctgcctcttttctcagttcactaagaagcagagtcctcagcggagaatggagactaaggagacgatggaagtttgaggagagagggcaaagtatgaagtccttcatagcagaatgagaaaataaatggccaggggaatgaaggattgctgggcggcatgcaggcctctaaggggtatgtttctccagccatgtcctgttacacaggtgaacacggggtaggaggccattgtggtagaaaaacaggacatgagcagacacaacgtaagacagagaaacgcctgtaaagagaaaaagcaacatcagtaatagctgaagaatacaagtaaaaacaatgaggttttctttttttctctttagactggcaagagctcttgttggggatagaaattattgtcgcttttctggagcacagtgttacagtatgttccagaatacaacgtgtgtcccgttttgacctgtcagtcccacctttagaaatttattctaagaaataattgctcaaatgcaaggaaatatatgcacaaagatgttcaccccagcagtgcttatcaaagtgaaaaaatggcagtcatctaaacaggaggcagctggttcacttatctgtcggcctaacagtgatagtgggaaacagtagctcacactcaccctcctgttttgcagatgagggaagttgggtccagagaggggtagtgacagctccagtcctactccacggagctcagaccccctggctgtaggcaggcaccctgcccaacctcttcaactgggcttggagtcagagtcccttgcaaggcacttgtcaagcccttttcaagggccggtttgcttaatgcttttaaaatacgagttctcaaaatgttttgcaaatttgtttacaatgtcttcatttcatctcatggctttccttgcaaaggatgctgacagtggggggaaaacaggccgactgcctggccgtgatagaggggaccatattttcctgattcccaagtaagacttacagtggaagaaaggatattttctgctttcttacagtgtttacaaaagtcataacaggatgtgaggactatctggctgcaacatctgtcaccccattggtcgccagagttgattgggctgatctggctggttaggcaggtgtcccattcctccctcaccactccatgtgcgtccctcccaaagctgtatgctcagaaaggatgaccatccccgatagaggaggactggtctttggtcaagggtatatgagtagctgcaatcttctgctagggacccccaaacaagctctcaaaagtcataacaggagtacaaagataataaggaacttgcatttatttgtttccttgatcatatgtttattgattagaagaaaataaaattagcagccagccgtggtggctcacacttgaaatctcagcactttgggaggctgagacgggcagatctcttgaggtccagagttcaagaccagcctggccaacatggtgaaaccccatctctactaaaaatacaaatattagccaggtgtggtggtgtatgcctttagtcccagcttcccagcgttttggatggctgaggcacgagagtcacttgaacctgggaggtggaggtggtagtgagctgagattgcaccactgcactccagcctgggtgacagagtgagactttgtctcaaaacaaataaaaaataaaaataaaataaaattagctttgtgtgtggagaaaagggaggaaaaataattagcattgtcagagaacatctgggttatttggtcccctccgtgggaactgccctgggttttcacttctagagtttctggttctggtttaatttttccacgccacagcacagggaccgagaagctgctcagcttctctaggcttttatgtcttcaccagaaaaatgagcgggtgggcttaaatttcctacaaaaactcttaaaataaatatgatgctctttccattctatcacatgcctgttctgggtccgggggtgtgagagatgcattagtgctgctgtaaaccagccccgggtctccccccccggccccccaccaccaaacccccaagcaccaacctgggttctccaccacttttgagagctcatcgaaataaacacacctttgtgcctcttgtaacaattccagatcatccaatggcagaccagagaatggacatttcttcaaccatcagtgatttcatgtccccgggccccaccgacctg

SEQ ID NO: 15445 - DNA, 109512 bp, Homo sapiens
ctgggccggcggggagcggattggtcggaaagtaggttagtggtgcgacatttagggaaggcagaaagtaggtcagggacggaggtgcctgtttacccgcgccggactcaccgccgccgccgccgcgggatccgagtgcgggcgcgggcgcgggcgctcccggcgagccacggtgagtgtcaggccggcggcggccagcgacgcgatcccgcgcaccccgtcgggggccgttagcaccctcgcgggcgctgcgcccctgccgccgccccgggggcaacccggccgccgaagaaccctgcccgacgtgcccgctgccggccttaaagggcccgtgaccgctccctgcccccacccgggccgtggggaggctgcgccccttaaaggcgccgcgcccgtccgcccccatcctcctcgcgggggctgccgctgcgggctagggcaggcagaggtgctgcaggagcccttaaaggggccgggaaagtgttcgctggagtacccaccgcccttccgcgggcatcgctacctggcggggggagggggcagctagctgcctcttaaagggatagctctgcccttgggggcagtgactcggccgaagaggactcctagatgtgtccccgggagcttcggggatccccgaggggaccatgcctggtggctgcccctcaagggcgttgggcgaacggtgccgcgtctgcccttcctccccgcttcacttccctttcgggagcccgcgaggctgggtgggggcggggagggcgtctccgtcgggcttggggagtccaagtccgcccgccccttcggccctgtagccagggctggcgctgcacccgggaatccccggccggcacggggccgaccccagcctgcgaactttcgtggggcctgtgccgtccaggtcctgggcggccctcaaggatgccccgtgggtctgcgggcaggtgcgcgtcggcctggggatgtcgcccggagcccgggtgcgggccggccttggagtcccagagctccgcggagggcgcagcgagcctggctccagctccgggtttgacagatgtcagggaagaaaaggttcccgctcggctattgccgggcgttgacatcccagagagcttcccgtttgcttggaagaagacgaggaaggtagaggtgaacgtcgaccttgtggggcgcatgttagcctccccgaggggtcgcgagagccggcagcggggtgagctcaggtgcccgccggcaggagctggggagggaaggggagtgctggacaccggcgcctgctgtcaagttctcgccggccggtgagagacccgctgccgccgcgcaccccgcacctcctgacccctctcccctctccgcctcggccccttcccggtcacctagcgttgttttggcgctttggcgcttgcggtctcttccttcttccaccgctactcctcagcgaggaattattagccaagttttctcacccagcttccaaaaatcagattccgtatttgtgaacaagcttttcttgacactacccgtatacccgtatttccagcatcgtcgttttattaaacatccataaaagctgccccttagatgcattcatttcccacgacacctgcttgcttgtcatttgtccttctgacatctgctgttgttcacccctttaatctattattaaatgacaactattattttaattcttctggtctcattgatatccggatctgtgaatttgggttggtggagtttttaattaatgtacccgttgaatcatgagcttaaaataatcattgctgctcctgagcagttttgaataatatcatgctctctctgcttgcaagacttaaaaaaattcgctggtgttatatttgatttccatatcaatggaattcccaaatatttttgaaaatacaaaattcagtctttcagtccatgttttgttactcagatcattttactgataagtctttaacgcagcttatagaacatatttagaaggtttggaaatttcctggacaggatttgaaattgcctgtatcatctgaagctggttctgtagaagcattttggttttgattgtagatgcagccagtgaatgataacaataagttaaaactgtagttaaatttgttctttattcaaccctctgaagaacgaacagatctggtagaaaagcactaacctgggagttaggagctggacatcctggttctagtttaggcttgggctctcatggccgttccagtcggggcaagttattaaagatttctaggttgtgtttgcctctgatggaaagtaagacggttgaactaggtgatctcaaaggttcctctcttttgaagttctgtaagtctctaaatatttaatacatttgaattcaggttggtatttacctcctggcacctccagaatatctgagctgaagccctattttcataagaaagttaagcagatcaacagatggtgttttgaagaatccatttcaaatgatttataaaatgatgactacttacgagtttgtctgctatttgcagaagaggtttgcatgccacagggcaggaaaaggaagtggccatgttttcagatttatcccttcacaccaacaatctctgtggaatttatatgctaaaagatggagaagcaccatagaaagatttggctgtattaacaaaactgcatatgaaaaggtaaaaactagatagttaatatctctctttggtgtaagggttataatgtatctgagctttctttgtgatttcatcatcaactctcactgtggtaggaaaatcaatattaaataaacagtttcagccccgtgattacatgcagtgattttaggaagcatcatgataactaaagtaggtacttgcagggaagtaaaatatcctttctagaccttgaggtttcgttgggagctagggacacaggcatgttatccttctccacagtcttttttcattgtcaccttatcacaagactcagatttatcccaaatacccaccttgtcttttcttctccctctcatgaaataagacctgctctgactcaaccccctcagcatctcttacttcccacccaaaatgtcctgtctctatccccatcgtcccctcatctcctcccaattcagagaaagcaagtggacctctcctctgttccttttcttggcctctcaccatgggcaagtgcctgggctctggtggcagaagaatccatggctcaggtttgggctttgtggtcttggatgtgtgcttgactcctctgacctcaggtttctcctcttggtgtaatggcagtgcctgcctcgtggagtctgtgtgaggattaagggagatggtgcatgtaaaaggcctggcacacaggaagcctttcctttgtgccagctgccattccttctcacctctacccgggtcctatcactagaatattatttgtgctgtttgtccttagtctcccctgccccaccctgaaaaccttaggcttgacttaggagaggaaggatggaagaggcagagtcagacttgtggtgagcctgctgtgtaccaggcaatttacatgtgtctttacttggtaccctgggttcgtaagcctctctttcctccctcctgccagcctcccccactctcccatctcctgctccattcttagtacctgccctctggcttctctcgctaccacctttctttatatttcttctcaaagttttctccaaaactttgtcgtgagttcctggggcccatctgcccatccttattcctgagtggttgttcttggcccctttgcagtatttcttttatttttttaaacatggtctcagtcttgcctggttggagtgcagtggtgcaatcgtggctcactgcagcctcccaagtctcaggtaatcctcctgcctcagcctccagagtagctgagcctacagacacgtgccatcacacctggctcatttttgtatttttattagagatggagttttgccatgttgcccaggctggtctcaaactcctgggctcaagtgacccacctgcactggcctcccaaagtgctgggattacaggcgtgagtcactgtgctcagcccctttgaagcttttacctcacttgttttttgtcctttgaaatcctttcctctctcagcctttgggtcatgctggtttcttgattctcttcctgcacccctgtaaagataaatgtctgtcctagcttctgctattcacactgtccgtggcctggggtcccctctctagccctgacctgtctctcctgtgttctgctagcaggtccgttgtggacatgaatggcagcctgtaatctgcatttgtggtctcggagttacaggtttgcagactgcttgcaagcactgtcacattgagtcctcatgacacactggagcctacatcccttcattccccaggctgtcctaaaaggcagtttggttgggtagtttagcatacagactctggagccagatttcacatcctaagtattccctactggcttcgtgacttgtggtcaattttcttttgctctctatgccttggtgtcctcatctataaaactgggatcatagtagcccctacatcagagagttgaggtgtggattaaatgagttaaagcattggaaaaagtgtgccagtctattcatggcacattgcaaacactcagtgaatgttgctgtcagtcttgctgctcttcgttgccttgccggggtgccttggcctggtttgtagtggtctccacattcagcctgcctgtctgccagaccttgccatgtgcctggacactgtagtcaagctgaggggctgtccattccctgtaccagcccttggcccagtccatccctcaattttcacgtgtccaaatcctcctctgcttttaggacccagggccttggtcctgcagcactatttcttcattttgttttccttcctccccacacctggcagcaatgtccacattgatttttctccaattctcttaggttctgctgcattccatattgtgttgggctgtctctgaaaatatctcacctgctcgctcagcctgagcattctgggagaagtttatcttgctttttccaaaatgacaggcacagggagcctttaggccatggttgtccaatgcacattgatcttgtggaggaggagatgggatggggtgggcactcagggacggagcaggtggagggaacaggatgcacactgcatagaggtgggggtgcaacagggccataagtggacatggccgtaagtacttaggtctgcatggaaggagggtttgaattggggacttaacctcagggggagataagattggataaggtttagtcatctttgctgcaggggaacgttgagtactggcatgtaatggagagtggtttttaccttagtatgtgctgtccttttaaatagtgtaaactaattctttatctagcctggttaaagaaggggatggctggtctgcctaatttaatatttggctattgctctacccactgggttttgtgcatatactgaatgaagcattggcttgtatttattccttcaatcactgtttgaaatgtctgacctgggcaagttaattagcttctctgagtgcaaaataggaataataattattacgataatagcagctaacatttattgaacactttctatgtgccagcacatatgtgagtcacctttgcttattaactcatttaaaccccataacaactacatgaggcaggtactattatccttacttcacaaatgaggtggttttataaactgcccaaggtcactcagctgttatggcttggggcagaatttgtgctggtgaactccagagtctgccctgtaacaccctagtagattcctactgggaggaaacaccccgttatatcccttacctcactcagccgcaccatgccaggagcctagtaggctgacagcaattgggaaccagtcttattgttgacaaacatggtatgagcctcttttagagcggagctgcctgaaaccctccgcataagggatgcggacctggatgctacctgagcagcagctccaggggcttgtgaacattctcctcacatcctgttatgcatggctgtctctctggcctccccctgctttctctgcagcattgctctgacccaggccccctgtggctcagccagctcctccccaggcagctccttgtgtgagatgaaccttttaacataactcactaaccccacctcccaccctcatctagccatctgcagagctcctcactggggaggggaccttttcaaaggtccctcaccttcgtccttttctccctgaagaccaacgtccacaactttggtatatccacagtgttggggtgtgtgtgtgtgtgtgtgtgtgtgtgtgtgtgtatatatatgtgtgtgtgtatatatatatatatgtgtatatatatatatgtgtgtatatatatatatgtgtatatatatatatgtgtgtatatatatatgtgtatatatatatatatgtgtgtgtatatatatatatatatatatatatatatatatttttttttttaatgccagttgttccccaaatacatttagatagtaagggacacattgttttatgtcaagaacctgttacataaaaatgtgttatataatgttcaaatatatactgcacagtgaaattagataccactttttttttttcaaagaataaaaggataataaacacaggccgtcctgaatataattaacctcagatttgggaggcatggaaggacgtgccctgccctcagagctctcgtcctgagctctgcctttcttgagtgcgccgggagcaggatggatgggaagttggcctgaatctgccatggtgtggtactgtgagatgctctggaaattgtcttttttttttggcggggggtgggggatgccttcgcatcttgctcacttgtatctttctcacacctaagcagagggaagaagctctttttgccccctcgtacttagaccacccaggtcatcttttgaccagttttctgctctgctcaactcctttcaatcttcccagatgacaggccagctttgcctgctaagaacagccctggtgccagtggcatgcaggtggcacccctgtgtccagtcttccaggctctccagggtctggtcctgttcctcctccccagccctgcttccccgctcaacctccattcccagccacagccctgtgcccgaggttcagtcctccttgcctctccgctgtcctccctaggccacctcacttcacactctccctctggctagcggggtctttgcttaaattgttcccttgaggcctctcttccttgcccgtgcctgccttggatctcacttctctgtgaggtacctctgataacatttgttccctttgtgtgtgctctcccttttgctcttgattgccaaccattcattcgttcagaagcaggggtatgtcataatgagcaaattaccatatcatactgaatcaggatggccagttgtctcattttttaattgtttcatggttaattatcttacgctcacttcccactctccagtttcactcagttactccgtcagtgaagtttattggatgcctagcactgttgtgggcactgaggatacagcagtgaacaaaacaaggggcccgcaggaggggacagatgatgaatagtgaaacacgttcatgccttgttgtgagaagtgctaggagtgctaggatagcaagcaaatagagtaaagcagtagcgatgaggtatggtgggagggagggtaccttatctagatcacaggggagacctctctgaggaggtgacatttgaacttagcttcagaaagatctgggggaaagtatcccaggaagagagaacagcacatgtaaaggccctggggttgaaaggtgcttgatatttttgaggaaagtaaaggctagtgtgactcgattatgagctgcttgtgtacagatgttttctgcctcttttatactccctttaaccctgagcccagtgttaggaaggccttgtaaatacttacatacagaattatagcatttgtcattggttatatattataaaatagtaattttataaaataataatttatcataccctgcttagaaggcttttaataaaacattatattgcatataaacaaattaagggtttgaagggttttcttataaatgcactcctagcatgtttcaccaaatattactgttttaattgtgtttagtgcagaactttagacctcataattctgcttcatgtgcacaaccatcttaaaaacaggttttgttccaaaagtttatttgtaaggcactaggtggaaacttgggataaatttttctataagaaacaatgaagtaaatagtgatgtagtttctaggcgagccctcaaaagctatttagtggtgactgtagctgaaaacatactggttggtatcagcagtcgtcaagccttctgctggtagaccctcctctcagtagcattgtacctcatttgctgttagcaatcataggacccatttacctcagtcacttctcctactgtattttcagtctgttaaagttttatagaagggattttttacctttatacctttaagatttggttgcatgtgttataaatgagacagtagtgcagagagtggggaaaactctggactgggagctgggagaggcctgggctccagactgggcccagccactgactggctgagtaaatttgagtaagttatcctctttgaactttgatttctcaggttcttcttggctgtaaaatcctattgttttctcaccatagcagggaaacgtagatatacttcgttgttcaaacctgccctcaaatggctgcctctgatttcttcttgaagaagtatatggcactcagcaatgaggaactcaagcagttccccatgtgcagagctctgcagtgacattctcagtaggaaccttgattttgatctgctatctttcttgatgagttgaaagaaattttgtcccagaacttttggtccagataagatttctgtgttcttggccaacttatcttccatataattatgtaaattgttttttctttttaactcttagggataaaaatggtgactctggcttgcctgcttataaaatatagttataagtgcccttagggaatggaatgagtttgcaggagagagcagagctgaaagagtgtgggatcaaaaacaactttaaatgttaaatgcaaagctattttcagtaccctgctggaagaaaaaatttttttcaaggttttagaggatagaagaggtttttgctccaaagaagaaaggaacctaaggttttgcagtggtgaaaagtacctgatcctttaaccaactaccaccctcccttcccacctctgagttttgttttcgacatcatgaaccacatttgccatttgagaggtttgatatttaagtgacgttagtggcagagctcaactggcagtgttcaaatgacttaggtgcagagtgctgtgctgcaaacttccccagtgcattctagggtaagggatgcctcatagagagtgacagagcacttttagctctgcctctatttggtcagttgtgaatggtgtgttcctttttttccttacttgaaggcatagcgaggagttggtacaagaagttattgcttcatggacttcactttggagctagagggtggcattagacctagcctgccttcttggatgctggaataccagtggcaatgtcatctcttgttctctgctatacccctagcaatgaaaacagtgtctgtacagaaaagtctctcaataaatacttgtttattccttcaaaaagtgaattcagctttggataaatttttaatttcctccactctctagcagtataggcttatgaggttggtcttgcaaggtactttggagtttaggttgccatttctttttgacatctgtgtttttcttattcttcaggttggtcaggtatcagtgtcttttactgatgatggttgtccctgccctgctgatgttcatcttctgttatctttaattggctccaaactgcagcaaatctatagctgagccacattaactaaaagaaaacttgttgcatatttatttaggcatagtactacacatgtatttattcagtcaacaaatatctgtgagtctatatgccaagaatgttactagacccaaaggaagagcagaaattgttgttgtgaccaaggagcctgcagtttgattgccttgtggaacatctttatgagcattgtagaagggaggaggcttcatagaactggtcaggttttcacctttaaggatggtaggatttcgattcacagacaaggtgaggacaggtatttccaggaagtggctgagcggaaacagcataattaaaaacacagaagtaggaatggaccagtttgcattcatggacacagacttgtctaaaatggaaggttcttaaataatggtgggaatttaagtatggaagatcactgaaggcccaaacctgaagccattttagacacctagtgacttgcctaaagtgacagctgataagtggtagatccaggcttaaaataaggccatgggagctctcgaccactggcactggacttggctgtttcccagcagtctctagatgcaggatttgggtttgattggggattttcttttttctttctttctttctttctttttttttcttttttttttttttgtgatggacactgagattgggggttttagagtcatgagctggaaataggcaaggctctatttagcccactctttcattttgcagttggggaaactcagtgaggttaagtggcaagtcggagtttacctagtgagtcagagactgctaggcaatggataaccactggatttgttttattatgattatgattttagtgacatgaaatatttctctctaaagcatcagtccagtgttagtgttccagttggattggagcaatgaaggactaaatgcagcagagacctgacaggaggctgctagatgaatccaggaaggagagagagaagccagaactgagaattaattgtcaattatgttaatcagcatggtgttatcagtcaccctttagatttctagagtgcggtgaacatctgcctgtgtgagtggctttcaagtgtgtgaatctgcactgtactgtgaccaagataccttaatgaattctccagacagaaagtgccactatggaagtcgaatgttttaaaacaaatgcccacattttctggaaagagcaccagattaggagtcagatgacctgcattttaggctgcttctgctgcttagtcaccatatagccaaagcaaatcacttaatgtctcaaactgagcctgactccttatctgtggaacaggtataacaattcctgttgagcccttttcagtgtatgtgtgatgcttgtgtgagctaaggaaagaataggcattttgaagctgtaaagttgctttctggctgcagggagcagcagtgcagttttaatagtgaagatgtactggcccttacaggaatagcctaggagaaccagaagaaagttcccctacctccagggcatgtttagggaatctggcgctgtccaccaggtgggtgctgatgtgtactactttattggatagggccatgttttttgtttatttgtttgtttttattatactttaagttctagggtacatgtgcacaacacacaggtttgttacataggtatacatgtgccatgttggtttgctgcacccattaactcatcatttacattaggtatatctcctaatgctatccctctcccagccccccagcccctgacaggccccggagtgtgatgttccccgccccgtgtccaagtgttctcattgttcagttcccacctataagtgagaacatgcggtgtttggttttctgtccttgtgatagtttgctcagaatgatggtttctagcttcatccatgtccctgcaaagaacatgaactcatccttttttatggctgcatagtattccatggtacatgtgtgccacattttcttaatccagtctgtcattgatggacatttgggttggttccaagtctttgctattgtgaatagtgccacaataaacatacatatgcatgtgtctttatagtagcatgatttataatcctttgggtatatacccagtaatgggatcactgggtcaaatgatatttctagttctagatccttgaggaatctccacactgtattccacaatgattgaactagtttacactcccaccaacagtgtaaaagcattcctatttctccacatcctctccagcatctgttgtttcctgactttttaatgatcaccattctaactggtgtgagatggtatctcattttggttttgatttgcatttctctgatgaccagtgatgatgagcatttttttcatgtgtctgttggctgcataaatgtcttcttttgagaaatgtctgttcatatcctttgggatagggccatgttttaaagatgattacatttcacccccgtaagcctgggcatggacggaaaagttaggcatggatagccatgtgaatctattatctgtagacacctttcaggatagtgacaggcagctgtgaaccagaaaaacaagtgtcagaatctagccagctggccagtctggcattcttggatgtttcatctgtcctggggcattaggcagcgatccagaggaaccttgattagcctgggggattcatggctgagccagcatgctgtccaggtaatacctggctgcaaagcctgactggagatctgccaaatctaaatttctgccagcattacaagtgtatatattattattattattattattattattattattaatagcagtatctaaccttgactacctaccatatgccagcaactgtgctaagtgcttacatactttttctcattcagtcttcacagtattcatataaggtgggtaatgtcagttctgttttctagttagagagactgaaactcagacgagcttcagctgatacatactaagtgtaaaagccatgattcaaactcagaacagtctcagtccagtgcccagctgcataactgctatgttcttctttctctcttttcctggtacctgaaaatacttcttgtctctggttttgaggtttctgactgtgttattggttgatggatgggttgccacacagaggctcagctcagcacagctcttttttcttcatagcttatgacggacatcctcctggatactctggctggtgagcaaatgggtgccagtggtgaatgcagcagaaagactaactcttgccagctagtgcatgtgggtgaattttaaagacaacaaaagaaatttctgtaggtcagtttttcaaagagtaactggtagcttgtagtctacttaaaggccaagtttgatgttcatcaaagtcaccctgtaaaaacctttccaaatgctgtgattctgataacaataccatagaacattcctgtgtaattgacaagtagtttttacatacaatgtcttgtttagtcatcatcacaaccctatgagggtttgcaactacatatagttgcaaagaagactgggagatatctttagttgggaagccatgagtctagcaaaatctctgtttttaagggtggcgaggggagtgaatgaggggagctagcaatctgatgtgttgtggtggtgatggaagggataagtagagtttgaagctgttgtcagtagagttgggaggatgcctcctagtctatgacatctcctagtgttatgacatctcctcttgtggactgggaaattgcttagagtttaagcaactgtccagggttctacaactggtcagcggcagaggcagcacttaagtattgcttttgtgacttaattcactctctattcaagtttcatctttgctttctctattgaagttcttaaatattctgattcactgtatttagaagtcggcaggaattattaaagtgaacttctttgtggtatacactgttactgaatcagagtaaataaaaggtcacatgattggttgttgtgttaggtttaattgacgtgtactctgtatgatacagaatactcacatatcttttgtgggatatcattggtccaacagctttaaaaatcccaaggctttaatagatgataaaacacggagtttgtgtaatttcttgaaaaagttggccatcgagttcttggtcaggaacacaagcttcaattgtaacagtttccatggagacattagccttggcttgcatcatttcagctttcagtgcctttcctaggaatggagtgaactgctaaaagaagagctctggttgtggttgtcacttagagctctctcccctactgtttctgctggaggctgatttgcttttctgggtcttctcagttttttctgtgacctaagcataaattgtctttgagatcctggtaatctcatattttaaaagttttccacaaaagacaactgaatggaacacttttttttttcacccctttaaagtatttaattggccatcaacggtggctcacgcctgtaatcccagcactttgggaggtcgaggcaggcagatcacgaggtcaggagatcgagaccatcctgctagcacggtgaaaccccgtctctactaaaaatacaaaaaaaaaattacctgggcgtagtggcgggcgcctgtaatcccagctcctcgggaggctgaggcaggagaatggcgtgaacctggggggcggagcttgcagtgagccgagatcgcgccactgcactccagcctgggcgacagagcgagactccatctcaaaaaaaaaaaaataaaataaaatgaaaaataaagtatttaattggtggcaaggggctttgctagaagaatggacacctggtctcactcaagcttcttgtattagttgggataccaggtgagtccctctgttaaagagacccacaggcacaatggctgaaaccaggtagaagttttctctctcatgtactagtccctagtagatagtggtccaggcctagtatttttaacacatggcttccatttgatggttgaaggtaaaaacttaccatctcccagaggaaacacccaagggggcacacatccagtcatttttaagggaaagacccggaagcagcacattctctttttccagtagccggaatttgcaactacatatagttgcaaagaagactgggagatatctttagttgggaagcaatgagtctagcaaaatctctgtttttaagggtggcaaggggactgaatgaggaaagctagcggtctgctgtgttgtggtggcgatggaagggataagtagagtttgaagctgttgtcagtagagttgggaagatgcctgagtcaagggtgagaatctaagcaggcacacagaaaccagggcatgtgcagccatctagaggtcagggaagctcttggctctgaaactaagcagtggggggcacccaggcatggaagggaatgtgaattactcagaagacattaggttgtcagtaaaaggaaattcaccagtgtgactgaatcagtagaaagagcacttagactaggagtcagaagacctaggtttgagtccagcccttttacttcataacctggggcaaaaaactcccataaatatttgctttattatttagataatggcaataacagtgatggcctttcctgcctcccaggcttagtgtgagaccaaagggtgaggaagtactgtgtagactgcagccccatggagatgtgcacagtgtctgcccagcccagggcctgccatgggtgtatttgttgaatgaagtgtgaactattaaaagagttgggaaaaatgcattatactaaggagatcttaatcctggacagtcttctctaccaggcagaaaggttctgctctccactggtcaaggccttgggcctatgtgtaaaactgggtacctaacaaacacatgggcagacgcctgcagctccttactgggtagcacatgacacatagtatgtccttggcaaggccatttgctcattcctctgtgtaggtaaccaagtgcaacagaagtggaggtatagcccatgaatgtgaactaatcatttttaaatgatttggtccatgggcaggttagaagatgaaaccttcccaaggccaccaaaacttgatttcttgcttgaaaatgataagatgcagttataaaatgcttctgttgatttggaaaaaatgtgtgacttgttcaaaacaatatgtattaatagaaaatgtaacataaataagaggatacaaaaaagagcttaatgtttctatcttctgggcctagcaatagtgatttttttttccttttggtaggaaaatgggggctcagtggaataatcagttttatttctttttcttttaacttcatgaagggtttgtattgttcattttgttatttaatttgttcatttgctaaggaaagaacttctttcttggaactctgcggagtgtttttagatggactttactggaaaaaaacaggaattgaaattatattcacagtgcgctctaaactcttttaaaatctcatgcatggatggaggaaaatgcactgaaatatcaatagtggttctcacctcatggaattagaggtgacttttattctcatctccttctctgtggtttcctatttttcaacgagtgtgaattacttttatcatcatgaaagaccagttaaaaattaatctcacaaattaacactctcaagccaaaccacgaatttttgtttttcacaacctggcttggactataaactgtcacactatctcagacctatgcagattcttttctgagtgaggcattgaggaacttgttataaagatgatgctttccttctggaaatcaagaaacaagccaagggcttataatgtgttaggaaagatgtcctgagtaactttcctcctggaatctgactagcctttattacagctacttaaggaaatgagttttgtgggttccctgttcactgtgtcaccatttttttctttatcctgtactcatatgtacctcagggtccccagattttcttatcctgggattgcatgaccttgtccttggctctctcgggcccctgccgtttccagtgttctctgttcatgttcacaatattgttgatttggctgtggcttcttcccgcagtgttcttgtagactgaagagagcacattgctgcccttgtccctgtgcagcttcctcttcctctttatcattgctcaggtgagtggcctgagcagtgctcctgggatgaggtgaagagaagcagtcaagactgcagggaagggctaggggtgctgagctggccgagcttccctgggggaaggcactgggccatctgtccagcagcagttggcccacagctggcagggcaggctcaggagtggctcttgaagatggctgcttggtgtttgaagacagttcccagggcatgcattcatttgttgagcaccttcaatctggcagcctgtgttctagatgctggctgatgaccaaggctgacatggctttggctgtcatgggagtttcattctagtggtagagggagagagagagagacgatgtggtagagggagagagagagagacgattagcaggggaatcaatgaagaagataattacaggttgtaagaacagccccagaggaggttacaggtgcctgtttgtcgagaagtgggagggccagagttgggataggaacctatgtccctgattgcaaggtctggctccttctgtgtcctctgggctttctggtgggaagggaggaggtggaggagaccccttgcgagggccgagcttctcccattcagccagtctggaccagcctggggccttcagatggagatagcaaaagttgagggcataagctagggactggctctcttggtcactccagttgcccatctctgtacttccccaggtgaatagccatgttttttaaagaacacggagcaaatttgcatacaagagtccagatttatgcatgctgcagctttgtctgaaggcaagcttatattttctctcctattattttcaacttttaatgagttaccagcatctcagtgcccctccagcaaggatattgggctggtgttttcagggaacaattttaattaactcctccttgcctccctctcacccagccacccccagtccccttcctggtggctcagagtctggctttggcatgcaataagaatatttttgccttggtgttagcctttctgaaactcttgattaccagtgctcacaggacctttctgcagcactgtctgcttggctgtggactacccagaggagcttggtgtcaggcaaacttaggcgatttccctgagcatccttgttgagtctgcctttgtacttctttgtcaggtctagaggcttggccgtttgtcctgctcttttgtcccctccttctgggaaccctcaggaccctcactccatggagactcagcacccttcctcctgcaaacatcagtgatggggctttcccagccctttcccctatcttccttttcaaagaacaaagcctttgaagcttgtctcatacctgtctgatgcagtatgggaatctgtaagttctttgcctcctgaaggggtctggggaatcacttggctttcagagctttcctcgctcctctcccacccacagaccgattttaaccagagagtaagtcattcatgctgtgcttgaatactccttccagtcccactaggaagactctttgttactaaattctgttttcttgggaaaggggagcttattactatctcattttgttggttgttattaccctcctttaaaaatgtatctacatacacgcatgtgtgtacctacatgtttctatatttcccttgtgaatgtggccctcagagggcctggatttaaaccctgggagtggtagtgaccctttgggaaatgtatactttttgttccaaatcttctctggcttaaatttgtgaagttttgtttcagccttggtttcatagtttttcccagtttccaagataagtttggggctcactgtaatcagcatgtaaaggagaatatggccatcagctctgccccttaaattcatagtcagactcagtggggaagccgttcctgtcccatcttgcgctcgtggctctgtcagcctcaggcagctcctgcaccgtcctcctgcctgtgacagtgttgtcaggagttcttggtacctgggtgctgcttggcctcagggtgccagggctcccatgtggagtgtgcttgctgcagtctctacagcccaggtgtctctgcagccctcctcttacatagccacagcgtggtaaagtacatccagtttgcgctgtagtaagcaattttattaaaaaaataagtttaatatgtaagtggtcccttagttcgtttgaatggctcccctctctggctttggtttgaatgagctacacctggctggagccctgctgctcccctcagcatggagtcacctccctgtgctatggaggaaaggaagaagttattcttaccttggttttgagacaagacaagcctggagaaggctgtagggatgaaggagttgcccatttgtccagcatcagttgagagtctactgtgtgcctggcatcataggaagcctctggagtgctgtgagcaagaaaataatacttgatttatgtttttaagggttcttctcgctgcctgtgggccggcagtgaggaggacaagagcgcagcagggagatgggttaggaggcagttgctccggtgcagggagcagtgccagcttgagggctgctggtgggtattggtgtgagggtgggcaggctgcagataggccttcgcccattgcccttgccatgtgtccccatgtgtccccaggggaggctctgggcatcccaaactgtgagcctgccctttcccaagtgtgctaggccctgccaagctcctgcttcatggcctatgctgttcattccatctggaatgctctcttccccctgctttccatcctagctgagtgacattgggcaagtgaccagatctctcttgagcctcaatctcttattctgtgaaagagtgctcatggaacctactgcatgggaccatgaggataagactatagttgagtgtggtgattgcagtagcctccaaagctgtctcctgcttccaatttcatcccgctactgtgcattctttacacagcgatcctgtgaccgagggtcagatcagggcaggcctctgctcagaatcctctccacagtagcttcctgtcccagtcagaggaaaagccaaatcttagcatggccctcagagcttcctggtacttctgacctcatctcccaccccaaggccatggtgtatggttgatcatgctgggttctgcacagctcattgtggtgcatgtaagtggcactcacttcctccccaacttatgcattgcacaacttgtgcagctgtacatgctgctcctacctgcgcctctctagctccactccagccacagtggaatccgtgttgttcttcaaacacaccaggcatgcttcctgtttaagctctccctactgcctgctcccttggcctggaccattcttcccccagaggtgtgtatggctagttagctcaccttcttcaggtcttttttcaaatgtcaccctatttaaaattgttccatctgggtcactgccccccaaatgttccctttttcccttgctctttatttttcctcctagcacttatcaccatctaatatattatacgttttccttatttatttggtttatttttatttatttatttatttctcaacagaacataagcttgatgcaggcaggcaccagtgttaattttgttcactgctgtatccccagtgcctggattggtgcctggcagtaggggttcagtgatgcatgagtgaatgagtttggatgcacaaaggtaaagtattgggtacggtgcttagcacactggaagcacctaatacatggatgccagtattttcattgtctctgttaactctccaggccctggctcaaatgtggctttctctgagcctttctgcagtcccttctcaggctgaattaagtcaccaccacctgtgctctgtgttccccttcattttgccttctctgtctgctcggcatttatcacactgcagtagtgggcttatctcacactttttcctgttccaattgcaattcctgtggggcaaagactggcctgttcagatttgtatctcaggcggtctgcgcccccagctggcatgtggtaggagcttaggaagtgcttgctgctggtggctgtgggaggtggaaagagctttttaatccatcaggacccttacaagggggactggctccagcatcactgccgtctgatgtttgtgccccctcccaaggggtgtcaagggagagcttggcaaccacttaaatgagagtctccagtggtatatttagagcaaattttggagagaggagtctcttggataacagcatctgggtgacctgattgtttcacatataagagtttggctttttggctactcaggctttgagaggttggggtcattcaagggaggcagtgtaatacccatgtgttcagaggtggctgggacgagagggtgcaggagaaaaggcttgagctggcctgtaagggatctgagttggtgaagggagcacagcttctgggggtggcagaaggaataggagagctgcccctgccatacctggggaggggtggttaggtaggtgccttgggaggcatggttaggtaggtggtttggggccatggggggaaaactgtaatgccagggcaattactttggcctcttgtatttggcaggaggggtccacactggggattgtggtggcgtgagggagagggccctgggagagaagctctagagtcattttcttttccagaggtggagttgtcttggggacctgcacgtggcacgcagagcccatgctctcaggcacctttggggtggcagagtttcaactgaaccaacagaggacaaggggctgagaagtcggaggccttggctgaggtgcccagtttcttggttcactttctttacctgccaggttagcagcaagtgagcaaatccctcctgcctttgctcagcattagcctcagagacttgaggagagctgggccttcaggtgggagcctggtggccacactggagaggaccaagcttgacattgagtgtccgaggggctgaaagttgttcgctcatccagagatggattcgttctgcaaacatagggaaagttcccttcccattcctcatggctgtttgaggatggaattcctgcattgaccttggcctttccctgatcttggcctttcccctgcactatggcctctctactcttaacattacgccccagcccttttccatgggcccctcgtcttccctatggccatctaaaatggccgtataatattctatcaagggaatgttttcagtaagccatgagcttgatatggagcatttagattgcttctaatttttgctctttcagctaatgctacattaagccatctctgtgtattatggaatcatttcattagttggcatttgtctagctaatggcaatggcccaagatttaatagcgaatcagaatttcttttttcaagaagaatgtcatgaggatatataaaaaatttacttaaaatgctaggaatcatctatgttggggttttcatgaatgaggaagcagggaaacagtaacatgaaattagttgtaagtgaaagactgtgtgtataaaagtaactcgtgacttgtttgttcctgagtgtggaggggagccaataaatccttggaaggagcaatctacctgtgaaaatcaaagagatctgtattcctgcatctgatgaaaacataacaaacagtgatctcttcttaaggatatttttagaaatgccctaaaacaagaaaaagtaaataagatttccgagaaaaaacatgtctccttaattccaaatgagcctctctggaaatgccatttagtagtggaagcaggttgtagacttgctgaaaggatttggttctttggttattaggaaataactagaatgaaattgacaaacagacaacactgacttggtccccagtactgctttgagcctgaggtatgtgttggctttggaatgatggggaaggcttcctctgacttgctgatttgttgtagttgttgttgttattgttttgagatggagtctcgttctgtcaccaggctggagtgcagtggcgtgatcttggctcactgcaacttctgactacctgattcaagcgattctcctacctctgcctcccgagaggtgggattataggcacgtgccaccacacccagttaatttttgtattttcagtagaaatggggtttcaccatgttggccaggatggtctcaatctcctgacctcatgatctacctgcctcggcctcccaaagtgttgggattacaggcatgagccactgcgcctggtctgttgttgtttttattgtttcagtctctggtggcttattatgtagacttgggctgtaagctttgcatttcagtttaaaccagcaaatgtttacactatataaggttgcaagggctaaaactttagggagaaagaacccagtgcacccctgtttctgagaagctcatgaccagggagtgggaaggataaagcaatgttaaaaccaatggttattcaagggagattaagaagggggccctgggagagtcagctccatccttttagagaagggaggagttctacctcactgctgggcagggtggggctaaggggcaggagaatcaagaaaggttttatggaactagttgcatttgtcaacatcttgaaggacaggctgaaatggaggctggacattctcagcaaaggtaaaaggcctgagtagaggagatggagatggaaggacatggggcaatgtttgggatttggctgaagaattgcatgcctgtagtaatggtcatagtagcactttatggagagtatcaggtgccaggcatggttctaagagctttatatgtagtaactcacttaatccatgcaatgaaccaaatgaggtactgttattatccccattttacagatgaggaagctaagataaatagcaaggaattaattgcccaggatcacactgctgtggagccaagatcagaccaagttcatctggctccaggctctgtgcttacgaccatgaagctgtcctgtctctgatttggggaaagaacagtcactagaatcagacagatggacagatgccgtatgtttagaggctgggattatcaacattcaggaatgcagaggtggaaaagagaccagagatggagatgaggggcattggagaggtggggatgggaggagggtttggtgagagccgtgaagggccacaggaagacagagctttaaggagaagtttgtcagtgaggcccagagctgcagacaatcccaggaggtgagacctgaggaataggtctgggctgaggagaaagctgtgagggcctcgggagaggggcagcagggtgacccaggctggagctgctgtggtgtcctatcctggctgcagagtgctgcgtgttcctgggggatcatagctgttgatgagtatcactgtccctgtcctcttatctgtagaaagaggtgagtgtgacagagggggcaggtgagagctggcactgctaatttggcaaacctggtgacttttctgcagcctaatgatttttgaaagctgtttgctatgctgaggcacaagtgtgacttcccccatctaaatgctgtgcaatcgctattttccctggaaaattgggcccatgtgggctctgtgtgtggtttatttgagttccatttttatagccttattaccttgtccccatgatgcaagaggcctctctcttttcttgagctttgctgtgaaaattgtttcttaaaaggcacaaagtgatctctcgtcatctgggtggtgctcgctccacaagcagcacttttctcagactccgcacacacttgtcatcgcccctgcccccacttggcaggttcctctgattgttggcaatttactgagaacttttaggcagctcttgaagctcactacctatgtgtttgtcttgatttcttccggaagagtttgtgcatgtaaatatccattcagcctctttctctccgagatgttgccctgccactgaccgtgcttggggctgaaacccagtcttgtcctctggcctcgagctgattaacaatagcagtcatcatgtacagagcctgagtggttatcaggcactaagctaagggatttacgttcgtgatcttaattattcccaatttctttgaggtaggtactattacttcccccattttacagataaagaaaatgagccttcaagggatagagtaagttaccccaggttacatagctagtacatggcagagctgggcttaagcgggcctttctaaccttagactccatgtgctccattcattcattcattggcaacaaatgattgtctgcaacaggctgagaactgttgtagacccagggtgtacagcaaagggaaaaaaggccaaactcccaccttcagcttatattctaacttggggaggtagagatcatataataaatgacatatacattatgctatgtggtaatgagaactatggagaaaaatgaagcaaggaggtcagatgggaagtgggaggattttgaggagtggtcaaagaaggcctcattgagagtacaacaaattgttaggttaacaaacaaacccccaaatctcagtgtagcaacacaacaaaactgcacttctctgcagaaaaaattccaaagtggctgctcctggttagcaggcagccttccttgcagtcatccagggacctagactccttttatcctgtgtctctgccttcttcaagggccttggtttcctttgcattcaaatgctggagcgtgaggaagaagaagagagggtagtttgtgaggaaggctttatggaccagtctggaggaagcatacctccctcccacccactggccagaattcagtcacatgttcactcctgactgcaagggaggctgggaaaggaagtctggccatgtgccgcctaaaaaaaggaagtgggttctggtgaactcatggcatggtgtgttgcagcgagtgaggtgaagaagtgagctatgtgtttagctggaggaagagcattttacacaaaaggagcagcaagacaaaggctgctggaatggagtggggaggagagaaggagagtgggagaagatgagggcatggagttgtgggggccaggccactggggtcactgtaaggatttggttgccttgggaatgacaagcagagccagaacatagagttttgaaggaggaacgacaggatctgaggcacgtctcacagggctcactctggctgctgtgttgagagtggactgagggagcaagggggatgcaggggagaagcgggcgtttgcgggtgttatccaggtatgtgaccagaagggctggccctgagccggggtggtagaggtggggagaagccgttagatttgagatcagttctgaaggtgggccagcaacttttgctgtgggattggtagtggggcatgagagaaagaaaggagtcaagattattctgaggttttggctttgcctaatgagtattagtctcacttcctaccctcagaagcaagaggggaaattttttggaaaaggatatctgagtgttctctgggccctgacctgtcctccataacctctttcactctgtgatacttttttcagcacagatgggcaattcccattcatgactaggctttcagacatggagagggcacttggagtccctcctggcacacagcagaggtgaggcagcactgggaattgtctcactttggggtctttgggtcaaaccttgggacccctttagagtgacatggcagggactgagtgtgccctctaggggggtgagatatgcctactggagtccacttccaatgcctgccatctgcaaacactggtgaggccctggctgaagggtaacaacccacaaaagtgcacaaaaggaggaagttctggaatgcgagttgatgctgccagcggtccggttggctccttgccttctgttctttgtgtgttgacatcagacctctctactgcagacaggctgccctacctgagggggcacagctgccagcagcctcagtttacaatcctagcaaaggaggagagcctttctctacatctaggtatcagtttaagggaaaagcctctgtgtttgagagtgggagcggaaactgtttcccacgtacttccttggcagtcatgacctgtcaaggctgaaactggagatgggactttttaatagaccatgatctcactgggagcatatggggaagaaagttcatcttagagatggcagggcgtgagctgtgaaaacagatagtgcacacctactagatgctgggcccccgctaggtattttatttcactggagagcaaaacaatatatcatccctgccctcatggcacagatggcctcaagtggctaaaccatagaatggctagctgagagaaatgatagttctttctttttttctttactgattgcgaatggggttgtatttttaattttggtatccatgtgttcattgctagtatatagaaatccaattgatttttttgtttttatgttgtatcttgcatgtttgctaaactcactaattagtcatagaaatttttttttgtttattccccaggattttctgcatagacaattgtatcacttgcaaatagggattgtttcatttcatcttttccaatctgtatgttttttatttctttttgttgcctgattgtgtggccaggacttctagtcctatgttgaacaagagtgctgggagtgcacatccttgccttgttcctagtcttggggaaagcatcagcctgtcaccattaagtgtaaggtcagctgtggatttgttgtagatgccacttgcactttgctggcatggttgtgagtaggactgtgggttttgtgtgtttgtgtgtgtgtgtgatgtttggctgaaatacagtggttattatctacaagttttctgtcttgaaacagggagatttgttggggcattttctctttgtgctccttggcatttctgagttgctggtctcctcagttccaagtctgagctatatgcagaaaaggaaatgcaggaagctcaccactgtgttgttccttggatcctgaggtcccagctggtctgccttcttcagactgccatttggagtcttcttatagtcatctagcatagaatgcccaggggttttcattgttcttagcaggtggaatcagggaaagtgcacctgctccatcctgctgggagtggaaatggttgggggaaattggagcgtataggtcggggctagtttagatgcaagggctccgttctgtaggtgcaggagggccgtggaggctcagccctgacagcagtgggagggggatgggaagagggggagtggagagagcctaggtggctgctgcctgtgtccaggcaggaggtcctgaagtcctgaggtcctggccgtgacagtagaactgcagcagaaagaaggacaggaagttccatgaggacagtgaggaagtgcaaggagaccaggttggtctgaggtttctagctagagcagctagctggttctgagataacagagacagagggaggggtctaagcgtggcagaggggtgtattctaggcattgtagagcagatctggaagactggacttactgtgcttcccctcaggggaggcttcacagaggaagtctggctgctggggaaaaatccagggagtgtgcattctgggcagaggaattctggctgctgggtaaaaatccagggagtgtgcattctgggcagaggaaacaacgtgggaaaaggcacagatacagaaaacggcgtgatgggcctgttgggactccagctagctgaggcataagtgggtagttactggttccatgactgggaaggatgctgtaggagtgcacaaaaggaagaagttctggaatgcgagttgatgctgccagcggtccagttggctccttgccttctgttctttgtgtgttggcatcagacctctctactgcagacaggctgccctgcctgagggggcacagccaccagcagcctcagttttacaatcccagcgaagggggagagcctttctctacatctaggtatcagtttaagggaaaggctctgattggcccaggttggtgatgtgcctgcctttggacccgtcactgttgcaagggagtggagagttctaatctaggccggatcgtctgcccacccctgttggggcaaccagagtcttttaaaggagaaggcagacaaaatgcatctggggaagataaaaaagactgtttaccatggcttactgtaatagattttgaagaatatgtagtctggcagtgcaggaactcttcatggagattaaagcaggggacttgatcaaagttaggttttattaaaatcattctggacactgtatggggttgtgattggaagtgaatgacaagaggtgtcaaggcgggttcgtaggccactgctttagctccaaggagcactgatgaggcctaagctagcttagaatcctgacttactttgtttgcacttcacctgtagcgacagcatcagtgaggtggagaacagggatagagtcctagagatgttagacaggcaagacttggtggccagatggaggcaaggagaagggggtcttatggaggattccccactgccaccaagggcataaagaatgagtctctggagggctagccttatctttggaaacactattaagtgttggcagactcgatgtaccttattgcttcttcagaagtgttagtgttgttggcttcttgtggtatccagctggaaaaggaagctgattgattgcatttccctccctttaaagagcttccttttttgagaaatcagaagataggtgatacagtcaggactgccagtggagaaataggttggggagagggagacactggcttggagactctcctgcccccagcctgccccgaggcccgcgagtctgctttaggcacattcgtccttttggcatcatccttgctgggaaggcttttaagggatttaaggaaagaaatgacacaatctgattcatattgcaccagatttcctcctctgttcagaatagactatgggtggaggtagagtgactccaagagtagcagcagggaagcagggcaccaattaggagactgtcgcagcaatctaggatggggacggtggaggtggtgagaaatggtcacattctgaatacattttgaaggtaagaaccagttttagtgaggattagatgcggagtgggagagaaaggagatgaaaatgactccaaatttttggtctgggcagctggaagaacattgtcttaaactgaggcggacacaacgctgggaggagcacgtcaggggtctgtgttggacatgtttaagtttgagacacccaccatgtcttacacaaagctcccatctacttcttacttgacacaaacagttggatgtactggtcaggagttcagagcaggggtccaggcttggagagaaatctgagcattgttagcatggaggtgatatgtgtgaatccaggagactagttgagatcaccaagggagtgacagagaagagatgaaaacaaggactgaacacgctgacataagaggtggggagatgagggagaataagcaaagataagccagtgaggtgggcggaaaaccaggagagctagagggcatgattaactggtgtcaaagctgcaaggtaaggactgagactttaccaatggatgtagcaaaatgcaagacaggccaaatgcatatgctgttggacctaagcttaactttgcaaataagtcatagttccttcccagaaggagaatataattttgcaaaaagggatcatttaagatttattaaaataaatctgagaaagatgtgaagatagtaccgtaggaatccagcagaaggaaacagtgcttctggcttttgtggggaggattgagtcagattcattcataccttcattcatttgtgtgttcattcatttggcaaaaacttattgggtgccaggggttgcggggaggagggaagagagagttgttatctagtgggtatagagtttcatttttgcagatgaaaagagttctggagatggcttgtggtaatggttgaataagaatatgaatgtacttaataccattgaactgtacacttaaaaatggttaagactgcaaattttatgtgacatgtattttctcacaattaaaaatggagagagattaaataaaaaacagagcactttttggggccccatcatgaacttggtctgggatatgatgtttgaaatggatgcgccatctcagtagatggaggtaatgtggagaagagtggaggaagacgtccagctcagagggttttgggaactatcagtcctgtttgtctggatggtagggtctatcgggggaaaccatgcaagctgagactgcagccgggccagttggtgcaggcccagcatcctggctgtggatttgggcctgccttcttagattctgggagcctctgatggtttctgcccaggggagtgtcattccaaaggtgtgtatttagattaatttcattagtccttcctgttaaaccattgcctattaaaagcagtggggttgaggcattcatttttatggtgaaaattctggcctagcagaattttagatatccaagcatgtgtcaatgaagtgagtaggttatttttccatccattttacaagtatttattgaggatcatctaagtgcccgtagtgttctaggcagttgggggtatgggacggggtgaatttaacaggtctcttctcttaaaaagcctacagtctagagaaaccccctctccttcctaaacaagaagttatgccacaacgtgccatgtgttaccataggcatgccgccacagttccatgggtactgagaggagggggtgcctggcctgcctggaacactggggaggcttacagggaaaaactgtccaatggatttaaaggacaagcagggattttctaggcaaagaagcagaatgggcatcccaggagtatggtaaatcaaaacttattgggtgctatgaatttaaagctaaacttttatttcattggcttttaggtggtgctggctagagtgtatacgtttggacccaagcttaacttttccaatgtggaatcctgggccttcattggtaagtttgtttgatgccttcttaccaaattatgctatcaaggattggtatttggaatgaaaggcaaggtagttatcattggcaagttctctgtggaggttaccagccctggacctggagaagcctgtagcacaggctgaaggggtacataggaaaagtgaaatctcactgtaggtttctgtggtagatgcagagagggaggccagaggaggggaaccaaggggtgcgggggatggatgcagcgggccttatggagaggtggagctttggctctgttttgaagggcaagctagattgaaaaaagtccggggaggagtgaaagaagattttcgggacttgagaacatagaggtgaggtgtaaacaaagtgggcctagcagcagtcccataggagcaaaatcttcatcgaaaggagtcacgggcaagaactgtggtgggatctgctggcgtctgatgattctagtccatcagcaaactttttctgtagaggaccagatgctaaatatttttggcttcgtaggccatgtggtctctgtcacagctactccactctgctgtggtaacatgcaagcagccatagataatatggaaatgaatgggtgtggcagtgttccagtaaaactttatttacagaagcaggtggtgggctggatttggcctgcgggatgtagtttgccaactccttttctagaccctaaatgcccggctaaggcacatagactttatcctgaaggcagtgggaagccattgaagttattttggataaagaagtgaagtggcagaagtgatgtttacattttaggaacattcatctgatagctggacaagaggcatgggccccttttggaaggcagcagcagtcatccaggcatgaggtcttgcggtgaacagtagtgaaaatggaagcaaaggatcaatggaggagatactgcaaagggagaaccaatagcgttttcagtcttcttagacttaagaggcaggagtcaaagaggatgaaagtttaagcttgcttgtttacggtggtatctttgacagaaatgtagatgttgggggtggaaaggatagctgatgcatctggttttagatatgttgaattcaagataacagtggttcatccataagaaatgtccagcagagaattggaaatgcagggctgaagcctggcctgagaagattaagtctagagatgtggaatggaagccataggattaaacacggtctccccaagatgagcagtgggctgagctgtggggaatatgcgtaactgtgggacgggaagacgatggaagagacccagaggccatggaggagagtcccgggaagggaagagaatggggcagcagagaccagggagaacggacctgaagggaggctgctgaatttgtgacaaggtctttgcagatggccttgagaaatgtaatgtcacaagaggggaagggaagaggaagccaggttacatggagttggacataaatgaaggataaagaattgagatgttacaaaaatagaccgctcatagaaggtttgggtagtaaaagaagggagacacataagatttagatacttgcttgtcagaataacctttgctttagctttgaggcaggcaaagcatgctgtgaccagttttcatttccttctttggagccaagctgtgtttgggagtttgtgtgtaccttgggcttgtgattgtgttcttatgctcccttttgaggtgtggtgttcgtaactctgccacaacttgcaccacggaatccagcccgtgtttggacccttgccatgagacaagatgtgatctgttggggaagtagttgcatttgtataagttggaggagaaagtagagtggaccaaaaattgaaataaaccttcttactacagagtctatccaagtatggggacttgaggataattcctccagtcatgatttaattatgtatcaatttgtgctctgagtattttgagtgtaccttctttggtttgaattctaagtagtttttgacttggtttgtgtgaatatagcagttagagagctggtaacaaaagcaacagttgtaactggtttagagccatgatttattgaacactcattatgtactaagtccagtgctaagtgctattgtgtatcatcccatttcatctttgcaatgacctatgtggggggaattattaatagtattcttatttcagccagaaataagtcatagatgagtaactatgcaaggttacaagggatttgaacccgggtctgtataatccctggcttatgctgcttcctactttatcttgcctgtgtctggaatttttcctcctactaatgtagaaggactagagatagatcgagtccctcaggttaaatattcagaggctgtagtgggtgtttccacttcttaggagtctattgaaagggcagaagaagtgtgggaagtctggaagagactaaggccaaacctcaaacacttactttaactgtttccccagataaaatttagttgaaggcagcagccttgggcttggaaagaaaatagcgctagaaggcatgagagtcagattccagtcctagcattatgacaattataatgtcatttttgtttaaactcttggcatttctctccaattacctccagctttgagctccaaaggcaggctcctattttgtcttgtttttcactgtatccccagcatcgtagcacagaatctggcatgtagtatgttatgtactcactaattatttattgcttcgaatgcaccaagggacttggtacaagacacttagcctctcaggcactgctcttggcatcatggttatagaggtgaaacaggacaaggtctctgctgtcgtgaagcagacgtctacatgtgtgagatgtagaatgtgacgtcaggtatgatcatgctctgaaataaaagacagtgagaccggggtggagagggaagggcctgtccaagaagtgagacagtgagctcgttgggggtaaaatccataaaattcctcttggggtgactacagattgtcagctgcgctgtcagcaccttgttttaattgttttacttggctgccattgccaatgcccagctgactgctccctgcagcgagaactcccacctcaggcctcgctttcttcagctctgctgagcgtgcctctcctgggtcggctcccggttctcctccagctgctgagattccagcctccacagcctgctctgctggttctctgttctttgtccttagcttctggtttggcttggtccctttcacgtcatccttaacgtcctccctgggtgagctcatccaccactcacctctgtcttgaagacacccggatctccatatccggtctgaacctcctcccagtccacactcctagtggtctgccccgagggcacctcaacctgtctgtcccctcctgagtgccacatgcgtctttctccctgtgctgcctgcttggtccacgcccctcagttgcttctgcttcatgagtcgtcctggccttgtcttttccctcatattcccttggttaccacatcctgaagagctcatcttctaatttgtcaactcagttcttctctgtctctccactcctgtgtttaggattcatcattttgttctatgacagcctcttaattggtcatcctgtgttcatctttttcctccctcattccactgcccacattcctatcaacgtgatctttctaacacatgtctgatcagagctttcttttgcttaaagctctccaagagctcctcattgcttagaaaataaaagctaacccccttcagcggggcctgcagtcttctcatcatctggcccttggccccctgcagcttttgctcccccacccccaccccactttgggttttcctttttccctaactcacatttctaacctcagcctagctaccaacagccatcacctcctagtgcctttgcaatgctgggccctctcctgggaatggcgtggtctctgttcaccctcttgggaactcaactccagtttcccccaaatcttcaggacaccatccttccctacccagcacctctccatgacctggaaatgaccttcctcctggctcccagaacaccctcatgtctctcttgcaaagcacttatcggtgttactgttgatttacttacctgttatgctcagcaacctgagctccttaagggtggagaccacacacacacacacacacacacacacacacacacacacacactctgtctctctctctctgttccaagtgccagcatagtttacctggctcaggaagtttttgttgtaagagtgaggagtggtctgtttgtgcagccaagcaacagattcataatgtgataaaatgtacctgaaatgggaggttcattggccattgggtttattggggtgctcttcttgtcagctttgagtgcaggacaggttgtgttgggcttgagtttgtgacgcctgttgtgtctcccagcatgctgagacctcaggaatgtctcttctctatattctttgcccctgactttttatttttttagctcttgtttttgatggaccgataatagcaattcaaaatgaaaaataatccatcaaggaattctcaggaatgaggtccacccaccttggtcctggatgaatcccaaatttcctaaataagccagaatatctattcttgcgaactactgtctgacagcctttttcccccttaatccagctgagaatgcttttcttgaagggtaaggatacctagtggcccttcatgggggtgcctgagggcctctttgtcttcattttaaaccttgtaaagtccccagtgaatactgaggagtctaacaaataggaagaagctctgaccccaggggtcccaagtcagcatctgtactttgcatgggagctagcacaatgcacctagccaatagcatataaactctcctgttttcattcagtgccttaagcttgttgcttgttgtgtcttcttcacttcctatctctgccagagacctgagaagttgtgccaagagtgcagcttttatttggggcctcacagtaatctaggaaagcttttcagaagagagccattctcagcaccgaggtgtcctgcagaccaggacactccagcaggctcttggaactgctttcctgggatggaaatgcttgtgatgctgcctccccttgtagggactttccatatgctgttccctcagcctggaatgcatttttctcctggtttgcctagctcatgcctgttcaccctttggaactcagctgattggcctgcctcctcctcagaagcctccccaacctccctgataagaaggctaggtcttgtcctcaccattcccatgccagcatctagcgcttatggactgctcaccttgtgtcaagtactgttagaatgcttcatgcgtagctactttgtattaggggcttggtagatgttggctgaggtaagtgtcatcattgtcccaaagacactgtgtgaggaaactgaggcctcgacccattgagtaggtgacagagcaggagtttatcccagatgctggactgtgggtttacgctctgacccttctatacgccaccgttccctctgctccaagtccttgcagtctgtccttttccagcacttgtcatggaggtcatgacctcggtttgtgtggttatttgattaatgaatgtttgttccctcactgggcagcccttttgagccccaggatggcaggagtacctaggactctaggcaggtgcgcagcctggagttgaccgagagcatgtgggactgcccacttgcccacagctgcttcttgccttttgcatcacaggagggtgggctaggaccataaaagagccagcccaggcctccccctttctggagctcactgagtgcgtgcatggggtttggccgtcaccctcacttccatggttctgcatcagaaccagctgtgctgaggaaacatctgtgccttgttaaggtctgttccttctgcccactccctttgcccttttctctaccttacaacccctttgttgtccttcttcaaggaaaggggccccctttgtctctcagggcagagccagctgcccttctcctggtcctcttgatctgcacacactctgaggatgactgcccatggcaggtcatgatggtccgtctgccctggactgtggtttctgtggcagagcaatactttgtacagtcagggcccatggccctacggaaggctgagggagagcctgaggtcattgccttaagagaagctgcttcatggtgcagttggtatgtgtgcatgtgtgtgtggatgtgtgcttttttcatgcatgatgtttttatttgtgttatttatccccctgctatatctccctctctcaggggtctaacatggagctttgaatagtagatacatcatagctcttggctaaatacatattttctcccccgctgatctgaaggcacctcccttttcccctacccctcactttggtaccttggtgacttcacagggttgttatgacttcccagacctcattgagattgcagtgatgtgaaaaccctacctagattccagccagctgggcaggggccttggcagcaggggaagcccagttccctagggcaactcaccaggcctccagggctctctagggccaggctggctgagcttcaactgactcatactgtttttgactgggaaaaataaaaattttaaaatggcttctgaccaaatggggaaagtggatgtgggaggaggagaagggggacgttagccacaccctaggtacatttgccagcagcaaactgagatgggcttaaagtgtggctggcctctaagacgcctgcttcaaagggcattcggcacactggtctcaggctttggaggcccacctgcttcagaacatcagctccctgtctgtctagcgttgtgacttaagacaaacccaccaagctcccttagcctccattttctcatctgtaaaatgggattgtaatcattagaataacctttataaggttcttgtgagagtggaatgaagatgtgcttagcaccgtgactggcgtgtagaaagcaccaaatatttattatctgttaacattgtttttgtttgtcaaagtattattgttaataataattataagaagactttggaacagatataaagtctaaaatgcaggctgtgatgaaagggagatggtatataagaaaagtgctttttgaattgcacattatgtccagatattattattagcacaagtatgtttattattgttttgtctttgaaaaaaatgctggagcacaattttatgatgttgagtctatgtcctttgttgttttgttttttgttttggaaaaaggtttgtcacattggcctttattggaatcttgtccagtggatgtatgacccacattggtgaccctgggtgccaaatgcctggacagcacctggcaaagaagagccattatttcaatggtcactattgtttaaaatcgttatggtaaacaatacctgacagaagttcttagaggttcattgacagtaaattgtgggcaatgcactgagttattatttactctagacctgagaaattctccctctccaagttttgtgccttgtatagctaaataaatataaacaatttccttagaatttgatacaaacagctaccattgtcttcacaagtatgttagaaatactttcttaatagcaactacttgactgttttgttttttatctccattccctgccattactctgcctcttcccatctttctgaaataaaagtgagccaaattagccatttaaaaaatacgtagatactttcaggcagaggttgaaaactgtctaccccctggctgcatctggcttgcagatgtgttttgttcagcactcatagtgttttaagatgtttaaattagtggccaacatttaaaaatgggtagatttttgaatcaaaatccagatttccagctcttcataaaaaatcaaaggtctagtgggcctgggcccgtcttccttgtggcagtgcggaagagtggtggtccctcccctgggagcttgtttctccagcctgcctccggctggcccagcctcactgtacctttccatggcctgcttggcccctgtaggaatagagtttgtagtctctgcttaatataactaataccccttagatactgtgtatcagtttagaattatttccactagcaactgtgaccataggtaggaaggatattttacttgctaagttgtcattcttatgatagcccaaatggctataatagtattttaggctcttttggatttaatagaattaccttctctcctctctgtgggatttcctcattaacaatttttaaaaagtgttcagcaaggcttatatagcaacataaaattttaaataatgcaggatataaatttctatagctgctattgaaggggggttgcaatcaagtgaactgctttaattcaacaatttatggtgttgtaaatttgaaaaataaaagacacttagttttttttttttttttttttttttttcagaataaaataattaaatagttgacctttggcagagtctttgttgaaataggcaagggttttgagcttctcagaacttgagaccattgccttctggagtctttcctcagatgagtctgtgcctccttctagctagtgcactctgagcactgtggccacatctggagggtggagaggagacttagcttccaatggtggtcactctaggggaggggggcccttgcaaataccaaaatttttttaaattattattttatgagcttttaaaaacttttttgtttttgtcatcacaaaagtaataaacacttgtgataaattcagacaacactgaagtgctttaacataagcaacaaaatcttctgtgacctcccccaaccttttccaaccattccccaaacataagcacttttgagagtttgcttcttatactcctggacttttgcatttgcttgtttctctccacccctaccctttgccctcaaccacgacatagatactttcccttttgttttctaaagatagactgtccctgtgcatggtgttctgcaactttctttttacagctgtcaattattatggttatttttccaagtccatatgtacagataaatgtacttgttacttttaaaagttgtactccatgttatggttgtatgttaagtaaatttcgttttgtattgatagacactcaggttgtttctgaccttttgccattgcagtcattgctgctgtggaaatttttgtgcacacgtgtgaacttttgcctgagattttctttggtatagatacatagaagtaggacttttggtttaaatggtttgctgtttaaaatttgaatccataatgccaaattaccctccaaaaaggctgtaccaattcatgctcttcctaggagcatcccattatggctttgctaatctagtttttgcttacacatgtgtaagaaagtaaatcttaaaagcctcacaaataatgccatcaaaattacacgtttatcttagaaaagcattcagaatatatgtctgtagatttaattatatgatttttatatcttgactttgatggtggttatcatcctgcaaggtgacaaaaagttccctaaatactgtacacaattattaaataattattaaggatatcagttgtgccaggtagcctttggaagaattacagccaaatcacagcttccttttccacagctctgccaggctggcttgtctttcccaccaagggctgagccattaatactgaggctgggtcagcatttgaaggggccctgccagggagtgccaggccttgggccccagagacctggggagtgggagatggcaagtgactgctgtgaggctgagacaaagtttttgcctacaacaccccatggctgtttcctttactgagctagatgaggaaagcaaagggaagtgatggtccaagacttctggtggtcacttttgttcatagatttctcacaggagtgctaacatttaggctcatgtttacgaaggtttgaaaccttagcatttgggaaggatctgcaaattctcagccaggggccttaactgatcacaggtagttgtgaactcttggtccaggctgtatctcaaggcttcttcttagaaggacaggtcagcttaccacctgctaactgcatgtgaaattttgaattctgccttctctagctctcctctctggctctgagctggtatctggcatttgcaaacagtttaccctttgttgacttcttagcactaacctcacttttatgagtctgagtagacttgatacccaggccatttatcctttgagggtgccctcagcttcatcagacccatgctgggcagtctggcatagtggtaagaggcacttggagccagacagacctgggttcaaatcctgacatcatcacatttactaacagtgtgaccctttggctgatgacctcacctctttgagcatcagtgtctccttctacaaagtagggacagtaattctttcccaggggtattttgaaggatatacgaattaatatttgtcaggtgcctctcagatgttcagcacaaaataaacagtgtataaatatgagtcctctcttatcttcctgctgtagagagaaagttcgttggggatgctccaagttggtggctactggctgaggatcctggagtaagaggaaggctaccatgtaaacccagagatgaatcatgaacaatgtgtattctcaggagcttagtatttgatatgggagcctaacaagcaaatagtgtgtccagtaataggaactgattaatagaggaaagattaattaaccttctaggtgggtggggtggaaaagtaggtggggtattgaaggttcaacaggagttcgacagagaagatagaccataaataataaatatacggctgtatccactagagataaagttacattgttttttatgtacatgttgacttcttttggccttgccaatgcactgatatattcaaattcagctcctctctttttctcttcccttttcccttcactctgcctttcctccagccctgccttgaaatactcagccactgaaaatttcttaaagaatttctttatactttagtaagtcctcagaggataccagttcaccctactgagattttacaagaactttggtgtagctggggttttttttgcattcctttttctacggtagatataagttcttttgggttgcccatcaatgaacaaactaccaaccatttgatgtttactgcgtgactcctgtataccaagcacatgtgccatttcacttagtccccagaatgtcagagcagctttgtgaaatgggctgcccgttctttcttatggatgaagaaactgaggcttaggtaggttaatatactgaatattatacatgtagtgagtgggaaagccacagttcacctccagggtctttttctccctctttgctgccttgcttggggtcctgctcatagtaggtggacagcagatgtttgtctgaacatatgagaacactgcctgccacgtgccggtcagtttgatttgtgctgctggttttgtaacccacatggggcaatgacagctgctcaggtactttcctacctattagtggggccccagggtcacacatcagtcataattgacaaaaaacacaatttccctttcctctcaacttttatttctaaggtacttgtaagcaggtagattagattgttaacttttcattttttgctttgtctctctcctttaaagactatgtgaaagaatacacagtgccctgagagcctggcctgggaatcagaaacttagattccagcttcggttctgctggtaactcctcagtcattatgggtaaataatattccctctccagaactactagattgtgtccttggtgcagtctggggttcgggtggtcctagggaccctgcctactgcatgaacctgttatcaccatgtgaggctggaaggatctcagcgttggtgttgggcaggcctgagtgagcatcctggctcctgtacttcccagctctgtgacctcgggctaatcacctgactccctgatgcttgttcttgtctacgaaggagggctaagaggacctgcttcccaggatcactgtccagattgaatgagaaggaacgtcggcttccttccttctgtctccaactcctgagtgcactggttttagactaactgggtgtttctgcagttgaaaccaaaacaccttcattaggtacaatgttcattatacctcgcaacaccctgagatactcaactcttagatttcttgaagctcttttttgttaagaaactcctcaaaggaagatactcttctaccccattgagctttattagtgcttcaatgacagcaccttattttttcacttttttcccccttgcagacagaagctgcagtgtgaatcagtttgcatttatataatttcttttgcatttctttgcaaagaggaaaactccattcatttagcaaatgtccgtcatgcccaggccttatgttaggtgaagggatttggagagaaatagagtcactgacctcaagaagcttacagggaggaaaggtgtaaatacataaagtgacacatgggtttgtcctgtcaccaaggtatgcagtagatgctgtgggagaagagaggatgacacaggttctctcttggaagacctcatagagaagaggtgacttgtgagcaagtctttttttttttttttttttttttttttttgagagagggtcttgctctgtcacccaggctggagtgcagtggcatgatcctagctcactgcaactttgaaatcttgggcttcaagggatcttcctgcttcagcctcccaagtagctggaactacaggtatgtgccacttgcctgtctgatttttttttttttaattttttgtagagacagcgtctagccatgttgcccaggctgatcttgaactcctggcctccagtgatcctcccaccttggcctcctaaagtgctgggattatagacatgagccactgcacccagccgttgtgagcaagtcttaaaagatgagtaggaaggagtctgtcagctgtagaagtaggaagggcccaggcagaaggagcacagggcagaggctagagccctggtaggaggtgacacactgggtgcatgtctggagctggagccaagaggtggaggacctaagtggctacatcttggcagtcacccatatattggcaagccccaaatctttgtaaccagcccagattgtcttcctgagcccccaactcccatacccactgcccattcagcagctagctgcatgttgaagtgtagtggtcttcccagacctaacataactaaacagaagtcttgatttgttccttcaaaaacaaacaaaaaactagccttgctcctcctcagtcttccccatgttatgaggtccccatcatttttacctggctacccaggcctaaaatgtgggcatcatctttgattctgcttcctcctgtgttcttcacatcatctgtttgcaattctttttttgtttgttttactggttttaaaaattatttatttattgagactgagtcttgctttgtcatccaggctggagtgcaatggtatcatcttggctcactgcaacctccgcctcccgggtttgagaaattctcgtgcctcagcctcccgagtagctgggattacagtcgtgcgctaccactcctggctaatttttgtattttcagtagagatggggtatcaccatgttggccaggctggtctcaaactcctgacctcaagtgatccacccgccttggcctcccaaagtgctgggattataggcatgagccactgcacctggccaatttatttatttttaattaacacataataattgtacatatttatggggtacatagtgatgtttcaatacatataatctgtagtaaccagatcagaataattaacatatctgtcatttcaaacattgcagttcttgacaactcttactgtatgtcctggaagccaccactgctccttattattagtttgtttctttatcaaccaagcaggccagaccactgctctaccctcgttcaaacctccactgtctttcagcaggtctcttgtcagtttgctacataggcaaagaggtcttttaaaaagcaaatttgtgtcatttccctgctctaaactctccagcggctttctggcatctttggaatggaatctaaacatctcgccttggcctgccagcccctcctgctcatcttctctggtctcatcccttggcactctctgctcactccatttcagctgccgcatcttttcttactgttccccctgttgtctcatgggctttgcacttgctgtcctccgcctgagctgctcttccccagacaccgcctgtctcaccttcactccacgctggcctctattcaagtgttctcccacctgtctgaaaaagcaccgttctgccccctctccccgctgcttcaaccattctgtcctacctcgctttggtttctctcattagcactcatcactctctgactttatatgatatgtttgtttgtcttcttatttagtgtttgtcttaccccacaagaatataaatccatgaagatgggacctggtcttatctattgcattcagcactctagggcctaaaacagagcctggcacacagtgggtgatcctgaaacacgaggtgggtggatggacaaatgactgagttaatgcatgcctgcatgcaagcgaagactttggagtttatttcataggcagtgcaaatctagtagacatctttcaggaggtgagtgacgtggtcagcacttttattttagaaagccagctggtggcagtgtgggggctggactgtaggagggaggcagcagaattactttagcggctgtgaaaatcgtccaggaaattgatgctgagtgttgtgctagagctgtggggatggagaagaggggacagatgacaggacctgaagatctttgagtgtctttgatttctattgggataacttggtatagtgattcctttataagaaaagcaggaggggacgaactggtccagggagagactgttgacactctgtggtgtttttctcaccaagaaaacctaagccctgggatgcatgttctctgtagtggcattggctctctggggagtgactctgctgctccgcagcctcccctgttccattttttaataagagaatagtcaagatggtggtgtcagtgagtgggagtcttcttcatgcagatggatccattgatctttgcatactccaagccacactaagtcattggttcttttctcgcagtgggtacatttcaccttatttgattctgatctgacaaatgctgctttttttcttttctttttttttctttttttttgtttaaagaatacctagactgtgctcaagttccaggtggggtttacagataactggggttccagcatctcccttcttacaaacacgaacaggagcctttgccgtccttgggtctcagggaggcagaccggcagcaggcacacattcctggcccaggcgtagccatgctgtctggtgctgccttttgagaccttttgtgtgtgtgtgtgtgtgtgtgtgtgtgtgtgtgtgtgggcttgaatgattccttctttcaaaaattcaaccctctccaaattttgatgaaaaccttttcatctctgagtaagcacattatttcccatcttgatgaggtgtgtcccctctgtgtccctgagagtatgtcatcccagccttttaaattttattgtatttttttattttttattttttcatactagtcaagtgcagtagtgagaagcggggaaagagtagaacaaggggccgggggcggtggctcacatctgtaatcccagcactgtgggaggctgaggtgggtggatcatgaggtcaggagattgataccatcctggccaacatgatgaaaccctgtgtctactaaaaatacaaaaattagctgggtgtggtggcacacgcctgtagtcccagctactcgggaggctgaggcaggagaattgtttgaacccgggaggcagaggttgcagttgagccgatatcatgccaccgcactccagcctggcaacagagcaagactctgtctaaaaaaaaaaaaaagagtagaacaaggagtttgatctgttacagactgaactatcaatggagataactcactaccttcggaccagcctcatcccagtcttttaagcctggtccagaattcctaatcctgcttgtcaggcccttcaaagtgaaatgctgtaccatctgtatagctggattctcacctcctacctctcctctcccttccaaaggttccgatgtcataggaatctacgctagagggcttcctgtgtgccgggcactgtggtaagcacttcacatgcattctctctaatccttaccacttcggggatgtaaggattataatcttctttttacagatgaggaagctgaagcttgccactgcttagtagttaagagtatgggcttacagccaaacagaccctggattgattctcaactagctggggaccttgggcatgctacttaatttttttaacctttttcacatttagaagataaagataatatatagagagataatatagaagattatataggtattatatatatatatatcttctatattatgaagataatacagagttgtgataaaaattaaatgaaatgaccagacatagtggctcactgttgttttgttttgttttgtttttttgagacagagtctcgctctgtcgcccaggctggagtgcagtggtgcgatctcggctcactgcaagctctgcttcccgggttcacgccagtctcctgcctcagcctcccgagtagctgggactacaggcgcccgccaccacgcccggctaattttgttgtatttttagtagagacggggtttcaccgtgttagccaggatggtctcgatctcctgacctcgtgatccacccccctcagcctcccaaagtgctgggattacaggtgtgagccactgcgcccagcccatagcggttcactcatgtaatcccagcactttgagaggctgaggtgggaggtcacttgaggccaggaattcaaggccagcctgggcaacatagcaagaccacttctcttttatgaaaaaaaaaaattaagaaaaataaaaattaaatgaaataacatgtaatttcctaagtacattaagtacgtgcctactatgcgccggacattgtgctgtcagcaaataatagctcatcgcagatgctgttatcatcatcatcatcccaaagccacagattgagtctgtaggtgaggccctgcctggctccaaagattgtgtttttttctcctgttgctcccaagttcacctgtcccaaactttctagcccctaagtttgcttccttgcgcttttctggttgtgccatttgtccctgtctgggcagtgggctcaagctaaggcacagcagttttccagtccctttgagctactgacctcttttctgtcattgactgaacagtttccggtggctgaatcgtctgtgtaagagcttggacaattttttctgattgttaccatcatcgtgtttactgtgaaagggcttcctgtatagttgtttgtgttagcagcattgtctaaatgaaacaagagtggcaacagaaagggttggtgagcagtcctagtcttttggggtcacagatcactttgtgagtctgaagaaatttatagactctctcaaaaaaataaacgacaagacaaatacaagcccagcatttttcatgagacgttttccctgaagttgatctggaaggctatgtgctcttttgtcattgtgctactccacattcacagccatgaagggtgtcatgtttctgcagggtgtttgtatttaagggttgttgggcaatttggcaacactatacctgtttcattgatactatgtgctatttgcatttatttcccatatctgagatacgtattcacacatgagaactggcctggccattttgatgagatgtacctgctgatttgcacataaacacaagccatggcctgcatctagaggatcgactggagaggcttttttttggcccaaaacatcagactagtaggaattttattatgagttatagactaaaaggggggataaacttagcttcagcagggtttaatattctcaattcaggtaagtgtaaatctctacttttcattttaaacatttttgaaatttcagtctttaaaaaaatgcttgttttttttccttccaagttttaaggtatgggtttgggagaaggcagattccaaacactttaactcttcgacctcagacttgcttatgagcctctctttggaacatttccagtgaaccgtggagcaagcctgccacatccagcagccgtaggcatgatgatcactggtgccgatggcccctccactccctgcctggcttttgaggccccgcagaaagaaaggaacagaatcctttcataaggaaggccccagaatcctttctcctgctgtagctatgctgccagtgtcctctgtagatggaaatggaacttggattttgggtgccagaactgaattcatcacagataagattagttgatataaagctgtttctgatgagcagtttttcctccagagttttcatttttgctttttctaaattatacaaaataatagacactcattacaaagggaggatcataatgctccatacctggttttgaattccacttctatcacttattagatgcagccctgggcaaaacacacgccctctctgagccttgatttttctcattgaatgggagatctaattattttacctcataatactgctgtagggattgaaggagattggtataaataatggttttctgagagtctggtgtgtatttgctttttttcagttaatatgaattgagtacctactaagagctggtcactgttctagttgatatggaaccagtcaagagcaagacagagagggtctccgctctcatggtgctcacattctaatcagaggaggcacaagaacacaagatcacttcagttattaagaaattagaacccaggggtagcatgagagtcacaggaaggacccctttacgtcggatggccagcagaaccctccctgaagagctcaatgctttgtgacccccccggtcccaagttttccaggactcctacttttaaaaacactgcccctccaagtatataggtctcaattttgagtttggaaaatctgaccacatattagttctcttgttcattaatgggcttcccatttagagagtgagttcctggggcaggagccatgtcacaggaccttttgaaggtctcagggccaatatggacgacacttctcttgaacactcacccagttgggctgacatgaaaacctcatggtgggaggtggggggtgattagtttccagccagagcccattttgctccattgctgctttgaacattctggtttctaaggagctggaagtagtttctctcagcgagaatgtggcacactgtcatctcctgattctctgcatgcagttcttcaatggcttgttgaggctgcgtggaagcccagaggtcggggcagttccaactcacacactggcatttgaacggcagagcagtaagccctacacctgacataactgcattgccttcttggggtacggtacggatttttaaatgaccatttcagcctgctgggctgggcaacggtgatccaaactgatgagtcaggaagccactgaacagaaaggcaggctgcatctgactcacctgtcatgtcgatagttgacctccttttgtttgaccttgatttgctcagtgcaattaaagatgctgttgtgagtgcacttctgctacctgatttaaataaagtctaacatgtgacagctcagggtcttaaatgcacacacgacttaggcagacggacagatgggtgagtggttagcctttcacttacctctgaattgtaattctatcacaaggaaagggcttaatttcaggaacacggagtaattatttgagactagatacaatgccaaagcagcaggccttgattccttgctacagggcagcttaatcaggaaatggcctagatggccgcctttcaagtaggtccttgcagtagcttggcaacaggcacagggtcataattggaagaatttggctgtgagtgtctgtgggtgtttacagtgcactatagggcagggcttctcttatttatagaatattttgagcaacaagcagcagaaggctgaaaagccactaaaatctcgatttatttttaacaaattccatttttctcctcatcccagaaggagaactgagttattaaaaaacagttaaaaaatacatcattgcagagcatgccatatctaattatggggttgccagcatcggcctgcagccacatttcaagggcttcgtaaatcaaccatccattcaatctgtgaacttatatgactcctgttctccatttagatgtagagcgaaattattggcaagtgggtgctgatcagaaaaagttcttccctgtctaaattaggagatgggagggataaatatagaatagtatacttatgttctcaaaaggagataaaatcattcttcattgtccattatacttagctgcacaaacatccatcccattgcactaaatagccactttagagttttcacacattgcaatggcagttctgtgccactcaaaggcgcagtattgtgatatctcgctgagcctaaacctgagtgattattgctcacgtagtcatgaagagacataaacccagtgcttttttgcctgtgttgtcgtagtgtactagagctacaaggtgggccttcagagagacactagttttaagtatatctcattgtaggtggggaagcagaggcctaggcaagggagtgacttgcctagggtcccattaagagtcatggcagaggtgggctggggcggcagtctctgtgcttctcttgacagtgccctgctgtgctcactggagctactgtattaaacagatacccttcaggggttcacagtcttagaagacacaggcacgaagatggccaaacaatcagcccatgcataagcagaccaagatatgtgtatataacagattagttgagtggtagagaaaatgagagtggggaattttggaatctatttggatagcaaagcaaaggtaacatcagttgctctctgacccacttgggaaaagcttatagagatgctatgaagttttctaatggaaaaaggtgcagtacatttgccatgtgttagtgggaaggtaagtatgatgcagtggtgggtggtaggaggcagtgaagataagtattgcaactttggaggagccctgggaatggattgttgaggtgatttcataggaatacgaaagggagcataggaccagggcacaggccagagacaggcaatcccaagttccctggagtaccctgcccttttctgggaaagcaagtgggtggcatgagtgctatgttcccaatgctctggccccacccctggtagaagaataataactgatcatggtgggttttttctgagcctctgtatctttgagtagcattctggtagccaatatcagtggactggtgccagcctgtgtggtgaacctctatctctttcttgccctgggctgcatgtcaggcacagtgcctaagccggagtgggctttggggagttacttctctttctgaggctggaaggggcagagggacgtagggaaaactttgctagggagggcaaactgtgaaagcctctggagaagtcacctgttgggataccaaaggccagcggttttagaggatgcgaagaggccgggcggggttggtctgggcctaaactaaggctgtagcggctagcatggagaggaacaagcgacggggagtgattacggatgaggaagacgtactaggatttggctacagacagacaaccaaccagagagtaaaagacagtgacatgctaggatgtgaaccacctactacagagaaggtcagaggtggggagggaggaatcagggctgtgggcagatccagcagctgggatccaaagctgaagcccttgggttattgaatccattctttctgagaagagatggttgatcttcctgcccagggagttcctagccagactggacagtggttctcaaacatggtgccaggtgttgtcagatagcaaacaattagtttgtacacagaatgtccccaaggtcacctacacatatttgtttttcctaatctttgatacctacagccacttacctgctttcgagttctcagagttgagaacatataaatttgcagtaacaagtgcacaggaaatacttggaaaatggctgatgagctttagtttggaaatttcatttttttcttggatctggattataatttcagtacaagctagcaatttttcttgttggtaaaatagtttctagttttaaaattatttctgtagttaataaagttaacactatttcatgatggaggctgccccagctctgaaccaattttcaaaaggcagattctcctctttctctctcttatttcttgctcttgaacatttcactgtgttctagcaacttttcctgtgtgtgactcggccaggagactgacttgagtaagatccaggtcaaggggttgtgtgggtgggtcggtggtaaggaggtgctgaagaacactaaaacctttgcctgagaggagtctgggaagtagcctgcgaactggaatgaccccaggcttcctgtcacggtcatagcccatggagttggcagacttgatcactctatattgtgtgcccccaggtaatggcattagtcatcgatactgtcttttttttttttttttctttgagagagagagtctcagtctgtcgcccaggctggagtgcagtggcgtgatctcagctcattgcagcctctgcctgctgggttcaagtgattctcctgcctcagtctcccaagtagctgggattacaggtacatgccaccacacccagctaatttttggatttttagtagagacggggttttgccatgttggccaggctggtctcgaactcctgacctcgggtgatctgctcacctcggcctcccaaagtgctgggattacaggcgtgatccactgcgcccggccaatactgtctttaaatcgtccagagtaagaaaatgttgatagcttgttgtcacagccctgtcattttacacattccctgaattattgtctggcaccagcaggtgttccagaaacacttttggttctttgagccattactggtcattcctgtcaccactgccaccaccagatgtggttctgagagcattaagtaaaagttttgaaggttgtgtatgttaagactggtgcaaagtccatcctccttccttcgggctgatcagccacaccctggctatcagcacttatttactcattttcaaagtgacagaatggtccagtgggcaggggcataaggggtcacttcctctaaccacccgccagtgcaggaggatcccatctgcgcagtggctgcccatgacaggcagttccctagccccagtcggacatctccgcaccaggcatcctgctcctgctttatggacatctttggctcttaaaaatcctcctttattctgaccgcagatctgccttttggcagtgtttccttagtgacctagttctgctttttgtggcaacacagaacaaaggtcggtaggcatggcacaattccagcttagaagtttgaaggtagtgctcatggacccacatcctttccctctccacccactctatctccctccacaaggtttatgttctccagtgccttcagccattctttctatggcatggcagtcagtattaatcccagtaaaggtaacatgtatccagagagtgcttgccatgggccaggcactgttctaagctccgtacgtgaattgtcttatttatgactcaaaatcaccatatgaggtgagccctgtcatcatcctcattttaccaatgaggcaactaaggaacgagggctcacatcttgtcccgagccatgcagtcaagcagcagagcagagatttggggctaggcagtgtgactccagagcccgtgctcttagttgtggtgcaagactatcttacagcctttcctgcatagtgccaaaaataagcccatggtgcactagacttgggctggccctgctttaacttattttgcaagaaatcattagacaggagccttagttgaaccattttctgtgaaaccttcagagtttgttttgacagaacagactgcagggcagaggcatctgcactgtccccaacaaatgggttcatcctgtagctctgccaggccccacagggttcataaaatggtagctttagatcaaggtgacaaatacagggctcttgatgttttttttttttttcctgaacatggtgcctgagcaataggtttcttgtttaaagtgcttagtcatggttttatggccagaaagtagaaggagagaggtacctaagaattgcaaaactgggtcatctcttcaagtgcctaatccaatattcagtctcagagaacaactccagcagttacgggggtggaaggatgtgatgaccacctaccatccaaaactgggatgtaggtgccaaatacacattctcctgaaatgatccctggtgcctctagccaggctcttccaggagtctagagaaagatggcccatgacttcatccagagtctttgcttcctgtgctctgggatgcctgggcttttctggccacagccatacactgacagggccagaagggctgagatgctgggattgaaccatctttctctttgtgagttgctttccagatagcacgcattccggtcactattttccagagatttaagcagcaaagtgagggaccctcgggcatcgactcagagacctggaggggagcagcttgaagcaatgtaaaaagcactggataaaatctggttctaccaaaaatagggctatgagagttacctcacctccctgaaaggtaatatctttatctgaaaaatggggatgataatactactaacctggaagattgacaggaggattagatgagattctgcatggacataacagtccttggcatgatgtctagcagtgaagaaacataaatatgagaataataacttccttcttcctccgctgtctattccttctcttattctagtcctgtctgctgttgggttttgtctgttgttttgggtaaatagctaacctctctgcctctttttgtctgtagaaatgctactggttctgaatgggtacttcgcgccccctataggacatcgtgggaatgtgtgtgggtgatctggatgtcacagtgacccagacgaggcttttactgggggaagaggggaaggcaggggtgctagatataatgcttggggaacaaaagattgcccaacatctgcatagctgcctaatgctcagtgcattcttgtgggcaaaaccctgcttaaaattatctgggcctagagtctgactccaattaacacataaacacaaataatttttgcatgtttttaatatatactgaattttctgcgaacacagctaccaagtatataagatttacctatttgttatgaataggtgcaagcatttcatatatctttcatgatgttttctggtgtagcggtgccccaatacttacatattgatttacatgttgtcttatttttaactatatttcctttcttctttgtattacagttagggcattatattgattatttttggaattataagtgttgtaaggttatattacttacagatttcaagagagctaaagacatatttaaaatatttttattgcatttttgacaatatgaaagagcaagagagagagagtgtgtgtgcgtgcatgcatgcacatgcttacaaattagctagaaaaatcctaagacagactttaaatgaaaagaaatggtttcatagctcctagaaatgtccttttacataaggatatgtagtagaagtccaaatttttaactgcattcattgtcagagaaatgaggtgttttgatgtttcccctgtcccttttagaaagtatatgatcctaaaagagcctgaaacagtttccattgtcatattttttcatttttgcaatctctatttttttcactcctcccacctgtgcatatatatatttaaaagcgtccccatatagacttttaaagaaagaaaagccagccaggctccccactctttactaagtttgttttgattgttttgtggcctctgcctgcacctcggcctgagtcagactgactctgggagctgtgggcaggtccaagggaaagtcaaggaggtaatgaggcttctcgtgggggcaacttgtaggccaagttgggtgggttgaagtcagtctaccagaagcttcctgcctcaagcctgggcctctacctgtcctgaaacctgagggctctccagttggaccacgagggtctgacatccaggaggatccccaggagagagcaaccgtcactagggaatatgctgcccagcactgactgtactgagcagcagtgttgtgtgcctgttgggttgatgccatggatagccaggcgttcagaactgaacacgacacctaaaaggcaaacacgaactgtgaatgtgccagtgtcagatgctgccttggtggtcatgtgtgggctggcagtaagcttttggtcccttaacactcgctgttggaaatttcccaaggctttcatctagggtagctggtgtgtgatttccctgtcctttgttactcctatctggaaactagttgaaatcttttctatgatattgatatagttacagaaaatctgaatacttactactaagttttatagttctgcttagttcaaagtaacacaacctcataagagaaagtttgaaacaggtagagaaattgaaagatgaaaatcactacccattatctcagcccacaaagatagctactatcagcattttggtttgtttcctttcagtcctttctgtgtttatgaaattttattatataaataattcatgtccaatatagaaaaagatggaaaattgagaaattataacgttaaaacaaaactgacccatctcaccagttggagatgtcttaatattctggtgaatttttttttgtcttttttctatagacacataagaagactgggaaatattgtgtatatacgtttgtaccctttttcaccaatgtatatcaatgtatatcagttcactaatgaatactaattaaatgaaaatttattaaatgtatatctatttatatctattgatatattaacagatgccagtgcatatctattaaaagagtactatgtaagagatgatgttcttaaacataaaatttaatttaggcatgaaattactttgtcaaaagatatatcagtttatattcagatatacagtgtactgacctgcccatttaccacatcttcactaatactggtattatctttaaatagaatctttgctaatatgagcagtgaaagtggcatattatctattaaattttgacggttatgagattgagcatgtttttgtatacttactggtctttgtgtttcatcttttggggtttcctattcatagtctctgcttagttttccactgaggtatttgcctttttattgatttataagagattttgttttgttttaactcagaaaaggtagtattgcttcagttgtcacagagctttggagtcagacagagctgggtttgaaccctggctttcctacttgtgagctgagggatttcaggcaatttatctgacccctctcacaattaattagttcttctttgagaactaaacgaaacaacactgactagcatgaaaaaaaagcctggtgtgtggtttctgccaatagtttttgtgttgttatttttgttgtgattcctgcactgagtattttctcagaaaaatgaccttgagctgtacgactcatgcctgttcagacccacagacacatgatactcactatatccaaagctcagaaaaatgaaactgaaatcactgaagtttgtgggttttttttttaaattcttcttgccagaaggagacaaatgaaggaaaaaaaacaagccgatttcattttcattaagaggaatttgtagagttatttctggggtcaggcaggatacattcagacgaacattttagatctagggctgggaagatcccgagactcgttatagattacatcatcttcctccaagtgcacttgccaggcaaatggacaagtgcattttagaaaggttttcagttgttcacgtttaaacagaaaggatcacctggctaacttttagttaacccattgaacagatgtgccattcccccagcccattggttattcatgtccttgttactggtttttgatatccttgccccgtaggtgggaggagggatgggtatgagcctgccctgccctctttctcctacttgggacagagctgttgcttttatttgctgagtcactgaagcaatagagcatgtgcagagtcccagcctggaggtgggcatatctgggttccagtccctgctctagcccttctcagctgtgtgatcttggacaagttgccatacctctctgagcctcagtgtcatcttctatgtgatgtcgatgcctcccccaaaaggtcgttacgaggaccaaaggagacacgtcagggcaggaaccatcctaggcacgtgtttgatgctcagtaaacgggacgtggtcagtgttcagagttgtgggggtggcaggtgactgctctgtttcacctccactcacagcaacagggcctgtggtgtcacctagacatctcataggcatcccacactgaacatgtcccaaaccagcagctcctccctggatgggtggatggtgtacagggacctcttcctccagctgtcacatggggcatgtacctggcaagtggctttgcagccctagctgcccccttggctgggggcctttgtgcagttcatggactgggagtcacccccatgtctagaccgtcaggaaacccattggcttttcctttagagcataccaagaatcaacttctcagaacatagcaagagttgactttttgtcaccctgccgtggccactcagactgactcctcttacacctcacatcccattgatcagcacagcccctggaaatatgtctagaatccagctgcttctcatcacccccacacctaatacagagggctgagtcatagcatctcttccccggactgttgtagccgtctcctaactcagcttcctgccctgcttttacacacacacacacacacacacacacatggtatcttctcaccactgcagccagacttaaaacctaagagggatcatgtcactccccattttactcagagtcaaggccaagatccttactggggtctgcaggcccccacacctggccctctgactgcacccctaccttccttagctgtctcctctccctagcatgccccaggtcgctggtcccctagcactgggcagctccctgcggccctgttcactagctgtcctctgcctggaacacatctgtcacctctcacctcctcctgtccagcctccttggggcctttctaactgcctccctcctgtggtctgcctcctccccatctctgactttcctcccgagcacttactgccatccagcacccgacataacttacttgtttcgtttgcttgccttcctcaccaggaggtgtgccagatgaggacaaggatttttatatccctacccccatctgcagcactgccatggagaacagtgcctggcacttggatgccctcagtaaatatttgttgagagactaataagtgatcgtgggccagcatgccaacagtgtcttcgttattacaaaattgtcccgaattgaaatttggctactacaagcagtttgtggtggaaatttactcaaattaccaattctttcactgaagaaattacctggcatatgtgggttctcaataaactgtgttggattgcctcaaggctttggggcagtggtagccgtctgaggcctccttgccagtcaaccaaaccctgtgctgggtgggacataagagatgcccccagcatccttagctgatgctactatgtcaccccagaatccctggggcagcccacccctcagcagcagctgtcaccctgctgggttccgcttttcctcctgtgggcttcgtctccctaaggaaatcattgtccttgctttctacatcttatctccctgagcagctccaaaattctgttattcatatcccactgacctttctcattgtcctagtccaagcttctcacaggaggagttgtctctctgttttatattaaaacaaagcggttggactcttaaaactctattcacttttcagattctttggagtcctcaatgcttcctgctatgaaatgctgcgctctggaatgccttccagacccacccccaggatacctgtagccttccctgcagccactctcctcaactccctcctcgttcccaggggtcaatgtcctggatctctccagctttaagttccttcatgtcctcttgccacccctgctctcaccatctctgagttcttgtatccccaggatttcaacctgagtttgcatctcctgacatcacttttcccagccttctcccttttcaaccagcacaaggccatccacttccatggccatagtggacgccactgagcatgctaggtgttttcttctattcaactcatgtggtctgcacaacaacccagtgcggggaatccacccctttcacagatgaggcatctctagctcctggaagtcacctaacttgcctaggacatgcagctagtaagtggcagggctgggattggaacccaagaggccccgccctgaccaccatcctgccctgcctctcctcgggcacccagaatcccctcactctattgtcaaaacccaccttgtcctgcctgtctggtacctaggggagaaccctcagcctcttcttctgctgccacttgcttcctcttctgccaggaaggtcccacgcctggccagcctgctctggagacacgcccactgcctggccttgccaggaggctctgatgctctgcaggcttcctgtcccacggatcccttcctgcctgtcctggggtcccaccaccccactttgtagttggccttgctctttattgtggtgaaaggtgcaggccattccatccaagatcctataatattccttttctctgctgttgaatgttcttcccattccccccacattctcaaagaaggcatgtggctttcttcactgcgtctcggcctgccctgagtccagcccctgctgcctggcccagcctgtcttgttggcatcccctaagccctagccagaaacacaagcacctttcaggtgctccatcctaactccaccctccctcacactggcctctctccctttgccaccagataacagcagtgcattcttttgtttcctttagaacaagatgcagatgttttccagaattttcttcaacttcaggcagtaagttttttggtgaaaggagtattactccctgagtctgtagaaccaggctctctcctcttattctgtagcaattaaagacaaagacaggcaagaaaacaatgaaaagaaacaggagccaggctgatgcaccttcatttagctggtccttgagcatgactcattgatccttcttgcttccatcagggattgcaccctgtgccctctttgaatgcaggggcatgtcaaggccaagggtcaggaagagagctttggcctcgccagcctggtccccagagtggaagtggcagggcaggaggggtgtggcagacagagcacatatcgcccccagccttgcccccagatgttgagtgctgggtgccggagtgcagaggggaacaaggcctggaccctgcctggggagaggcagcacctgggagatctttgtggcttcagatcccatgtggtcctccaggtaaagcagagcatctctggggtctaggctgggggaaaactcttgcaaaaaattcctggttctgggacagaatgcatggggtctgcgtgaggggcagaggacagtgccaggccagtgagcacgcactgggcaaaggaagtggccagagaccactcataagaaaaagtgggacatgaacctcagagcctgggctgctttcagaggagccaagagcctgggaaataagcatcttctggtgaggaaatcagcagggggaggggagggtcatacaggaggggacttttaatcctgaatggccttgcagggcatggttcccctagtgtgccccatggaacccttggctgttagatgtgaggtgataaatggtgtgtggatgcatacacttgggactcagactctgctgcccttagactttcaccctccacagggctgcgtttaaaggtccaagaagccctgcagaagaaaaacctaactattgaaccagcattccctatacgtatttggcccctgattttttcccccgaataacatcattacaatcctatgggattagtgttccatggcagaactttgggaagtgttttttgaagaatttgtaaatccctgcaccctctggactgtgcccatttcttagattgcatggaggctgtgctgtacagtggaaggagtatgggctttagatgggactggcctgtgtttaaatctgctttcccattatacaaaatctctgatcttgatcaagttacttactctctcaaacttagtttccttatctgtaagacaggggatgaaacattagctagttgtcttatgaggctgttgtgatggttaatgggaagataataatgacacttacagagggcttgttatgctccagacaccattctgagcactttatatatctcacttacttttcaccacaactgtgaggcaggtaatgttatccttatcctacaggtcaggtcaggagaccaatgacacatacaggctaaatgttgtgcccaacatcacacggctggtaaatgtgggacctaagatttgaaccctaggcactcatacatgatggggtcaggatttgaaacttgaccgtcatctcccatcagagaacatgctctgaatcagtatgttctaaagggtctagagcagtaaaagcactaattggtatcagttcccttttcagatggttcgtggatatgttagggggattgatggttcctgggactccaagtcattctgcagtcattaaaatcagccctgttgaaagagtaatctcctcgatctgcttgcccactcagatgctcccattgtgaccattttgtttgctctgctgcctcatcctgggccacttcaatttgggtggctgctcagcgttcaggtggagtcgggccactttccacagccatctcatctgtggcctgtgcctccacttccaggaccaagagtccccccaggatgcccagtgagttggtagcttgttctctttctacacctcagtgatggacttgacaaagggttaagaagacatcccttttatcattcagcaaactgagtgcctttactgagctagatgcatgccctgggggaactagcactgtttggtgacttagttagacctctgaatccctctaccaaccctcagtagctgtctgggagactgggattctgtggactctcctctatcaacgatattgggggtcttttccacaaagaccagcctggttttgattgacaaagtgcctcagatttacaaatcttaccccttgcaggatcctctcaactgatcaagccccatagctccaaatgccgtctccttgattgatgtttaatttggggatccacaagcatctagagctaccagttgaatttgggtacccaagggccacaaatgggcccccctcacaccctgacccctgacaaccagcacctttgagactgaagtaccactgcatatagtgctgtcctctgctcagggcattctccctaccagccaggccacccggcaaacccctgcaacacctcataagacctcttcgctggtctcatctccttttattaacacctcctcagcacccctccacacacacccaagcccacaagcaaatcattttttcatctgttttgctcttgtaccttacctatgctccactaatacaaaaaaagcacgccttcctcaagacacttgactgccacctgctggagagttgtcatcatggctcaacaaatatctgccacttctaaacccccaggcacctctggagtagggcagtgcattgcttgtacagctgtaaacatggcctgcctgttgaattggtcatgctgtcatgtacttattaaaacactcgtctttctaactggactgaggacatcttgaacgtaaggactgccgatttctgtcttcgtccccattgtggcttctgctaggggctagagaaatgcttattgaatgatccttgtgcaaacacctgttaccttaggttcagggcatctgctgtcattcagtgaaggtcttctaaatctgtctgttgcaaagcaaggctcgccacaggctgtcagagtaaccatggaggtcggacaggacttgcagtggggacagggccccatcagcctctcacctctgctcagaggcaccaccctctgaacagatcagagcataaacaggtcagagcaattcagcattcattccctctacagacatcagggcaggcaccatgtagtggagagtggggccaggggccatctgccatggctgtttgggctggggaaggagagcagtacttctggagcatgtgctgtgctcagggccagctccctgtaggtaggttgtgggaatgcagaggtggcaactcaagcacccctgctggggattcagagttttgtggagaagtagatcagtaagcacatggataccagatagggttgtcaaggatgttgattcactgttgtccctattttcctaagctcgccacatcatggaaggctgctacccaagtgacattcttgggcttcaccaagtgttttaacagagctccacccagctgtcacactaggggtaacacagtgggccagaaggagaggcaggccttccctggggtcccattttaaaaagggggaagtcctctgttcttttacaacacttgtttaccccaagccattcagcatagtattacttaggtcccatacagagaaccttccaacagatagctctccttgctcaggcctgtcctgatgaactccctgatattcttccaggtcttaaaagagtgagagctgagcatttccctctctgccctggctgccaggaagctcagagataacttgtttgctcagttcctgtagctttcctgacccaggacttctttttcttataaattctccttgttccttttccaggaatgcttgctttttatgttttgtttgtttatgttgcttttgtctctgtattatactttggggggtggtttttggaggcaggattggcagcagccatggtagttagaagcaccagcagtaaagctggacacacctgggtttcatccccacttgctagctgtgtcattttaagtaagataagttgcctcttcagttctcggttcctcaccttgaaaattgggataatgatcataatgaatggataggttattgtgaaaattaaacttgtttattgtaaatgcattgtttcctgttcctgctcttggatcaggcttgatctgtggctgtagaatcctagtcttaatttccttcttcctgcctgtgtctgtcagcatatgatgagttgtacaatagtagtgactaggggaccaaccatcccggtttgtctgggacggaggggtttcctgggatgcaggactttcagtgctgaatgggaaggtcccaggcaaatggatgagtcggtcaccctggtaataaacaacctcaacatctcagtggcttactgtagcaaaggtttatttcttcgttgtgctactgtccatccagggccttggctaaaggaggagcctctatcccaggaaattgacagtcatgggcacagacagaggaacacatgttaaaggtcctttagaaagttgtggctgtcacttctgccctcattcactggttggggccagtcacatggccaggcctgccaccaggctgtgcagaaccttcccactgggtgggacagctcagcctggaacactgatccactctgccaggctcacctttctcttcttttgcattttagggtgctggagcagggaccagggaaaggagagagtcacttggtctgaactgggggtcttggatgtgatcatcttcctgtagatggtcggtatgggtttcttaaggggcagggttcagcttcaccctgctctgctcagaggagcagctgtgtctcctttggacgccttctagtggttgatgccctcacctttctcagctgccaaggcctctctcgacagggcaggctgggctgtgacttctcttccaccctccttgctccttcctgtggagcccctgagatcctttccccatgctcctgggtggaatggagggtgccctctcacattcttccaaggcatcttgcgcaagtccctccatgccctgctttctctggcggtccagcatgcctccatctcacctttgggactctctagcttggaagtgggcacacctgcagcccctgactccaggaccacaggctaggctctccccaaagcatcctcatcacacaccatgtggatggccaggtcagggcggccgtcagagcccaccctcggcaaggataccctctcaaaggcacctctgttggctcaaatcccttttggaagtagcccagaaagaggctttcttttttcttatcttttgttgttttatttattgttcttgcatctaagaacaccttcttggtcagaaaacagttttccagaaataatgttaagtaagtgtcacaactggtttagctccctaacctggtctaagcatataagagaggcttttgaggctgggcgtggtggctcatgcccataatcccaatactttgggaggccgagatggagggattgcttgagtccaggagtctgggcagcatagtgagaccttgtctcttctaaaaataaaaaattagctacgtatggtggcacatgcctgtagtcccagctacttgggaggctgaggtgggaagatcacttgaggccaggagttctaggttgcagtgagctatgatcacaccactgcaccctaacctgggcaacagagtgagaccctgtctcaaaaaaaataaaaaaggctttttgatttttgttttgcagaagtaccaaaatctatattagcatttattatttttatttctataaagtaaatttgagtattgggaaaattgatcaaaatgagaaatttcatatggagtttagtacttgaaatttggatccttcatctaaatttcagggaagtcagggctgggcatggtggctcacacctgtaatctcagcattttgagaggccgagatgggcggattgcttgagcccaggactttgagaccagcctgggcaacaatgcaaagcctcctctctacaaaaaatataaaaacaagccagacatggtagtggtgcatacctgtagtcccagctacatgacaaactgaggcaggaggatagtttgagcccaggagatggagattgcagtgagccgagatcatgccattgcactccagcctgggcgacagagcaagactgtctcaaaaaataattaaataagtaagtaaatttcagggaactcagagaacgagaaaggacatgaaattgttcatttatttagcatttgttgagtaccacctggagtgaggcacgagatcaggcacaggagacgcctataaataaggccctacctgcctgaagcttatgggaggtggaggagacacgcctacaagcagagaatggtcacagggcgtgaaggagcctgggcaggagctgctgcaggagagccagggagagaggatacagctctgaaggcttctccaggaggtgtgcccacgggcacaggaaaggaaagcaggagtttatcaggtgactgggtggttgaaaggagccacacctgcaagaaacgtgggcccagcagaggcagggtggttttgggaactcttgtcttttagtctgtcggggggctttgggtagcagatgggagggttgggctgaagactaagcagtgtttcctgctgggtgggtttgaactttgtttggaagacttagggggaacagtgaagctattgcagtggtctgagcaagggggtatcccgcctctgaccacagtggagaggggatggggctggagacgacagcagactgaacagaggcagtgacaaggatctggagggaagtggctgggcccatcccttagagggctgtgtgggggctgtggggtgtgggaggaagagaggaaggaagcccagggtaggttctgggttgctaatttgggggctgggaggatagcgtgtgacctaaacagagaatcagatttagatggaattacctatattaagcctggggatttcatatctatttgctgctgctttaccagttgaggctcaagaatgagaagcacaaaatttctggtcacattatttgcatgtgcccagactggggttaacagaatcggacagtgagcgttcctgaatcagactgcaatggggaatgaatgccttgggaggctggaagcagttgtattcgcagatattcatttggagatctctatagcgatcgaggcaaagataccccaaagactgcaagaattagccagtggaatttgaaatgccaaaattttttttcagaaaggtcaggaaagccccgtttaaaatctaaattttgccatctcaaggcagtgcagggatggattaggaggatgtggggtgacccttttcttcctttcagagccagtttctgccagacacaggaatcctccacatgagtcatagggtggagaggagacccctcagtcctttcagtaaggtgggagggcagtaccgcccggtggctaccatgaaccctgtttcagaatttctttcttaacttcgtgtgtgcccaggtgcacttgagattcactgatgttttctttagaccgaggagctcgcttcagcagttagtttcaggtgttggctctgctggcattatgcttcggcttaatgttttctgaagacttgttttctgttgtttttcattgttcttgttgtctggcttcaggccactaccttcaacctagcaagagctgagtggtgccttcagcagtgaggtagcttctgaaggccaccactctcttgctgtgtgactttggctagtttctccacctctctgtgcctcagtctcttctgtaaaacggagaacacaggagtatctccctcatagagttactttcaggtttcaatgagttaatctacataaaacaataaggatagagcctgacacaaaatcacactcaacaagttttcacaattatgattacttgacccagtaggagaaataaaaaacacaactaacttccttctaaggacatgcccaagaatccagttttagtaactttgaaggcattgtttttcaccgaaaatatctcctgccagattttttcatgtgtttgcagcttagctttaacaaggagctgaaggacggccaggcagcaaggggtggtgagtgccggtagagtgtgacgagctcgcccagccttcctccctgtaattaggagtcatgaaccatctacaccatctcccttagctaataagagatttttacatttacttacctcaaagtgacctgtctgggttttcttttcttgtggcccccactgtaggtttttggaagaagctgaccgcctgaaaagaaattataaaacatgaaaatcgctttgaggtgaccaagtccagaggcccctaactcctcccaagctggatctggggtgtaagaactgtgacttcaggtaacaaagtagtatcccctccctgccccctgtgaactcatgattcttggtagcttgcatggcagttcttcctttaggaagtgtagtttcttccaggaactctgaaacttggggtattctacctcatgcggttgtttggctggtcaaaaaagggagtgggggattctggaggtacttcatgtctgctgcatggcccaagggggccagggctccataaatcaccaagaccctgagggcagggctctgtactcattcctggccctgcttctgtaaatgttaatgacaaaataacaatgtcacccacccaacagggtctttaatatgattaaataatcatgaaatacttcttgaaggataaatcagagagaatagctaggaaatttccaaaaataaagagcagtaggagagtatttgttctgctagctattaaaatgtattctaaagcacagttgtaaaaacagtatagtactgtgatggaaataactagatcagaggaacagagtagagagtccagaaataggtgataaatcaataaaggtgtatttcaagttagtggcaatgggatgcatggactagcaaatggtgttagaaaaaatctcctatccattagagggaaataagaaattcctaagcttaggtagtatatcaaaataatttccaaatagcattaaattaaaaaaatcattaaaatcttagaaaaaagaatatttatattattttgggtaagaaaagacttaaaacatgtcacttttggtcccacatacaaatatcgtaaacaaagttaaaaagcaaaagggtgggaaaagtgtttacaacatcaatgatgaacaaagaattaatattcttagtatacaaatttattcgttcattcaatatttattgagcacttagtatgtactagaaagtattctgggcactaagggcacaagcagtaaataatgttcctgttctcctggtacttagaccctgatggagaggactgccagtgactatggtagattattgtaggtcacattttgataagggctaaggacaaaacattacgtaggtggctgggctagggaggcttggcagggtttgcattatgtggatattcaagggggcttcactgatggaatgacatgtgaagaaaaagggaaagtcattgaatgtcgagctgatagcacatttgctgtttttggaatgtcgagctcataggatttgctgatggattgaatgcgggttgtgaaagaaaggagtcagggtggcttctaggtttggggcctggcaaccagaaggattgacataggaatgactgagaggcttggcttggagatagagttttggttatggatgtttcagtttaacatctctcttgtatattcaagtgaggacgtcagggaggtggtcggccataaatatctgtaattcagggtgacatctaggctggagatataaatttgggaattgttgcagtgttgatagtatttgaaagaatgacactagctagagcccctggagagtgtgtgtagatacagaagagggcccaggacatccatgggaccctcccttagagttgagggagatggagccagctaaagagagcaaaaaggagtgaccactgaaatggaaggagtcccgtgagaagggggatctcccaagccaagagacagtgagaagggcgaggtcagctctcctctggatgtgctgatgggcaaggagagaactggccattggatctagcagtgaggaggtcactggtcaacccaacaagggctgttttatgggaatgatggggagagaatctgtttggagttggattattgagaataagaggaaaaaaactggagacagagaaatgggacaatagctggaggaggatggtattcaagtaagtttatttttcccaagatgggagttacataactcttgttttcacccaagtggaaatgattcagtagcgtggggagagtggatggtgcaggattgggctggggtgagggttctgaaatggtggtctcgaggaggtgggagaggtagaatccaggcatgagctggggaagggatcctaagtaggagcatctaaggaggtggtaggtgtgcacctgcctcttttctcagttcactaagaagcagagtcctcagcggagaatggagactaaggagacgatggaagtttgaggagagagggcaaagtatgaagtccttcatagcagaatgagaaaataaatggccaggggaatgaaggattgctgggcggcatgcaggcctctaaggggtatgtttctccagccatgtcctgttacacaggtgaacacggggtaggaggccattgtggtagaaaaacaggacatgagcagacacaacgtaagacagagaaacgcctgtaaagagaaaaagcaacatcagtaatagctgaagaatacaagtaaaaacaatgaggttttctttttttctctttagactggcaagagctcttgttggggatagaaattattgtcgcttttctggagcacagtgttacagtatgttccagaatacaacgtgtgtcccgttttgacctgtcagtcccacctttagaaatttattctaagaaataattgctcaaatgcaaggaaatatatgcacaaagatgttcaccccagcagtgcttatcaaagtgaaaaaatggcagtcatctaaacaggaggcagctggttcacttatctgtcggcctaacagtgatagtgggaaacagtagctcacactcaccctcctgttttgcagatgagggaagttgggtccagagaggggtagtgacagctccagtcctactccacggagctcagaccccctggctgtaggcaggcaccctgcccaacctcttcaactgggcttggagtcagagtcccttgcaaggcacttgtcaagcccttttcaagggccggtttgcttaatgcttttaaaatacgagttctcaaaatgttttgcaaatttgtttacaatgtcttcatttcatctcatggctttccttgcaaaggatgctgacagtggggggaaaacaggccgactgcctggccgtgatagaggggaccatattttcctgattcccaagtaagacttacagtggaagaaaggatattttctgctttcttacagtgtttacaaaagtcataacaggatgtgaggactatctggctgcaacatctgtcaccccattggtcgccagagttgattgggctgatctggctggttaggcaggtgtcccattcctccctcaccactccatgtgcgtccctcccaaagctgtatgctcagaaaggatgaccatccccgatagaggaggactggtctttggtcaagggtatatgagtagctgcaatcttctgctagggacccccaaacaagctctcaaaagtcataacaggagtacaaagataataaggaacttgcatttatttgtttccttgatcatatgtttattgattagaagaaaataaaattagcagccagccgtggtggctcacacttgaaatctcagcactttgggaggctgagacgggcagatctcttgaggtccagagttcaagaccagcctggccaacatggtgaaaccccatctctactaaaaatacaaatattagccaggtgtggtggtgtatgcctttagtcccagcttcccagcgttttggatggctgaggcacgagagtcacttgaacctgggaggtggaggtggtagtgagctgagattgcaccactgcactccagcctgggtgacagagtgagactttgtctcaaaacaaataaaaaataaaaataaaataaaattagctttgtgtgtggagaaaagggaggaaaaataattagcattgtcagagaacatctgggttatttggtcccctccgtgggaactgccctgggttttcacttctagagtttctggttctggtttaatttttccacgccacagcacagggaccgagaagctgctcagcttctctaggcttttatgtcttcaccagaaaaatgagcgggtgggcttaaatttcctacaaaaactcttaaaataaatatgatgctctttccattctatcacatgcctgttctgggtccgggggtgtgagagatgcattagtgctgctgtaaaccagccccgggtctccccccccggccccccaccaccaaacccccaagcaccaacctgggttctccaccacttttgagagctcatcgaaataaacacacctttgtgcctcttgtaacaattccagatcatccaatggcagaccagagaatggacatttcttcaaccatcagtgatttcatgtccccgggccccaccgacctgctttccagctctcttggtaccagtggtgtggattgcaaccgcaaacggaaaggcagctccactgactaccagtaaggcctttggggcatgtcttcctcttgttaaacttggtgtcagttctcgggcatggaacatctagcagccagctactgtttcatcctggaaaaggggatgggaataaaaaacccaactctaggtggcgacacagttggtttttggctttaccttcccctagtttgtaagcaagaaggagccttcagcagtgctgaggcatttaacttccacttcctgtccccaaaatgttctacacccagagaaaaagaacagccttaaggccaagttctgtcttttacccctttcttcgtcttctttctttgctcctttgagcaagagggttaagtctatgggtgtcatctcagggggttcaaagagagctttgcctgagggcctctctgaggaagacagcaagtgtcaggtgcttaatgaatgtttatggaaggaatgagtggaggtcctctctgaaaacaatttaggaacattgatgttgtccttaaacattatttaaattagtatgaacttgttatattaaatagtatttttgtttatttttagacttgttgacttttcgtttgagtaagtaaattttcacacttacagtcatcccttctatatatgtacaaacacctagggaataaggcagtgtagaatattcaaaggcacattttgttttgccgaagcacctgcgtggaatcttacccaaatgtccatttaagaggttttcttttgtttaatgagggaaaatctccgaggaggtataccccctacagcagatgtcctttctgctgaagttcacaggtcgaatttggggagcacaatggctggaggtcagatgcccactaggagatgctatgattaatatgtaagttatcccagatgattaagacagccaacacccaggggctggagagtgggtatgagggctgtgagggcgttcttccatagcagtaactccccagcagaaagactgcgagatgttggccacaaaccctttgtcttgagcaagcgctaagggagccactgatgtgttctaaggcctctgtcatctggacctgtgggttccagcctggtcaccacccaagatttcccttgtggactctggtttgctaatcttctgtaattcatggagactcaattaattaagcaaccttaatccctttcactatcattttaatgtaactgaagtcatctgtgactgtcaggcagagctttttctcacctgagattatcacctggcctcaaggaacagatagaattctagacaaaagggagaggggagtttttgtccttccgtgcggcctgcgtgatctctgaactttagaactagctggggaaactctctgcctgtgaggaaccccagggcgtctaattgggaacactgttctagaatgcccatgatatgatccagtgctcctagaaacagctatttttgcccttgggattacattgtttgaagggccatgctctctcctttcctgtgggataaaggaaaaaggagagaggcccagctggcagtccatgccctcctgataaatgtatggattggagaaggcggtgagggggatttggaactccttcctctggggatttcagtctgttttcttctactgaaccacaggatgcaacgaaacttggttttctgaagtctgtgaaagggagggagatccttgctgtgaccccaggacttctgtggccctcagccccactacgcccctccatcccaattcctaaaatctaggggttcccacctacctgagaagcagaatatttggcagtagtgcctttgaaaagctgcctggggctctgctcagtactttgttggtactttaattccaccctcctcacttcgtcccttccctgccaaatagatatgtatgcacatttatctttgatgctcaatatgttttgcaaacagaataagcttcatttatccagaatgatggggggggagaatgagaggttatatagatatttcaatcctatggttaactaagcatttttataaacactacatattcccaattttcaaacaatcagaatatggtaaaatatatgttaacacacaaactcttttgagatgataacttttgtttgataacctgagaagctggtccaggttttatagtaagttcaagttaattttcatttgttttacccttattatacatcattaattgatactgtggctgttcgaactttatgattgtttggtttctggataaatgagagccttctgtcttatgataagaagctcttctgtatgtctttattaacatgcagtcacattctcttttgttttttcagagaaagcatggacacagacaaagatgaccctcatggaaggtaccatgaacctagtaatttgaacttcagcatccttatagccattttctttgcactgttacacattctgttacttggggcagcacccatgtcctcaactggagatgagcaaggaggccgtgagcctgtgggcgctcactgtgtccctccaacccccagtccccttgtgtgtctgcagagagatgacaggatcaggcagaagaaaacagcaatgtgtaactttgccattcatctccagagaattatgtttttatcttttgctttttcctccccccaggttagaatatacagaacaccaaggaaggataaaaaatgcaaggtaagcttggaccttattttgtctacaaagcatcctagttctggttgcttagagagcagctgaggaggctctgcatgtttggtcctgtctaagagttctgttgggcactgtcacctccttagggaataggcaggtagtgggccttggccgaggtggccttctgccctccatgctctccatactggctggcctttactctttgctgtctaagcacctttaacctgaagtggatttgaaggtagcagaaatcaatcaaggctcaagtttttccccagtcttcagcagagaacgtcttcctgactggagcgccctccgcaggagacatggctcagtgatttggttcctgggctgggacttgcctctgtcaggggcccctattgcactgcgagttgcaactgaatgcaccacatggggcatgctcggtgtctcgagtagattctctgcctgggtctgtcctgcctccagccacacttgctgacctcttcccattgcgtcctcagttcttctgccgttagtaccaggctgtgttctgaggctgcgtcatgacagactgatacagggggctgcagaaattggctgccctaaggcttcaagctcttccctcggaggccagccttagcaggagctcccatggctctgtatctgcggcagctgcagcaaactacatttccatcgttgctgcacctccttaggaggaccatcaccaatggcaggtgcacatcagtcagtgtcaccctgcctcagcgggaggagtgtgacattcctcagaggaggctcctggggacagatgtagcatctgctgcacctaggtggggacctagttttgatccaaggatgacggcgttggttactgggtgccctagtcagtgaggctgtgactggaaagaattggtgccctgcccaggtcacatggccacacagcgggctcctcacagacctcagggacagcccacggggctctggatgctctgtgctatgaagccaccacctcccttctctttcctttcacccccatttcaaaatccaatttgacaaaggctgagaggaaaagaaacgaggagaaatgaacaattcagtttactctgaagagacaatttttgtagcttttctcctgaattctaaagatgaggtaaacataaaaaaattaatactgacctggcagtgagaccattttcttggagactttagttgaaaagtctaattttaaacattctgcaaattctaaatttgccttgtcagatgaacattgaaaacagttacaactcatttatttttgtcatcttttcttgatgcttggttacattttataagaaatcgtttttcatattgttgttcagggaagctcacagtcagattgaaaagcggcgtcgggataaaatgaacagttttatagatgaattggcttctttggtaccaacatgcaacgcaatgtccaggaaattagataaacttactgtgctaaggatggctgttcagcacatgaaaacattaagaggtgagaccctgggctctattgtcctttatgtccttgcccacaaatgttaccacccttgcctagaatgttcctatccctaaggcagatgtttattacttgcaattatgtagccttcagtagtatgcctttactcttcagcaacagccgtgatgccaaatgaagtgattattgagcttatgtgggttttgacatgcaattttgcagtcacacattctcagagcatagaaactgtgctttgcacgtctctgtatatgcatgtaatcaggctatgtgcctatcagagatgatactgctctgatgtctcacatcttgcctatgtttgtgcctggatcccatccttacaattataacacgcagaaatgtaggtgcacacagtgacacagaaaagtcagttcaaagatgaaaattcatcatggttcctttgaaaagtgagtcatgggttgtgggttctcgcgacattttgttgtcaggaatgaacactgaagatattttcatcttcctggaattttcccgaaccagatccactctttgtgagggaggcagtattttccttcttttctgagtgtggggagggtgagaaaacataggcagaaaagtggaagtgacttatccaaaccacaagagaaatctgaaatatatcaggcattttagtgaatgctgttcctggaattttccatagctagtcttggacttttggaggaaattggaaagtgggcgctcagtcagatctctgacctgcgtggtagaagaattgcgtctttttatatttgcacaaggccaccagaaataagaagtagctggttttgtctgactttagatcattacccaaaaatataaatgttgtatcctgtgctggaagaatggcatttaaaaattcatattagcaaagataacatgggttaaattattataaactaatttctattaaattggaaaaaagtggcaaatctcaagttacagtaaagagcagggatagggatcaataggatggttgcaacacgtcctgtctccttccctccccatggtactttgaattgttacagatccatttccttttattccttcactattctactcgctattctacagactccaaatcatttactgctggcatttttctctgttaagtgattgttctcctgaaaaatgccagattgacagccttttaaacctaagtcttgtcccctttcagtcctgggagtgcgagctgcattgactgaagcaatgcattcctccacattgccacgctcgtttaactcacccctgatgaagagtaactcacattaaatgccttccacaatatatttactcagggcctggaagactgaatggtttcccaagaacatttagagtggtgatttgaaggactaccagacaacccatttaatacagatcttaggaggagggaactctctgaggagcctctaccagtttacttccagagctgccttctttcttagaagcagattgttaaacttccttctattatctcttggttttccctgtaatgagaaaaacaggcttgttaggtctcctgtgggtaacagtgttctctcttccatggaattctctttggcttacaggattctgtccaaagccagatctaggctcatctcagttaaggcctaaacaataaaatttaaataccaggtcatagagactaggccacttacagaaggtttgaggcagcaagttagaatgagacattttctgaatatcaagtataccaattctttctctttttgcccctaaggtgccaccaatccatacacagaagcaaactacaaaccaacttttctatcagacgatgaattgaaacacctcattctcagggtatgttcaattatgggattgttttacaacgtttgtttttataaattttcaagtaagtaccagcatgtgggaatttgatgtttcaacactgagcttttttttttaggcctgcttcctctctcaggtccctccctttatcttattgtttggacaggcttcacatttcttccacaaaaccattctcctcctcttttaacctcgtctagacaaaaatggaaggtctatgccaccgcaatttaaaatcagaagagtcaggatttgttaaaaataagggggatttgagaatcacatttctgcatgaagattttaggaagggactgaaaccaacaacaattgagaatttctcttcacctgatttaaccactagcacaaaaaagtccacctaaatctttacaccaaaatctcatcaaaataacaaaactgtggctcacgcctataatcccagcactttgagaggccaagacgggcagatcacctgaggtcgagtttgagaccagcatggccaacatgttgaaaccctgtctctattaaatatataaaaattagctgggtgtggtggcagatgccttcttgggaggctgagacatgagaattgcttgaacctgggaggtggaggttgcagtaagctgagatcactccactgcactccagcttgggcaacagagtgagactctgtctcaaaaaacaaacaaacttacaaagactagtggtccaaaaaagaaaaataaatgcaagagatatatgctttcacctgcttgacttgagtgctctctctgtcttgctaaatctctgctgggagatggttgaggtggcactatgggaacctgttgtcttccatgaagaattaggtcggcacaaagctctaagttgtgttactaggtaaagtgagattaacttgggaattgaagggaaagaaactggattcagaaacgtgttcttgtagattgtaaacagatgaatagaaaaacgtaactaaaaggaaggatacccgcttccacctcccacaaagtcagggctgaccttacctgcacagccaacagaatcttcctacccatctttgagcagaagtttgcaaagctctagagtagagggtagtccatctggaattttgcatcatcactatccattttcagctctctataagcctggcctgtctgctcactccagcattctctatttatctcctcatgacgtgctatctcaaattggaaagcattcacctgcaaggaccagaagacctgatgaataaatagagtttaatttctcaagtataactggtctggagtaggttatgttgggttgctgcagtggttcaatgaggtcaataggaaccaggttctttgtctttgcactcagccacaccaagctagcatgctagcttgtttccttaatgtagccaggtacctttgccaggtctaagtagccagacccactgtaaaaacaggggtaaatgaagctctagtctggctgtcctttttatcaagaaaggatacaccttcctgaaaactcaacagtggacttcagcttattcaaaagtgtgtcacttggtcacgcctagctgcagggcagggtgcagaaacaagtgtttatagattttccagcctccctggtggagacaggcaagagagaaggggcctgggaatggtgttgggaattggcttccccaacagtgtttgccacacacactttccagagccacatgcatttgctcgattccttccagaagtgactcccacaacccaatatagtgcttcaactgtggtctgattggcctgaggttgaatgggactagtgccttccttgccaaaaaagccatctgattagtactgtatcatttggggcagctgcagtactgcctcctcccccttctctcctgaatatgaattattgttaggtcaggttttttacatcttgtataggtgcttttttgaacttaagataggacttctctttcatttctgtcaaaacctgtttgttgaatggccccacagtccagcttgtcattagtgacccttggaatctttgtgtgacttgtagatccaatacatgcctctgtgcctttcatccttgtttattcataaattcaacaaacatttttgtttacttactagatgcatggcattgttctaggaacatccaaatcaatgataaacactttagggtgggaccaggctcccgatcaagtgagtgatagtcttttggctaccactctcaggacacagttattcaaacacccaactttgcccacctctccatccttttcgtaaagatgtccgtgttctcagagaggatttgctgaggttaaaatatgaccgatgcctgtagcatctcgagagctgccgtcggtgccagcttcatgggcatgtgacctctgcagtttcacaaggccccatgcttggtttaatgccctgtcaccatcttgaaaacgtaatttttgaacaaggatccctgcattttcattttgtactgggccccacaaattatgtaactggtcctgattcccatactggtaacagatctgcagctgtagatgtgataggcctgcctctatgcctttcattcttgcgtattcatgaattcaacaaacccttttgtgtacttactagaggcttggcattgttctaggaacatccaaatcaatgacattttgggctggggtacaggcttgattattttaagaaaaagaatctatgtctttatttcatatatatatatatatatatatatatatatatatatatatgtaaaataattatcaagcagagtcctgtggatggacaaatttaaaaataaataaaacaagctccttttgcagtggcacgtgcttaatcgttttcttgttgctgcttttcttaataattttctatcagatacccatacttaccagggtatggaacaaggattatcatgctatctcagctaaatacttcatgttgggcttgtctcttctactcccttgtttatgcagcactcaagagtgatctctcttgcccgatgaaggttttgtcacctctctagcacgtgtcagtggctgtgaaatactgtccagtcccttatcacttccagggtcccagttccagggacttgcttccacagaaagccaggtctactcagatgatgttcagacagtttggccgcaggagctggacttctgcttttcctcagcaatgcaaaatggacaaactgctttctttactaagtgctttcaaaatatctttaataaagtgtatgtcagggatcagtcaactgtatcagtttacaatgtctacgttagtctacttccccatgttttgaaaactaggcagaccgtaccaaggcctctgtgtcttttattaaccagcaccatcttcccaagagtgaccctgccactggctggcccctgtggctctgtggtgctggtagtgttctcacagcttctgctccttagctgtccttcgggcccggctccttcacagatggtctgctggccagggtgctatggagttggaatgtccagagcctcccctcgctgatgcattcactgctttggaacctgctggctttcctctggagtactgaaatagctttacctgtgttgtcggttcaggcctgaccctgcccagcattacctccagggtgtcacagttcccttctgtccaggtacctttcaagccacattgccacatcaatgaaaagcctcaaaaacacttccatgagatacaagattatctgcaaggcaaacgaggaagtttttaataccctatttgttgacagaatgaggcttccagcagatggtgcttggaaagttacttccccctcactgtcatcccttgcccctgggccagcttagggacctaacttaggaaaggatcctccccagcttccttctggctgagtagcctgccagggtcttaagcaacagtgattctgttcccctctcactcatttcttctgtcccagcacaagtacatgcaccattcttttaccttctggcacattaattcatttcctagttctttgaattaaaccacatcatgaaggcccttttgtggaaaaagagaacagtttctctgtatttttccaaagagcagattaaggaccagtgaataaggtgagaaactagtccactgtgtattagaacgagggagggctgagtcataagagcaagggcatgacagagtggggcacaccctccttgtcaccggaagaccccagcaggagttgagtggttgtatgtctggaaggcagtgggtgggattcacacagcccaagctctcaggcactatagcttgggtatttacctgcttcagtctctttaccaaatgttgtcctatcttaatggctggctttattggaacatttagattttttcctgtatttaaactgaagaaggggtaagaagaatctaagcggggagttttgcttttctgaatgcaaatagtccggccctggatggagggataacatttgagagtagtagttctcagccctatgtacattagaatcacattaacgtggaagtgggatgggtttaaaaataccccagtgatcagccccatgccagaccatcagcataaaaacaaaaacaaaaaacactgctccgaatgttgagaaccactgttttagagagctccctgtacgtggaggttttcaagttgaaggcagatgatggctgagatgttggagaggggattcttgaagagtccttccaaatctcagattctctgactctccatagagttgttattattagagcaatgaaatatgattctctggaccatgataccttcaaaagaacacgtgcaagctgaattctgctttgaaatataacttactttaattggactttcttcctataataattagatgatatgcagaaacacacacacacacacacacacacacacacacacacacaatcttacagttcttcagagacgtttgttttcagcatcctgcactcaggatatcactgaaactgttagtgttcctgtgctttggatgcttagaaagcacatcctctatttgttatcagggtgattacaaattatgtttcctacagtatgagaaattgattatccatttctcctgattaggcagcagatggatttttgtttgtcgtaggatgtgaccgagggaagatactctttgtctcagagtctgtcttcaagatcctcaactacagccaggtattgttcatgctcctgttgatggtgggcagcctcacagcagtcagaagtgtcactcaattttgtcagaataattatagtatacaagtcacatgtgaacttcttccagaaaattcttaacttcttaacagataaattaatttagacttagaacaatcttgtaatatgttccgtattccccccattgaaagatctgactctgatctgatcgatagcattatggctttcttctattgctgcaaaataaatatcccacaatatgtggcaaggacagagggtaagaggctatctgacaagggagaaaggtaggcaggttaacacaataccagagaatacgtcacttggaaatccactccatactgtgtttgcagtgctgtgtcacttcttagctctattgaacctcagtttactctaaaaattaatgataacttataggatcaaataagagtaacatttataaacgcttctagaacagaacttttcacctattatgtcccccagagtttttattcatttattcattcactcacacactggtatttgcatggaagcttggtaggcagaagacttgaagaatcaaaatgacatttatgtaaattagaattaatgtaaatttaatttttccaaagatttctgctctttttagtctcagagcaaagttatggaggaagttgctgttatctctgttaatagacaaggtgactgaagcatatgatatgcgtgacttgcttgagaacagagaggctgaacagcagagctggaatcagagcccacccctatcttctgccttctgaggtcttacaggggaattccaagattgttgccttagaagagcataaactgtttatataattgagggttttcccgtcatgttatcaaaaccaacctccagatgcctccttcctggtgtcaggcaaagtggttggacatatgtacaggttcacataggaaaagtttgaggtctcatgcacaaaaacacaaaggcaacatgcagactgtgcatgcttacttgttgcataattgattttctgcatgcaattgacttgtcatgtttaacatttcatctccccagaatgatctgattggtcagagtttgtttgactacctgcatcctaaagatattgccaaagtcaaggagcagctctcctcctctgacaccgcaccccgggagcggctcatagatgcaaaaagtgagtaccagagaggcctcgcatttcctcagcagcccactcacaggcagccaaccctgagtgagcagagggcgggtgtgtgtgatgggctcagcctttccagtcctacttctctgtcctctttctggggcaccagagctatctttggctaaatggaattatttatgttctttggtcttttacataaaaagaagaaaaaaatctcaatgtccaaatttattgaaaagaagagctatttagactggattctttctgatttttagacttttcttttttctttcagaatctagaaaatcccagttgtatgctcctgagtttaaagggctaagtttgatttgttctcccagaacaaatgggctctatttacctgaattgcacacaggcagcctcataaaagtaagaaaacgtcaactataaatatggtgtttcttcaaccaaagtgttcctccttaggttggctcccccacctggctttcttcttttgcagtagtggaaccaccatccacatcgctccctctgcccccagcttcctgctactgcacacacttctgtgcaaggccccagtagctgtcatctactttagtcctgtgggaggctgtacactcctacagttaagaatgagagaatgaggactctggctgggcgcagtggctcacatctgtaatcccagcacttcgggaggctgaggcaggtggatctcttgaggtcaggggtttgcaaccaacctggccaacatggcaaaaccccgtctctactaataatacaaaaattagacaggtgtggtggtgcgtgcctgtaatccaagctacttgggaggctgaggcaggagagtttcttgaatccaggaggtgggggttgcagtaagctgagattgtaccactgactgcactccagcctgggtaacagagcaagactctgtctcagaaaaaaaaaaaaaaaaaaaaagaatgagaacacaagggagattactgggctcattccggctccaccattcactagctgtgtgaccttgagcaagttacttaacctctctctgtctcagttttctcatttatggaagagtacctatttctttgggttgttgtgaggattgaaagtgttaatgtatataaagcaggcagaacagttcctagcacatagtaagaacagtatcagtgtggcctaatgtcttgctcccaagctgtccacgttaatccctggaaaaaaataccaccagataatctccttcaagtcatctctttcattacagcacaccgcttgttcctaaaagtaaaatgcagactttggtatctgttgttctttatagtctagccttggcttttttaagtgaccttaggagaaaaatatgaatggcatttgggccttgcctttgaggctcttagcatatagtcagagaaatgagacagacagcaccctgcatagtaataggtacagccatagaaatagtgccaggcatagagaacggatgattaattctcatgtgggcgcaaggacaggcatcactgagtagatgacaaccgaggtgggtttgaaaagatgaattaatgtttgccaggtaatgaagggaggaacaaagaggaaacaatctgtgcacaggtgcaggggtgtggagccacatggcttgcttggtgctattggacaaaacgtgcacggaggggaagggctgaaccatgaagaccatttgttctgtggggacacagtgaagagctctgagttgggtggggcaggctcggattggcattctaggggagatcgcagagctggcaatgtgggaggtagatgggatgggaggaagcccagaaggagccctgggcagtggccattcctcggcacacttgctcgtgtgatggccatgggtgtgttttccctcggcttctgtactgacacctagccagtgtttggtaaggaggtgtgctcctcagaatcacctgggagcttttcaacatagtcatgctccacccccagagattctaatttggtttttccagacagcacagtccaataaaaacataatgcaaaccacaaacatgagccacatatataatttcatattttctggtagccagactttaaaaaataaaaataaatgtaaaattaactccaaaatatttcagcatgtaataattataaacaactaataagttcgttcacattcttttatttttctatactgtctttgaaatcctgtgtgtatttaacacttacagcacatttcaattcagaaaagccacatttcaagtgctcagtacctgcatgcagctagtggctaatgcattggacagcacagatctagaatggggtccaggaatctgtaggttgatcatgcatccagggtattctggcctacaagccaggttgagaacttaaggcagtccggctcccaccttgccttcccaatatccatatcctacccatccttcagtgccagcccaagttccttctcctctgggaagcacaggttgtctttgccatttatttggcactaatcatacatcaccctgtcctattattaatcttttcttggtgcacctccatttgccctttgttagccataagcgtctattgggcaagaaccccatactatatttcttttcatccccagagtacctaatccatttatttagtagcacactctgtgatttataaacatttccagactgacaacacacctgtccatgctgcatctgttaaagcctaaacttgggagatatttatctcatgtcatcattataaaacagtgaggcaggcaagaaaaggctttgctcaaggtcacactccccctcctgacagacaacactgctctcagtttatcacattttgtgtattgatttgcagctggacttccagttaaaacagatataacccctgggccatctcgattatgttctggagcacgacgttctttcttctgtaggatgaagtgtaacaggccttcagtaaaggttgaagacaaggacttcccctctacctgctcaaagaaaaaaggtaacaatttaacagtccattaaaaccctgtgacaggtgaagcatgctttctgcagcggagctctcagctgggcgttggttccatggtttctggctggccagagtggcaggtcccaggactgcagacaggaccctgcagtcctccctatgtgtagggcagttgggagcagaggagagagctgaaaagcctgatggcagagatttgtggagaggcctcctctgtttaaattgtgtttcttttaacatgattgaggaagaatactctcagccacaatcctaactgccttatgaacagccaccagtccaccaaaattactctgagctcaccagtgaccttgatgttgttaaatgcgatgaacatttttcctttgtcttccttcttgaagtgttctcttctcctggattccatgaaaccacattcttcttcctcctccccgaccccctgctgctacaggctctcttgctggcccctttgctggctgcccctctctgtcctgggctgcatctctgtctgcagtctctctctgttggtcatgtcatctactccctcagctttaaatgccaacaacttccacattcatatttccagcctagacttgtcttttgaactccagattcataaatatactgcttactaaatcaacctgctttggatatctcaggggagtctccaacaggatacgtgccgaagtaatcacctgagcctctcctccagcataaatggcactgccattcagctggctgctcatgctagaagccggggaggtgccctcacttctgcttcaccaccccactcttcaatcccgttagttatgaagtcctgccacaatgagtcccatctgcaaaagttctctgaaatgtttgtccctttccatgctgcctactttcactcagctccaggctgcccccaactctcaccaggtctcataaagtgtagacccacatgctccccacccccaacacagcagccaggatgatctttttatcagtccccttttaaaaacccttcagtgttccctattgttcttgaagaaaagctcaaaatatttaacgtgaccatgcagcccccgaccctgccactaagcacatgtgagccatgttgacttcctttgatgcctcaagccccttctgggcaatgcttctgcacatgctgtcgcttcctggttggaatttcttccctctccccatgaactcccttcacatggctctctccaacctcagactgccttatgtcttatagcaccctactggtttgctttctagtgctttcttatacttgctgttatatagttatttgtgcgattatttgtttaaagtctgtctcccccactaggctgtaaactccacaagggcatgtctgatttgtttttcactctattccagtaaccagcacagactccacgcttggcagacactccatagtggtttgcttgttggtgaagtctataggtgctccacatttaatgtgtcccaaatcgaactatcttttttctctctctctcttctagtctgttttctttcttctctgagtcagtgaatgacaccagcaaccacccaatccagaaaagttagagtcatcttcatttgtttctttcccttaagcctgatattcacagcaaatcccaacagtttgatctcagaaatttctcctgctttctttctctgctccctctcatcttcactgcactgccatagttcagtcctcctaatctcttgctgtattatagccactggcccctgaatcagccttcctacttctgttttctactgtcttccagttcatacgtcactctgctcctacagcatccaaaccacaatttgattttgctgtttctgcacttaaatacctgtagatgctctccatttcctgccttaaaaagacagaccaacattggttagaaagtaatccaaggcccttttaatcttcctccaacctgcctttccaatttgcccctcactcccagtacctccaatttcacttcaaccacacagagctcttggccagttcctatataggctgtgcctctgtgcctgtgtacgtcatcagcctttatacattctagtccctcagccactgctcatccttcttgatccacctcctctactggttttttgggggagccttcctctccctaggaagagttagatattccttccttggtgtatgtaatgaatgtccatggtataactggccctacttaagcattctgacactggatgacagtttgtttctctttccgtctgcccctttcattagatgcttacttctggagagtgaagccttgatttttttttattttttgactccctacctacatcccatcccaccatcggccgtgtacacctccatggcccaaacctagtgctgacactaaccacgaactttgctttctagcagatcgaaaaagcttctgcacaatccacagcacaggctatttgaaaagctggccacccacaaagatggggctggatgaagacaacgaaccagacaatgaggggtgtaacctcagctgcctcgtcgcaattggacgactgcattctcatgtagttccacaaccagtgaacggggaaatcagggtgaaatctatggaatatgtttctcggcacgcgatagatggaaagtttgtttttgtagaccagaggtaagagtctacatactacccttgagcaatgatggtagaggattttcaaccctgatctaaaaagcagagaagactgggccatcagctggcttttctaagaatgaagaaagaaagaaaaagctgggtgcagtggctcacacctcaaatcccagcactttttgaggccaaggtgggtggatcacttgagcccaggagtttgagactagcctgggcaacgtggcaaaaccctgtctcaactaaaaatacaaaaattagccaggcatggtgacacatacctgtagtcccatctactctggaggctgaagcaggaggatcagctgagcctcgggaggtcaaggctgcagtgagctgtgattgcaccactgcacttccgcctgggcaacagagtgagaccctgtttcaaaaaaaaagagacaaatgatgagagtctctgttaaaaaatgagattcaataggatatcatcataaatacagagatttttctgtcattctttggcatatagagacaattaagtggggtgccttgatgtccatggctaaaagaaaaacagtagggatagcatgctgtctgaatctatggaatgttccagaaccattattgtgattgaaattcttttgaatctaggacttggaagcaattatttagtcctgagctgtccaataaaatactcgttggccatggtagcctcccatgtggctaacggcacagacatagaacatttccatcatcacagaaagtcttgttggacagcgttgatctaatccaacctccttattttatggatgaagaacagaggccagcctggggactggtctcctgtaggattcacaattaattggtaatagacctggaccaaggacccaggtgtcccaaatttactgctgcctactgctttccctcagaatatgcacaggctaataatttttctggctactagagacagccacaacatgctggaaaaagagacagcctcagctgtcttgtggcctcagctgctgcagcttctggcatttggttgtcctgataaaaaggaggcagcaaaaactagaagccttgcactgaggtttagatttataccacattttaatctaattaatgtggttccttttttaaagacagatctcagtctgtcacccaggctagatctagtgcagtggcgagatcttggcttactgtagccttgacctcccgggctcaagcagtcctcccacctcagcctcccaggtagctgtgaccataggcatgtgccaccatacccagctcattgttctgtgtttttggtaaagacagggtttcaccatgttgcccaagctaatcttgaattcctgagctcagacaatctgcccaactcggcctcccaaagtgctgggatgacaggcatgaaccaccatgcccgactggttgcaatttttaaagccccctcagatttgatttcttgtgataatagtccctttacaaaggctttgctctgtttccctctatttttatagccttgattaaattcagatgcctgaaaaaaagagagaaagatccacacagtgagccctctgaaaatccatccagctcttttgcctgcagctttgaccttgctctcataggctgtagcagggtttatccattgcaaagttgcaattaatcatctgaatggctttttcttctttaaatattcctttattcccttttagggcaacagctattttggcatatttaccacaagaacttctaggcacatcgtgttatgaatattttcaccaagatgacataggacatcttgcagaatgtcataggcaaggtaagctaggatgtatgaaagatcttaagttgaaagtgtccccttgcttctagactagtcaacatgaccttccagggaaatctgtccactgaggatgtagagtcagccagcctaggactcttcaggtcagaacatctgtgtgaagaggaagctgatacctgcaggcactgtttatcccccttgtagttgccctgtgctgactgcatggcagtttctgaaagacatctcttgttcagagggttttcccagaccctgtaaagatttagtatggcccagactgatctgattctcttttccattcaagcctgcactacctcctgtgttttctgtcttgactaatgctgtggcttcatgtgcaggctcctgagagagaccaacattgaccccttctttcactgtgtctccaccagatcctgttcattcacctcagacatgcatttccaaaagtctactttttaccacctctgccatcaccctggttcaggccctcgtgcctacttagagacctgtgatagacttctcagggtttctctgatccctctcacccccagttcatcttccatagttatcctatttatccccagatagattgagcctggtaacatcagcctgcttaaaaacctcctgctttagactcaagcccaaatgcttttgacaggcaatcaaatgtgagaccttccaccttctggccccagcccacctcctcagtttcagtccccatccctgcctgcagaggcctgtgctccaggcacactgacctcactggcctctccccaaccagaccctgctgctcctcaggcactgctgggttcttccctccctccttctcttggcaaactcgtgttcatccctcaaggctctgatctcttctccctgtatagccttccctcactactcttcttgagggcaggagtcatagcctgtctcctcttgtatctccagtgcctggcacatgagaagggctcattacatgttacatgaaagaatgaggttgaataggtgagtagcctctgttgatttggatgttcttagaaatgagataagttctatattgcccttgggctttgtgattgagataaagcatgacattttggacagtgccttctcatttgctggtggtcatgttagagctgattccagttagatgtataacatgcagtcagtaattccctagagcctcaattttacagactatggaaaatcatgacagcttcacaaatgaattgaaaggctctgagttagaccctcagaaacaacctatttcctgagtgttgaccactgcagtttccttggcttactaaagagcgatgtcgttggagctcaagtacctttaatattttgtattggatgtcctgtttaatactttggtctgagaaaacaacaatgtccatgttttctttacattttcagttttacagacgagagaaaaaattacaactaattgctataaatttaaaatcaaagatggttcttttatcacactacggagtcgatggttcagtttcatgaacccttggaccaaggaagtagaatatattgtctcaactaacactgttgttttgtaagtacttttcctatatctgaagctccccttgcttcaaacagatgcctagggttcctcatctgggaaatggggtgcaggcaacatccagtatcacatcctttaatgccatcttgctaatacctgtgaagcctcaggactggcagaagctagaaaggattgttaacaaagggacaagcttcaggacttgtaccatgcaggccctggcttatgaaactgctccaggaaatagcaacatttccttccagataaagcagctaacctttgaattccacaggccctgcaccctaggcatccacttgtgctgctgtggaggaaggggttggcaatctatgaaaggctcattcaggcactagctcacactggccttggctgaggatggggaggtctccatacctgtcaggcagggggcccaagcactggcagctggaatgccatctcaaaaggctgctacctgctagatgagcagagggaggtgaaggagcctctctttggccaggcctgctccccacttttccttccccatagtgtccaaaaccccacctatggtaagagctgtgtgaggggccggggctaggtgcactgcaggctggcaggaggaggtgctgtaatgatggcagtaggttactgcagccaccacctctgctgaactgtgtcccacacatattaggaaggcctaggcaggcagtggggccaaaggccaggatgctatccattatattatcaaacagtgagacctgtttacccactcagacagacacttcattttctggcctgtccaggtccagagtggacaccggacaccttggccaagttgaatggtgcacagttctgagcaggcctgactcacgtttccttattgctgggatgttcacagagccaacgtcctggaaggcggggacccaaccttcccacagctcacagcatccccccacagcatggacagcatgctgccctctggagaaggtaactatgtgctgctggggccctggggcttgcccgtgggaaggtgcttgtggtcaaatatcctcccctaaagtattcagggtcccctccattcatattctgtggaacaagggaggcctcgaggggatgatgtgcggatttccccatgaatgcagaggacactgtcatgtcactttctctgttgagccggaatactaggagctcactgctgcacttcccaaagctgctggcccctggaagcccttgagctcgcaaactccctactccccttgtgctttcctcctgtgttggctagtggccatgatgtgaagtgctctttcgtgactgtcactaactcctgtggttggcaggcaggtgtctttcggcaccagggtgtgtaccatacccactgggctcccttctcaggctcagccttggccctgcccctgctgtccacgctggactcatccttcctgggaccatccccacatgcatggctgcagcccccatcgatgactcccacatccacatctcctggcccagtctctctcccgagctccagatctgtctctccaaatgcctcatagacagaaccacctggagtctcagaggcacctgaaattcagaatatcccaagctgattttctgcactcccctacctgattggttgtttaagccagaaacctggctgttgtctctcccccattatatctaaacacggagtcctgaaccttctatctcttaaacttcgtcaccactattgctatttcaccctcctcatctgctgcctggattattgcaaatcacttcgcaactctagtccccctctccccaccccatcctccattgtagttcattctccctgccgtggactttctaataacccagttctcatttgtgccttttctgtgtatcgtcctttggtactcctcattcccttgtggaaactgtccaaattcgttagtacggcatccaagaggcccctcatgatcggattggtacctgctgccccagtttcatctatcatgctctcatcatcatttatgatgaattccttggaggagtctcccaagttttaacctgcctcagtgctcctgcacgtgttggttgctgtgcctggaatgctttctcctccttacctctctgccaagctaattcatattcatctctcaagactcagctcggggttaacttgctccagaagctgcacctggccccagatgagttggttgcctcgtgcttgcctgtcaaacttacaacattttgctttagccattgttcatcttgttggttttcctgttaaactgtgagctccttgagggcagggacttgtctctgtaaccctggcacatacagtggtcttcaataaacgttttttttcagtgcatgaagggaaagaattagatgctgtatgaagggaaaaaactggcctcagatcctagaaggaaacttgagcctttccctgctggaatgccttttcctgacaagctgtagccctaaagtccctcaaggcacaactctgatgttgaactgcaaatggatcatgggataaactggttttactttaatacataatagtatttcttcctcagttttcccctttcctactctcagattcctttgttgtaggtggcccaaagaggacccaccccactgttccagggattccagggggaacccgggctggggcaggaaaaataggccgaatgattgctgaggaaatcatggaaatccacaggcaagtaacaccttctagttcctctgttaaaccagtggttctcaacccagggaaattttttcccccaggcaatattttgcaatgtcaggagacatttttggtcttcacaactgggtgggaggttgctacttaaacatcctgtggatagagaccagggatgctgcttgttaaacatcctacagtaaacaggacagttccctcctccccacccaacaaagaattatccaatccaaaatgttagtagtgcctagattaagaaatcctgccttaaataaagaagctaaaccaaaatagcccagcgctaaagagaattcttgagaagacttaactttcttatggctcaaggagcttctcagtgcggatagatgtacctttactttacaggaatgcaggagtagagctgtgaactatcagagtgatctggaccttaacaaaacattcactttttttcaatcaaagagctgcccaggattagtactagaaaccaagcagatcagctagttattactagctgtcttgggagagacttcctttccatatgaaagagaaggagcttagaagcagtccacctgggtctgagtcctgggcctgtctctctacctggctatgctgagacttacttaacctcttgctctctgttgatttaaaccataaaaagaaagcactatttcccaagaattgtgttaggattgtgagggcactcaggaaagttccaggaacacagcctgacatatagtgagtgcttaaaaattaattaaatctgtctttaagagcagtcgagagggaagcagttatcataagtctgtccaaatttggggaatagagaaggtggtaaccagattcttcagaacgaaacttaatgtaacataagaaaaggaagaaaacactgctgccgctggattctctcaggagaattagaggctggcctgttttccaattggccataaaggggctgttatccccctataggtaacacagctcttttccaaccccacaggattagtgggtgtgacttctgcatcaggaaggagacatgagggtagtgtgcagtgtaatcaggttcaaaccctatactttgcatttgcataccctgtattttgcttgagaccatccaagaacagtatcaaacagtccttgacctcaagaattttaaaatcttttataagtctattttctttatgataacaggaaaaagggagggtgcatgggccaaagcaagcaaaagaggaaagatttgaacttggccttagccagggtttgcaataagagtggatgttccctctagaaaagccagggctattcttgagtgggcatgtgagtggcaaattcagggtcaagaaacaagctacctaactgggcaggctttgtgtaggaaggagacacagagctatgataggcgattaagaaacacaagaaatgatactgtgcagtttggaagaaacctgtaagaccccatttgttgtaggatgctgaacaagcatccaaagtcttgtgttacgctttgtggaagttgcattggaatagggagagatgaaggtgggcatgtttgacaactcaggaatgaggccttatcctacagagatgacactgccaaaagagaaatcaatcatctaaggtctagcgtttgaagatgaaatcaggaatgatgaaacagcaattccaagatgagaaacctgggaaaatagtggtttcatagacataagtagagaaaggtgggggacactcagcaatttttccgtaagcaattagcagccgtttgtgcatgctgagaatacatgatatgtagttgtaaactgccgttaagaagcttctaatccagaaagaaaacttgttcactcataaatctagagaactaggcagtacaagaaccaaaagacttctgggtggtggaggagtggtctctgggtcacccaaaagctacattcatccatgtaggagctgagagtcctgtggttacacaactgccatcacactctccctaaactgtagctgcaatgccaagtgatggattctttcctgaggtccttcagcctgacaagtatttaggtggatttacagttctaagtcttcccttctataaatcttctgagagatatgctagataagaaaggcctggacccatttttcatcaaccactgccttcgaaggctgcttttcctgtcactactactaggctaccttttagaccctggtgccgtccatgtcctaagagtattcactagctaaacagtgtttgtggagaaggggacaaattgttttctgtggatcaaagatggaggttgatcttagaagttctcctccaattcacctggattctgtgaggaaataaaactggccacttacttgaaattcaccaactgaatgcaaactccaatccaagggctttgtcagtgagatgcttgactctagggactgcattctagatcaggtgcctgtagaacaaatccagcttgtcatctgtttttgtaaataaagttttattggaacacagccacaccgattcgtatctgtggctgctttcaagctgcagaggcagagttgagcatttgtgacaagacaccatatggcctagagagcctactatctggccccttacagaaaaagcttgccaaaccctaatctagatcttcatcccctttctcacctttaccccttaacaaagcacatacactccactgaaaaaagaaaaggcagtgtaattctcttttctgacaggataagagggtcatcgccttctagctgtggctccagcccattgaacatcacgagtacgcctccccctgatgcctcttctccaggaggcaagaaggtaagactgatgattcttagcctaagctagagaacctcttgcccaagatctgaaatgttgggggtgggagtatggaattgcaactgcgattgctgaaacaatttggactacttcctccttgaagtaaatgcatctgtgtgaggctggatacaaagcatactggtagggctagggaggcttgctgacatcctcagaggctttcttccatgtgagtggaagaagggagaaagaataaggaatggggaactgtcagttcatttaattgagggagcaattcaagagttcccatgagggaaagattattgagtacctcacatagaaaagtttctcattttctgccaggaattttcaagggagaaaatattagtgtctagggcaggcaatggaaacagcaatgccaccagcagtgctttggaaatcaagccatgctttatagctgcagaatacttggggatctgctgcctgggggttccattggtgtgacagcattggatccaagcagtggatcaatcaccagccctcatgaagagcttgctataagactacactataaataggtttaggaaccagtcatttgttttcatctttgctggagaacttataagcctaggcccatcttaatcgtaaattataaatctgtttatattgcctgatgccagtagagcttaggacagtttaaaggccatcattttggacacaatggcttcctttccccatctcctaaaacagagagagagaatatcaggaatttccataggcaggactcctagggcacaaaccatcaaaagcagggcaaggattttcaaaactgagctcctcggaggtttgttcaggttaccaagagctgtggtgttaccaggtgggatgggcgtggggatagttgctaaggagagagggtaagagtagaaatcctgcttctacaagggcagcaatacttcttttttatacaggaatcttctgcaaacatttctatttgaaaaagcgttttgctccccccaaaaaaggttgaaagttaacaaattaatgggtaagactacaaagtaagacctgggttcgaagcttggccttgccatgtgctagttatgtgaacttgtacaactttcaagccctagttttctttataatggagctaataatggttagggtagccagcatctttgcacgaggtcctactgtgagataatatatgtgaaagtgcttggcccaaaataccactgacagatgaagtctgagcttggtgtcccgtgacccccgcccccctgcccacaacacacacactgcttgccagctgtcttcttagctgttcttctgttatacctccaggtccttcctgcatattggatccaccatcttcttagggtggtcttccagtctctgcttcttaagttaacttttaggcacttgacttgactcctggtattaccaaggattctacttcttggttttgaaaggttatcagtccagtataggcttaaatattactcaaagaactttcatatacattgtctcatctcaccttcacaacattatagtgacaagatccaggctcctcagcgttcgttttataagtatggcccccaggctacaatcctgggctcatggcttccaattcttttcacatcaacaactaccagaaatcaaaagctgtgctctgcatcataaagccccagctatttttgaggcacttatgaaaattctcccttttctttgagaagaatggattataaaatggatctgtgagaagaaatttggatgtgttctcacgagatgagtcctgggcagcaggacttataagaaaagcagcttaaacaagacagttaaaactgacagcagtattaaatggtgcaccatacccagccctttccagtcactttcaaatttggaaggtccaaaaatgaaccatttagcctgcagttgtttgtcaggatcaagctaaaaaggaagcctaagtgagcctccataggtcgcaagagagtacagacatccagaagcactaaggaaaattcagataaagcagcagttctacaaatgtcatctgcagtctttttccagaaagagagggggcacaagatccttttaagggtctgcaaggttaaagctattttcttaataacattaaaacgttaattttttccctgtattgataatgtgcactattcatactaaaagcacggttgggtaaaattgctggcattttacaaaaatcagacaagtggcaccaaactatactagtagtcattgtattcttcaccaccacacactcacagtaaaaaaatagtttaaagccagtttcatttaagattgtccatcatggctaggtgcagtggctcacccctgtaatctcagcactctgggaagctgaggcaggcaaactgcttgagtccagcagttccaggcaagtctgggcaacatagagaaatcccatctctactaaaaaatacaaaaaaaattatccaggtgtggtggtgtacctgtaatcccagctactccggggactgaggtgggagaatcacctgagcccaggaggttgaggctgcagtgagctgagattgtgccactgtactccagcctgggcaaccagagtgagaccctatcaaggagggaaggaggaaaggaaggaagggagtgagggagggagggaaaatgtccatcattacttttataaaattctcaagcacacatctttttaatgctctgtgacaaaatgagaagtacacagaacttgtgctgcataccaaagtatgatgtttgtctcaaaaactacttgtgtgattaagttgtgagttgaactagctactattttcattggacaccatttttattgtatatggtcattcggttttgggtatttagaatactttttttttggaaatgaatgaagtgaacctgtcactttaaggaaaatgactgacatttgttgccaatgataaaatctgagctttcaagcaaaaattggaatttttagaaaacttgtctctgctactttgaccttgagatcttcctaaaacttaaaaaatgttgttgatgagatagggagtattaataatagtgatattttgatgctctataatgaaatgtgtcaatatatagaagatctgcataactcagtgaaccaatattttgtaactaaacaatgcaaggtatttcaaaatcatgtaagggtaaaagatccatcctaagtgccaagatataaagagtacaaaacattcattgatatggtttcagattccacattgcaactcacctttaagaaacttctacgtgtcaagttttgaagtggtatcaaaaaagaatacaattatttgaaaagtctattaaaatatgcctcccttttccaactacttatctgtgggaggttggatttccttcatatacttgaatcacaagacgtatctaaatagactgaatggaaaaacatatatgagaatccagttgaaaattattaagccagacattagatttgcaaaaatgtaagataatactctgcctggtaattttttgttactgttttagaaaatagttatttttcattaaaatactattcattatttatgttaacatgtagcgggtttattacatttaagaaatctattagttttaatttcaaatacagtaaatattgataaatacagcctacataagcaaaagttctttggagtcctcaatgatttttttaagagtgtaaaagggtccctagaccaaaacgttgctgtggaaataaagtaagttataatgccacctgctggcaaagcctgaaatcattgctgctcctgaaagcagcagctaccaaactgtttcctcacgtatatccagataggtctcaaagaatgctcttctttgagactcagccaggggaaggcagctggggtgagtgggggagattttgagacagagttctcttactgagtagtagtaataatcctccccagtagcctgtcttaacttaaaccacaggttactgaagttggcacctgtagtataagagatttacttctgttttcttcatttgactccttgagctgtgtctcttcacagcttgttaactccactttttcttcttcagaaatatctgtcactataagatgttttattcccttataggggaaacgtctagctgggctcattgaagtttaggcattggtcctaaagaaatatgtgggcatcatgattccaggcagttgaatgctcttgggattttattcagcctttaagttgcctctgtgggctcactaaaatggagagaaaagaatagttcgggggagaggttttttcttactctgaccatgtctgtctaacagttccttgtttgaaatcatccaatagaaaactgaagccatttgaagcttctccccaccccaccccatgcttcattttccttttggcattgctcataatactgattcaaacttcacacttccctccttttgtttgtagattttaaatggagggactccagacattccttccagtggcctactatcaggccaggctcaggagaacccaggttatccatattctgatagttcttctattcttggtaagtggcatcattattcgtttccattgcaatgagcttgcaaaacatcttacataaagtcaattttaagaactgaactgtgtgaaacaagctaatcctagataaatttgataggaacagaataaaagtttaaaatttgtttaaatctctaaaaagttgaccagtatttgagttttggtggaggtccaagtttgtgcctggaactcaagaggaggctacagctacctagacataggctttctcccatgtggggcataatctcttcagagagagaaggctaatgaaggttcagagataatgcctagaagggtgattagtaagcatatcagaaggtattaaaagtcattaagtgaaaagagtttgcttttcccatcacatccatctttttctcccctgggctttctagatctgtttttttcctaaactctcccttcctatttgcctttctttttgtaactcctcttaactggttacatcagattattaaaataagcttgactcaaatatttttaacatttactaaattttaagcgctttgtacttatttctaaaatgatcatttgattccttagagctgtctcttcacaacgtaaccccacttatttcttacgtatttttaaaaaattggttctttcctctaaaaaacagcgatataaaaaaagatagccatgcagcccaaaaagcagcatctcaccctaccattaaatgtaactttcttattaaaaatgtgcttaggaattgcttacttaatctgaagatgctttaaaaaagaaatcactgaccagtctttatctcctcccacaggtgagaacccccacataggtatagacatgattgacaacgaccaaggatcaagtagtcccagtaatgatgaggcagcaatggctgtcatcatgagcctcttggaagcagatgctggactgggtggccctgttgactttagtgacttgccatggccgctgtaaacactacatgttgctttggcaacagctatagtatcaaagtgcattactggtggagttttacagtctgtgaagcttactggataaggagagaatagcttttatgtactgacttcataaaagccatctcagagccattgatacaagtcaatcttactatatgtaacttcagacaaagtggaactaagcctgctccagtgtttcctcatcattgattattgggctagctgtggatagcttgcattaattgtatattttggattctgtttgtgttgaattttttaatcattgtgcacagaagcatcattggtagcttttatatgcaaatggtcatttcagatgtatggtgtttttacactacaaagaagtcccccatgtggatatttcttatactaattgtatcataaagccgtttattcttccttgtaagaatcctttactataaatatgggttaaagtataatgtactagacagttaaatatttttaataaatgtttcccttgttctat

SEQ ID NO: 15446 - DNA, 80688 bp, Homo sapiens
gtgcgacatttagggaaggcagaaagtaggtcagggacggaggtgcctgtttacccgcgccggactcaccgccgccgccgccgcgggatccgagtgcgggcgcgggcgcgggcgctcccggcgagccacggtgagtgtcaggccggcggcggccagcgacgcgatcccgcgcaccccgtcgggggccgttagcaccctcgcgggcgctgcgcccctgccgccgccccgggggcaacccggccgccgaagaaccctgcccgacgtgcccgctgccggccttaaagggcccgtgaccgctccctgcccccacccgggccgtggggaggctgcgccccttaaaggcgccgcgcccgtccgcccccatcctcctcgcgggggctgccgctgcgggctagggcaggcagaggtgctgcaggagcccttaaaggggccgggaaagtgttcgctggagtacccaccgcccttccgcgggcatcgctacctggcggggggagggggcagctagctgcctcttaaagggatagctctgcccttgggggcagtgactcggccgaagaggactcctagatgtgtccccgggagcttcggggatccccgaggggaccatgcctggtggctgcccctcaagggcgttgggcgaacggtgccgcgtctgcccttcctccccgcttcacttccctttcgggagcccgcgaggctgggtgggggcggggagggcgtctccgtcgggcttggggagtccaagtccgcccgccccttcggccctgtagccagggctggcgctgcacccgggaatccccggccggcacggggccgaccccagcctgcgaactttcgtggggcctgtgccgtccaggtcctgggcggccctcaaggatgccccgtgggtctgcgggcaggtgcgcgtcggcctggggatgtcgcccggagcccgggtgcgggccggccttggagtcccagagctccgcggagggcgcagcgagcctggctccagctccgggtttgacagatgtcagggaagaaaaggttcccgctcggctattgccgggcgttgacatcccagagagcttcccgtttgcttggaagaagacgaggaaggtagaggtgaacgtcgaccttgtggggcgcatgttagcctccccgaggggtcgcgagagccggcagcggggtgagctcaggtgcccgccggcaggagctggggagggaaggggagtgctggacaccggcgcctgctgtcaagttctcgccggccggtgagagacccgctgccgccgcgcaccccgcacctcctgacccctctcccctctccgcctcggccccttcccggtcacctagcgttgttttggcgctttggcgcttgcggtctcttccttcttccaccgctactcctcagcgaggaattattagccaagttttctcacccagcttccaaaaatcagattccgtatttgtgaacaagcttttcttgacactacccgtatacccgtatttccagcatcgtcgttttattaaacatccataaaagctgccccttagatgcattcatttcccacgacacctgcttgcttgtcatttgtccttctgacatctgctgttgttcacccctttaatctattattaaatgacaactattattttaattcttctggtctcattgatatccggatctgtgaatttgggttggtggagtttttaattaatgtacccgttgaatcatgagcttaaaataatcattgctgctcctgagcagttttgaataatatcatgctctctctgcttgcaagacttaaaaaaattcgctggtgttatatttgatttccatatcaatggaattcccaaatatttttgaaaatacaaaattcagtctttcagtccatgttttgttactcagatcattttactgataagtctttaacgcagcttatagaacatatttagaaggtttggaaatttcctggacaggatttgaaattgcctgtatcatctgaagctggttctgtagaagcattttggttttgattgtagatgcagccagtgaatgataacaataagttaaaactgtagttaaatttgttctttattcaaccctctgaagaacgaacagatctggtagaaaagcactaacctgggagttaggagctggacatcctggttctagtttaggcttgggctctcatggccgttccagtcggggcaagttattaaagatttctaggttgtgtttgcctctgatggaaagtaagacggttgaactaggtgatctcaaaggttcctctcttttgaagttctgtaagtctctaaatatttaatacatttgaattcaggttggtatttacctcctggcacctccagaatatctgagctgaagccctattttcataagaaagttaagcagatcaacagatggtgttttgaagaatccatttcaaatgatttataaaatgatgactacttacgagtttgtctgctatttgcagaagaggtttgcatgccacagggcaggaaaaggaagtggccatgttttcagatttatcccttcacaccaacaatctctgtggaatttatatgctaaaagatggagaagcaccatagaaagatttggctgtattaacaaaactgcatatgaaaaggtaaaaactagatagttaatatctctctttggtgtaagggttataatgtatctgagctttctttgtgatttcatcatcaactctcactgtggtaggaaaatcaatattaaataaacagtttcagccccgtgattacatgcagtgattttaggaagcatcatgataactaaagtaggtacttgcagggaagtaaaatatcctttctagaccttgaggtttcgttgggagctagggacacaggcatgttatccttctccacagtcttttttcattgtcaccttatcacaagactcagatttatcccaaatacccaccttgtcttttcttctccctctcatgaaataagacctgctctgactcaaccccctcagcatctcttacttcccacccaaaatgtcctgtctctatccccatcgtcccctcatctcctcccaattcagagaaagcaagtggacctctcctctgttccttttcttggcctctcaccatgggcaagtgcctgggctctggtggcagaagaatccatggctcaggtttgggctttgtggtcttggatgtgtgcttgactcctctgacctcaggtttctcctcttggtgtaatggcagtgcctgcctcgtggagtctgtgtgaggattaagggagatggtgcatgtaaaaggcctggcacacaggaagcctttcctttgtgccagctgccattccttctcacctctacccgggtcctatcactagaatattatttgtgctgtttgtccttagtctcccctgccccaccctgaaaaccttaggcttgacttaggagaggaaggatggaagaggcagagtcagacttgtggtgagcctgctgtgtaccaggcaatttacatgtgtctttacttggtaccctgggttcgtaagcctctctttcctccctcctgccagcctcccccactctcccatctcctgctccattcttagtacctgccctctggcttctctcgctaccacctttctttatatttcttctcaaagttttctccaaaactttgtcgtgagttcctggggcccatctgcccatccttattcctgagtggttgttcttggcccctttgcagtatttcttttatttttttaaacatggtctcagtcttgcctggttggagtgcagtggtgcaatcgtggctcactgcagcctcccaagtctcaggtaatcctcctgcctcagcctccagagtagctgagcctacagacacgtgccatcacacctggctcatttttgtatttttattagagatggagttttgccatgttgcccaggctggtctcaaactcctgggctcaagtgacccacctgcactggcctcccaaagtgctgggattacaggcgtgagtcactgtgctcagcccctttgaagcttttacctcacttgttttttgtcctttgaaatcctttcctctctcagcctttgggtcatgctggtttcttgattctcttcctgcacccctgtaaagataaatgtctgtcctagcttctgctattcacactgtccgtggcctggggtcccctctctagccctgacctgtctctcctgtgttctgctagcaggtccgttgtggacatgaatggcagcctgtaatctgcatttgtggtctcggagttacaggtttgcagactgcttgcaagcactgtcacattgagtcctcatgacacactggagcctacatcccttcattccccaggctgtcctaaaaggcagtttggttgggtagtttagcatacagactctggagccagatttcacatcctaagtattccctactggcttcgtgacttgtggtcaattttcttttgctctctatgccttggtgtcctcatctataaaactgggatcatagtagcccctacatcagagagttgaggtgtggattaaatgagttaaagcattggaaaaagtgtgccagtctattcatggcacattgcaaacactcagtgaatgttgctgtcagtcttgctgctcttcgttgccttgccggggtgccttggcctggtttgtagtggtctccacattcagcctgcctgtctgccagaccttgccatgtgcctggacactgtagtcaagctgaggggctgtccattccctgtaccagcccttggcccagtccatccctcaattttcacgtgtccaaatcctcctctgcttttaggacccagggccttggtcctgcagcactatttcttcattttgttttccttcctccccacacctggcagcaatgtccacattgatttttctccaattctcttaggttctgctgcattccatattgtgttgggctgtctctgaaaatatctcacctgctcgctcagcctgagcattctgggagaagtttatcttgctttttccaaaatgacaggcacagggagcctttaggccatggttgtccaatgcacattgatcttgtggaggaggagatgggatggggtgggcactcagggacggagcaggtggagggaacaggatgcacactgcatagaggtgggggtgcaacagggccataagtggacatggccgtaagtacttaggtctgcatggaaggagggtttgaattggggacttaacctcagggggagataagattggataaggtttagtcatctttgctgcaggggaacgttgagtactggcatgtaatggagagtggtttttaccttagtatgtgctgtccttttaaatagtgtaaactaattctttatctagcctggttaaagaaggggatggctggtctgcctaatttaatatttggctattgctctacccactgggttttgtgcatatactgaatgaagcattggcttgtatttattccttcaatcactgtttgaaatgtctgacctgggcaagttaattagcttctctgagtgcaaaataggaataataattattacgataatagcagctaacatttattgaacactttctatgtgccagcacatatgtgagtcacctttgcttattaactcatttaaaccccataacaactacatgaggcaggtactattatccttacttcacaaatgaggtggttttataaactgcccaaggtcactcagctgttatggcttggggcagaatttgtgctggtgaactccagagtctgccctgtaacaccctagtagattcctactgggaggaaacaccccgttatatcccttacctcactcagccgcaccatgccaggagcctagtaggctgacagcaattgggaaccagtcttattgttgacaaacatggtatgagcctcttttagagcggagctgcctgaaaccctccgcataagggatgcggacctggatgctacctgagcagcagctccaggggcttgtgaacattctcctcacatcctgttatgcatggctgtctctctggcctccccctgctttctctgcagcattgctctgacccaggccccctgtggctcagccagctcctccccaggcagctccttgtgtgagatgaaccttttaacataactcactaaccccacctcccaccctcatctagccatctgcagagctcctcactggggaggggaccttttcaaaggtccctcaccttcgtccttttctccctgaagaccaacgtccacaactttggtatatccacagtgttggggtgtgtgtgtgtgtgtgtgtgtgtgtgtgtgtgtatatatatgtgtgtgtgtatatatatatatatgtgtatatatatatatgtgtgtatatatatatatgtgtatatatatatatgtgtgtatatatatatgtgtatatatatatatatgtgtgtgtatatatatatatatatatatatatatatatatttttttttttaatgccagttgttccccaaatacatttagatagtaagggacacattgttttatgtcaagaacctgttacataaaaatgtgttatataatgttcaaatatatactgcacagtgaaattagataccactttttttttttcaaagaataaaaggataataaacacaggccgtcctgaatataattaacctcagatttgggaggcatggaaggacgtgccctgccctcagagctctcgtcctgagctctgcctttcttgagtgcgccgggagcaggatggatgggaagttggcctgaatctgccatggtgtggtactgtgagatgctctggaaattgtcttttttttttggcggggggtgggggatgccttcgcatcttgctcacttgtatctttctcacacctaagcagagggaagaagctctttttgccccctcgtacttagaccacccaggtcatcttttgaccagttttctgctctgctcaactcctttcaatcttcccagatgacaggccagctttgcctgctaagaacagccctggtgccagtggcatgcaggtggcacccctgtgtccagtcttccaggctctccagggtctggtcctgttcctcctccccagccctgcttccccgctcaacctccattcccagccacagccctgtgcccgaggttcagtcctccttgcctctccgctgtcctccctaggccacctcacttcacactctccctctggctagcggggtctttgcttaaattgttcccttgaggcctctcttccttgcccgtgcctgccttggatctcacttctctgtgaggtacctctgataacatttgttccctttgtgtgtgctctcccttttgctcttgattgccaaccattcattcgttcagaagcaggggtatgtcataatgagcaaattaccatatcatactgaatcaggatggccagttgtctcattttttaattgtttcatggttaattatcttacgctcacttcccactctccagtttcactcagttactccgtcagtgaagtttattggatgcctagcactgttgtgggcactgaggatacagcagtgaacaaaacaaggggcccgcaggaggggacagatgatgaatagtgaaacacgttcatgccttgttgtgagaagtgctaggagtgctaggatagcaagcaaatagagtaaagcagtagcgatgaggtatggtgggagggagggtaccttatctagatcacaggggagacctctctgaggaggtgacatttgaacttagcttcagaaagatctgggggaaagtatcccaggaagagagaacagcacatgtaaaggccctggggttgaaaggtgcttgatatttttgaggaaagtaaaggctagtgtgactcgattatgagctgcttgtgtacagatgttttctgcctcttttatactccctttaaccctgagcccagtgttaggaaggccttgtaaatacttacatacagaattatagcatttgtcattggttatatattataaaatagtaattttataaaataataatttatcataccctgcttagaaggcttttaataaaacattatattgcatataaacaaattaagggtttgaagggttttcttataaatgcactcctagcatgtttcaccaaatattactgttttaattgtgtttagtgcagaactttagacctcataattctgcttcatgtgcacaaccatcttaaaaacaggttttgttccaaaagtttatttgtaaggcactaggtggaaacttgggataaatttttctataagaaacaatgaagtaaatagtgatgtagtttctaggcgagccctcaaaagctatttagtggtgactgtagctgaaaacatactggttggtatcagcagtcgtcaagccttctgctggtagaccctcctctcagtagcattgtacctcatttgctgttagcaatcataggacccatttacctcagtcacttctcctactgtattttcagtctgttaaagttttatagaagggattttttacctttatacctttaagatttggttgcatgtgttataaatgagacagtagtgcagagagtggggaaaactctggactgggagctgggagaggcctgggctccagactgggcccagccactgactggctgagtaaatttgagtaagttatcctctttgaactttgatttctcaggttcttcttggctgtaaaatcctattgttttctcaccatagcagggaaacgtagatatacttcgttgttcaaacctgccctcaaatggctgcctctgatttcttcttgaagaagtatatggcactcagcaatgaggaactcaagcagttccccatgtgcagagctctgcagtgacattctcagtaggaaccttgattttgatctgctatctttcttgatgagttgaaagaaattttgtcccagaacttttggtccagataagatttctgtgttcttggccaacttatcttccatataattatgtaaattgttttttctttttaactcttagggataaaaatggtgactctggcttgcctgcttataaaatatagttataagtgcccttagggaatggaatgagtttgcaggagagagcagagctgaaagagtgtgggatcaaaaacaactttaaatgttaaatgcaaagctattttcagtaccctgctggaagaaaaaatttttttcaaggttttagaggatagaagaggtttttgctccaaagaagaaaggaacctaaggttttgcagtggtgaaaagtacctgatcctttaaccaactaccaccctcccttcccacctctgagttttgttttcgacatcatgaaccacatttgccatttgagaggtttgatatttaagtgacgttagtggcagagctcaactggcagtgttcaaatgacttaggtgcagagtgctgtgctgcaaacttccccagtgcattctagggtaagggatgcctcatagagagtgacagagcacttttagctctgcctctatttggtcagttgtgaatggtgtgttcctttttttccttacttgaaggcatagcgaggagttggtacaagaagttattgcttcatggacttcactttggagctagagggtggcattagacctagcctgccttcttggatgctggaataccagtggcaatgtcatctcttgttctctgctatacccctagcaatgaaaacagtgtctgtacagaaaagtctctcaataaatacttgtttattccttcaaaaagtgaattcagctttggataaatttttaatttcctccactctctagcagtataggcttatgaggttggtcttgcaaggtactttggagtttaggttgccatttctttttgacatctgtgtttttcttattcttcaggttggtcaggtatcagtgtcttttactgatgatggttgtccctgccctgctgatgttcatcttctgttatctttaattggctccaaactgcagcaaatctatagctgagccacattaactaaaagaaaacttgttgcatatttatttaggcatagtactacacatgtatttattcagtcaacaaatatctgtgagtctatatgccaagaatgttactagacccaaaggaagagcagaaattgttgttgtgaccaaggagcctgcagtttgattgccttgtggaacatctttatgagcattgtagaagggaggaggcttcatagaactggtcaggttttcacctttaaggatggtaggatttcgattcacagacaaggtgaggacaggtatttccaggaagtggctgagcggaaacagcataattaaaaacacagaagtaggaatggaccagtttgcattcatggacacagacttgtctaaaatggaaggttcttaaataatggtgggaatttaagtatggaagatcactgaaggcccaaacctgaagccattttagacacctagtgacttgcctaaagtgacagctgataagtggtagatccaggcttaaaataaggccatgggagctctcgaccactggcactggacttggctgtttcccagcagtctctagatgcaggatttgggtttgattggggattttcttttttctttctttctttctttctttttttttcttttttttttttttgtgatggacactgagattgggggttttagagtcatgagctggaaataggcaaggctctatttagcccactctttcattttgcagttggggaaactcagtgaggttaagtggcaagtcggagtttacctagtgagtcagagactgctaggcaatggataaccactggatttgttttattatgattatgattttagtgacatgaaatatttctctctaaagcatcagtccagtgttagtgttccagttggattggagcaatgaaggactaaatgcagcagagacctgacaggaggctgctagatgaatccaggaaggagagagagaagccagaactgagaattaattgtcaattatgttaatcagcatggtgttatcagtcaccctttagatttctagagtgcggtgaacatctgcctgtgtgagtggctttcaagtgtgtgaatctgcactgtactgtgaccaagataccttaatgaattctccagacagaaagtgccactatggaagtcgaatgttttaaaacaaatgcccacattttctggaaagagcaccagattaggagtcagatgacctgcattttaggctgcttctgctgcttagtcaccatatagccaaagcaaatcacttaatgtctcaaactgagcctgactccttatctgtggaacaggtataacaattcctgttgagcccttttcagtgtatgtgtgatgcttgtgtgagctaaggaaagaataggcattttgaagctgtaaagttgctttctggctgcagggagcagcagtgcagttttaatagtgaagatgtactggcccttacaggaatagcctaggagaaccagaagaaagttcccctacctccagggcatgtttagggaatctggcgctgtccaccaggtgggtgctgatgtgtactactttattggatagggccatgttttttgtttatttgtttgtttttattatactttaagttctagggtacatgtgcacaacacacaggtttgttacataggtatacatgtgccatgttggtttgctgcacccattaactcatcatttacattaggtatatctcctaatgctatccctctcccagccccccagcccctgacaggccccggagtgtgatgttccccgccccgtgtccaagtgttctcattgttcagttcccacctataagtgagaacatgcggtgtttggttttctgtccttgtgatagtttgctcagaatgatggtttctagcttcatccatgtccctgcaaagaacatgaactcatccttttttatggctgcatagtattccatggtacatgtgtgccacattttcttaatccagtctgtcattgatggacatttgggttggttccaagtctttgctattgtgaatagtgccacaataaacatacatatgcatgtgtctttatagtagcatgatttataatcctttgggtatatacccagtaatgggatcactgggtcaaatgatatttctagttctagatccttgaggaatctccacactgtattccacaatgattgaactagtttacactcccaccaacagtgtaaaagcattcctatttctccacatcctctccagcatctgttgtttcctgactttttaatgatcaccattctaactggtgtgagatggtatctcattttggttttgatttgcatttctctgatgaccagtgatgatgagcatttttttcatgtgtctgttggctgcataaatgtcttcttttgagaaatgtctgttcatatcctttgggatagggccatgttttaaagatgattacatttcacccccgtaagcctgggcatggacggaaaagttaggcatggatagccatgtgaatctattatctgtagacacctttcaggatagtgacaggcagctgtgaaccagaaaaacaagtgtcagaatctagccagctggccagtctggcattcttggatgtttcatctgtcctggggcattaggcagcgatccagaggaaccttgattagcctgggggattcatggctgagccagcatgctgtccaggtaatacctggctgcaaagcctgactggagatctgccaaatctaaatttctgccagcattacaagtgtatatattattattattattattattattattattattaatagcagtatctaaccttgactacctaccatatgccagcaactgtgctaagtgcttacatactttttctcattcagtcttcacagtattcatataaggtgggtaatgtcagttctgttttctagttagagagactgaaactcagacgagcttcagctgatacatactaagtgtaaaagccatgattcaaactcagaacagtctcagtccagtgcccagctgcataactgctatgttcttctttctctcttttcctggtacctgaaaatacttcttgtctctggttttgaggtttctgactgtgttattggttgatggatgggttgccacacagaggctcagctcagcacagctcttttttcttcatagcttatgacggacatcctcctggatactctggctggtgagcaaatgggtgccagtggtgaatgcagcagaaagactaactcttgccagctagtgcatgtgggtgaattttaaagacaacaaaagaaatttctgtaggtcagtttttcaaagagtaactggtagcttgtagtctacttaaaggccaagtttgatgttcatcaaagtcaccctgtaaaaacctttccaaatgctgtgattctgataacaataccatagaacattcctgtgtaattgacaagtagtttttacatacaatgtcttgtttagtcatcatcacaaccctatgagggtttgcaactacatatagttgcaaagaagactgggagatatctttagttgggaagccatgagtctagcaaaatctctgtttttaagggtggcgaggggagtgaatgaggggagctagcaatctgatgtgttgtggtggtgatggaagggataagtagagtttgaagctgttgtcagtagagttgggaggatgcctcctagtctatgacatctcctagtgttatgacatctcctcttgtggactgggaaattgcttagagtttaagcaactgtccagggttctacaactggtcagcggcagaggcagcacttaagtattgcttttgtgacttaattcactctctattcaagtttcatctttgctttctctattgaagttcttaaatattctgattcactgtatttagaagtcggcaggaattattaaagtgaacttctttgtggtatacactgttactgaatcagagtaaataaaaggtcacatgattggttgttgtgttaggtttaattgacgtgtactctgtatgatacagaatactcacatatcttttgtgggatatcattggtccaacagctttaaaaatcccaaggctttaatagatgataaaacacggagtttgtgtaatttcttgaaaaagttggccatcgagttcttggtcaggaacacaagcttcaattgtaacagtttccatggagacattagccttggcttgcatcatttcagctttcagtgcctttcctaggaatggagtgaactgctaaaagaagagctctggttgtggttgtcacttagagctctctcccctactgtttctgctggaggctgatttgcttttctgggtcttctcagttttttctgtgacctaagcataaattgtctttgagatcctggtaatctcatattttaaaagttttccacaaaagacaactgaatggaacacttttttttttcacccctttaaagtatttaattggccatcaacggtggctcacgcctgtaatcccagcactttgggaggtcgaggcaggcagatcacgaggtcaggagatcgagaccatcctgctagcacggtgaaaccccgtctctactaaaaatacaaaaaaaaaattacctgggcgtagtggcgggcgcctgtaatcccagctcctcgggaggctgaggcaggagaatggcgtgaacctggggggcggagcttgcagtgagccgagatcgcgccactgcactccagcctgggcgacagagcgagactccatctcaaaaaaaaaaaaataaaataaaatgaaaaataaagtatttaattggtggcaaggggctttgctagaagaatggacacctggtctcactcaagcttcttgtattagttgggataccaggtgagtccctctgttaaagagacccacaggcacaatggctgaaaccaggtagaagttttctctctcatgtactagtccctagtagatagtggtccaggcctagtatttttaacacatggcttccatttgatggttgaaggtaaaaacttaccatctcccagaggaaacacccaagggggcacacatccagtcatttttaagggaaagacccggaagcagcacattctctttttccagtagccggaatttgcaactacatatagttgcaaagaagactgggagatatctttagttgggaagcaatgagtctagcaaaatctctgtttttaagggtggcaaggggactgaatgaggaaagctagcggtctgctgtgttgtggtggcgatggaagggataagtagagtttgaagctgttgtcagtagagttgggaagatgcctgagtcaagggtgagaatctaagcaggcacacagaaaccagggcatgtgcagccatctagaggtcagggaagctcttggctctgaaactaagcagtggggggcacccaggcatggaagggaatgtgaattactcagaagacattaggttgtcagtaaaaggaaattcaccagtgtgactgaatcagtagaaagagcacttagactaggagtcagaagacctaggtttgagtccagcccttttacttcataacctggggcaaaaaactcccataaatatttgctttattatttagataatggcaataacagtgatggcctttcctgcctcccaggcttagtgtgagaccaaagggtgaggaagtactgtgtagactgcagccccatggagatgtgcacagtgtctgcccagcccagggcctgccatgggtgtatttgttgaatgaagtgtgaactattaaaagagttgggaaaaatgcattatactaaggagatcttaatcctggacagtcttctctaccaggcagaaaggttctgctctccactggtcaaggccttgggcctatgtgtaaaactgggtacctaacaaacacatgggcagacgcctgcagctccttactgggtagcacatgacacatagtatgtccttggcaaggccatttgctcattcctctgtgtaggtaaccaagtgcaacagaagtggaggtatagcccatgaatgtgaactaatcatttttaaatgatttggtccatgggcaggttagaagatgaaaccttcccaaggccaccaaaacttgatttcttgcttgaaaatgataagatgcagttataaaatgcttctgttgatttggaaaaaatgtgtgacttgttcaaaacaatatgtattaatagaaaatgtaacataaataagaggatacaaaaaagagcttaatgtttctatcttctgggcctagcaatagtgatttttttttccttttggtaggaaaatgggggctcagtggaataatcagttttatttctttttcttttaacttcatgaagggtttgtattgttcattttgttatttaatttgttcatttgctaaggaaagaacttctttcttggaactctgcggagtgtttttagatggactttactggaaaaaaacaggaattgaaattatattcacagtgcgctctaaactcttttaaaatctcatgcatggatggaggaaaatgcactgaaatatcaatagtggttctcacctcatggaattagaggtgacttttattctcatctccttctctgtggtttcctatttttcaacgagtgtgaattacttttatcatcatgaaagaccagttaaaaattaatctcacaaattaacactctcaagccaaaccacgaatttttgtttttcacaacctggcttggactataaactgtcacactatctcagacctatgcagattcttttctgagtgaggcattgaggaacttgttataaagatgatgctttccttctggaaatcaagaaacaagccaagggcttataatgtgttaggaaagatgtcctgagtaactttcctcctggaatctgactagcctttattacagctacttaaggaaatgagttttgtgggttccctgttcactgtgtcaccatttttttctttatcctgtactcatatgtacctcagggtccccagattttcttatcctgggattgcatgaccttgtccttggctctctcgggcccctgccgtttccagtgttctctgttcatgttcacaatattgttgatttggctgtggcttcttcccgcagtgttcttgtagactgaagagagcacattgctgcccttgtccctgtgcagcttcctcttcctctttatcattgctcaggtgagtggcctgagcagtgctcctgggatgaggtgaagagaagcagtcaagactgcagggaagggctaggggtgctgagctggccgagcttccctgggggaaggcactgggccatctgtccagcagcagttggcccacagctggcagggcaggctcaggagtggctcttgaagatggctgcttggtgtttgaagacagttcccagggcatgcattcatttgttgagcaccttcaatctggcagcctgtgttctagatgctggctgatgaccaaggctgacatggctttggctgtcatgggagtttcattctagtggtagagggagagagagagagacgatgtggtagagggagagagagagagacgattagcaggggaatcaatgaagaagataattacaggttgtaagaacagccccagaggaggttacaggtgcctgtttgtcgagaagtgggagggccagagttgggataggaacctatgtccctgattgcaaggtctggctccttctgtgtcctctgggctttctggtgggaagggaggaggtggaggagaccccttgcgagggccgagcttctcccattcagccagtctggaccagcctggggccttcagatggagatagcaaaagttgagggcataagctagggactggctctcttggtcactccagttgcccatctctgtacttccccaggtgaatagccatgttttttaaagaacacggagcaaatttgcatacaagagtccagatttatgcatgctgcagctttgtctgaaggcaagcttatattttctctcctattattttcaacttttaatgagttaccagcatctcagtgcccctccagcaaggatattgggctggtgttttcagggaacaattttaattaactcctccttgcctccctctcacccagccacccccagtccccttcctggtggctcagagtctggctttggcatgcaataagaatatttttgccttggtgttagcctttctgaaactcttgattaccagtgctcacaggacctttctgcagcactgtctgcttggctgtggactacccagaggagcttggtgtcaggcaaacttaggcgatttccctgagcatccttgttgagtctgcctttgtacttctttgtcaggtctagaggcttggccgtttgtcctgctcttttgtcccctccttctgggaaccctcaggaccctcactccatggagactcagcacccttcctcctgcaaacatcagtgatggggctttcccagccctttcccctatcttccttttcaaagaacaaagcctttgaagcttgtctcatacctgtctgatgcagtatgggaatctgtaagttctttgcctcctgaaggggtctggggaatcacttggctttcagagctttcctcgctcctctcccacccacagaccgattttaaccagagagtaagtcattcatgctgtgcttgaatactccttccagtcccactaggaagactctttgttactaaattctgttttcttgggaaaggggagcttattactatctcattttgttggttgttattaccctcctttaaaaatgtatctacatacacgcatgtgtgtacctacatgtttctatatttcccttgtgaatgtggccctcagagggcctggatttaaaccctgggagtggtagtgaccctttgggaaatgtatactttttgttccaaatcttctctggcttaaatttgtgaagttttgtttcagccttggtttcatagtttttcccagtttccaagataagtttggggctcactgtaatcagcatgtaaaggagaatatggccatcagctctgccccttaaattcatagtcagactcagtggggaagccgttcctgtcccatcttgcgctcgtggctctgtcagcctcaggcagctcctgcaccgtcctcctgcctgtgacagtgttgtcaggagttcttggtacctgggtgctgcttggcctcagggtgccagggctcccatgtggagtgtgcttgctgcagtctctacagcccaggtgtctctgcagccctcctcttacatagccacagcgtggtaaagtacatccagtttgcgctgtagtaagcaattttattaaaaaaataagtttaatatgtaagtggtcccttagttcgtttgaatggctcccctctctggctttggtttgaatgagctacacctggctggagccctgctgctcccctcagcatggagtcacctccctgtgctatggaggaaaggaagaagttattcttaccttggttttgagacaagacaagcctggagaaggctgtagggatgaaggagttgcccatttgtccagcatcagttgagagtctactgtgtgcctggcatcataggaagcctctggagtgctgtgagcaagaaaataatacttgatttatgtttttaagggttcttctcgctgcctgtgggccggcagtgaggaggacaagagcgcagcagggagatgggttaggaggcagttgctccggtgcagggagcagtgccagcttgagggctgctggtgggtattggtgtgagggtgggcaggctgcagataggccttcgcccattgcccttgccatgtgtccccatgtgtccccaggggaggctctgggcatcccaaactgtgagcctgccctttcccaagtgtgctaggccctgccaagctcctgcttcatggcctatgctgttcattccatctggaatgctctcttccccctgctttccatcctagctgagtgacattgggcaagtgaccagatctctcttgagcctcaatctcttattctgtgaaagagtgctcatggaacctactgcatgggaccatgaggataagactatagttgagtgtggtgattgcagtagcctccaaagctgtctcctgcttccaatttcatcccgctactgtgcattctttacacagcgatcctgtgaccgagggtcagatcagggcaggcctctgctcagaatcctctccacagtagcttcctgtcccagtcagaggaaaagccaaatcttagcatggccctcagagcttcctggtacttctgacctcatctcccaccccaaggccatggtgtatggttgatcatgctgggttctgcacagctcattgtggtgcatgtaagtggcactcacttcctccccaacttatgcattgcacaacttgtgcagctgtacatgctgctcctacctgcgcctctctagctccactccagccacagtggaatccgtgttgttcttcaaacacaccaggcatgcttcctgtttaagctctccctactgcctgctcccttggcctggaccattcttcccccagaggtgtgtatggctagttagctcaccttcttcaggtcttttttcaaatgtcaccctatttaaaattgttccatctgggtcactgccccccaaatgttccctttttcccttgctctttatttttcctcctagcacttatcaccatctaatatattatacgttttccttatttatttggtttatttttatttatttatttatttctcaacagaacataagcttgatgcaggcaggcaccagtgttaattttgttcactgctgtatccccagtgcctggattggtgcctggcagtaggggttcagtgatgcatgagtgaatgagtttggatgcacaaaggtaaagtattgggtacggtgcttagcacactggaagcacctaatacatggatgccagtattttcattgtctctgttaactctccaggccctggctcaaatgtggctttctctgagcctttctgcagtcccttctcaggctgaattaagtcaccaccacctgtgctctgtgttccccttcattttgccttctctgtctgctcggcatttatcacactgcagtagtgggcttatctcacactttttcctgttccaattgcaattcctgtggggcaaagactggcctgttcagatttgtatctcaggcggtctgcgcccccagctggcatgtggtaggagcttaggaagtgcttgctgctggtggctgtgggaggtggaaagagctttttaatccatcaggacccttacaagggggactggctccagcatcactgccgtctgatgtttgtgccccctcccaaggggtgtcaagggagagcttggcaaccacttaaatgagagtctccagtggtatatttagagcaaattttggagagaggagtctcttggataacagcatctgggtgacctgattgtttcacatataagagtttggctttttggctactcaggctttgagaggttggggtcattcaagggaggcagtgtaatacccatgtgttcagaggtggctgggacgagagggtgcaggagaaaaggcttgagctggcctgtaagggatctgagttggtgaagggagcacagcttctgggggtggcagaaggaataggagagctgcccctgccatacctggggaggggtggttaggtaggtgccttgggaggcatggttaggtaggtggtttggggccatggggggaaaactgtaatgccagggcaattactttggcctcttgtatttggcaggaggggtccacactggggattgtggtggcgtgagggagagggccctgggagagaagctctagagtcattttcttttccagaggtggagttgtcttggggacctgcacgtggcacgcagagcccatgctctcaggcacctttggggtggcagagtttcaactgaaccaacagaggacaaggggctgagaagtcggaggccttggctgaggtgcccagtttcttggttcactttctttacctgccaggttagcagcaagtgagcaaatccctcctgcctttgctcagcattagcctcagagacttgaggagagctgggccttcaggtgggagcctggtggccacactggagaggaccaagcttgacattgagtgtccgaggggctgaaagttgttcgctcatccagagatggattcgttctgcaaacatagggaaagttcccttcccattcctcatggctgtttgaggatggaattcctgcattgaccttggcctttccctgatcttggcctttcccctgcactatggcctctctactcttaacattacgccccagcccttttccatgggcccctcgtcttccctatggccatctaaaatggccgtataatattctatcaagggaatgttttcagtaagccatgagcttgatatggagcatttagattgcttctaatttttgctctttcagctaatgctacattaagccatctctgtgtattatggaatcatttcattagttggcatttgtctagctaatggcaatggcccaagatttaatagcgaatcagaatttcttttttcaagaagaatgtcatgaggatatataaaaaatttacttaaaatgctaggaatcatctatgttggggttttcatgaatgaggaagcagggaaacagtaacatgaaattagttgtaagtgaaagactgtgtgtataaaagtaactcgtgacttgtttgttcctgagtgtggaggggagccaataaatccttggaaggagcaatctacctgtgaaaatcaaagagatctgtattcctgcatctgatgaaaacataacaaacagtgatctcttcttaaggatatttttagaaatgccctaaaacaagaaaaagtaaataagatttccgagaaaaaacatgtctccttaattccaaatgagcctctctggaaatgccatttagtagtggaagcaggttgtagacttgctgaaaggatttggttctttggttattaggaaataactagaatgaaattgacaaacagacaacactgacttggtccccagtactgctttgagcctgaggtatgtgttggctttggaatgatggggaaggcttcctctgacttgctgatttgttgtagttgttgttgttattgttttgagatggagtctcgttctgtcaccaggctggagtgcagtggcgtgatcttggctcactgcaacttctgactacctgattcaagcgattctcctacctctgcctcccgagaggtgggattataggcacgtgccaccacacccagttaatttttgtattttcagtagaaatggggtttcaccatgttggccaggatggtctcaatctcctgacctcatgatctacctgcctcggcctcccaaagtgttgggattacaggcatgagccactgcgcctggtctgttgttgtttttattgtttcagtctctggtggcttattatgtagacttgggctgtaagctttgcatttcagtttaaaccagcaaatgtttacactatataaggttgcaagggctaaaactttagggagaaagaacccagtgcacccctgtttctgagaagctcatgaccagggagtgggaaggataaagcaatgttaaaaccaatggttattcaagggagattaagaagggggccctgggagagtcagctccatccttttagagaagggaggagttctacctcactgctgggcagggtggggctaaggggcaggagaatcaagaaaggttttatggaactagttgcatttgtcaacatcttgaaggacaggctgaaatggaggctggacattctcagcaaaggtaaaaggcctgagtagaggagatggagatggaaggacatggggcaatgtttgggatttggctgaagaattgcatgcctgtagtaatggtcatagtagcactttatggagagtatcaggtgccaggcatggttctaagagctttatatgtagtaactcacttaatccatgcaatgaaccaaatgaggtactgttattatccccattttacagatgaggaagctaagataaatagcaaggaattaattgcccaggatcacactgctgtggagccaagatcagaccaagttcatctggctccaggctctgtgcttacgaccatgaagctgtcctgtctctgatttggggaaagaacagtcactagaatcagacagatggacagatgccgtatgtttagaggctgggattatcaacattcaggaatgcagaggtggaaaagagaccagagatggagatgaggggcattggagaggtggggatgggaggagggtttggtgagagccgtgaagggccacaggaagacagagctttaaggagaagtttgtcagtgaggcccagagctgcagacaatcccaggaggtgagacctgaggaataggtctgggctgaggagaaagctgtgagggcctcgggagaggggcagcagggtgacccaggctggagctgctgtggtgtcctatcctggctgcagagtgctgcgtgttcctgggggatcatagctgttgatgagtatcactgtccctgtcctcttatctgtagaaagaggtgagtgtgacagagggggcaggtgagagctggcactgctaatttggcaaacctggtgacttttctgcagcctaatgatttttgaaagctgtttgctatgctgaggcacaagtgtgacttcccccatctaaatgctgtgcaatcgctattttccctggaaaattgggcccatgtgggctctgtgtgtggtttatttgagttccatttttatagccttattaccttgtccccatgatgcaagaggcctctctcttttcttgagctttgctgtgaaaattgtttcttaaaaggcacaaagtgatctctcgtcatctgggtggtgctcgctccacaagcagcacttttctcagactccgcacacacttgtcatcgcccctgcccccacttggcaggttcctctgattgttggcaatttactgagaacttttaggcagctcttgaagctcactacctatgtgtttgtcttgatttcttccggaagagtttgtgcatgtaaatatccattcagcctctttctctccgagatgttgccctgccactgaccgtgcttggggctgaaacccagtcttgtcctctggcctcgagctgattaacaatagcagtcatcatgtacagagcctgagtggttatcaggcactaagctaagggatttacgttcgtgatcttaattattcccaatttctttgaggtaggtactattacttcccccattttacagataaagaaaatgagccttcaagggatagagtaagttaccccaggttacatagctagtacatggcagagctgggcttaagcgggcctttctaaccttagactccatgtgctccattcattcattcattggcaacaaatgattgtctgcaacaggctgagaactgttgtagacccagggtgtacagcaaagggaaaaaaggccaaactcccaccttcagcttatattctaacttggggaggtagagatcatataataaatgacatatacattatgctatgtggtaatgagaactatggagaaaaatgaagcaaggaggtcagatgggaagtgggaggattttgaggagtggtcaaagaaggcctcattgagagtacaacaaattgttaggttaacaaacaaacccccaaatctcagtgtagcaacacaacaaaactgcacttctctgcagaaaaaattccaaagtggctgctcctggttagcaggcagccttccttgcagtcatccagggacctagactccttttatcctgtgtctctgccttcttcaagggccttggtttcctttgcattcaaatgctggagcgtgaggaagaagaagagagggtagtttgtgaggaaggctttatggaccagtctggaggaagcatacctccctcccacccactggccagaattcagtcacatgttcactcctgactgcaagggaggctgggaaaggaagtctggccatgtgccgcctaaaaaaaggaagtgggttctggtgaactcatggcatggtgtgttgcagcgagtgaggtgaagaagtgagctatgtgtttagctggaggaagagcattttacacaaaaggagcagcaagacaaaggctgctggaatggagtggggaggagagaaggagagtgggagaagatgagggcatggagttgtgggggccaggccactggggtcactgtaaggatttggttgccttgggaatgacaagcagagccagaacatagagttttgaaggaggaacgacaggatctgaggcacgtctcacagggctcactctggctgctgtgttgagagtggactgagggagcaagggggatgcaggggagaagcgggcgtttgcgggtgttatccaggtatgtgaccagaagggctggccctgagccggggtggtagaggtggggagaagccgttagatttgagatcagttctgaaggtgggccagcaacttttgctgtgggattggtagtggggcatgagagaaagaaaggagtcaagattattctgaggttttggctttgcctaatgagtattagtctcacttcctaccctcagaagcaagaggggaaattttttggaaaaggatatctgagtgttctctgggccctgacctgtcctccataacctctttcactctgtgatacttttttcagcacagatgggcaattcccattcatgactaggctttcagacatggagagggcacttggagtccctcctggcacacagcagaggtgaggcagcactgggaattgtctcactttggggtctttgggtcaaaccttgggacccctttagagtgacatggcagggactgagtgtgccctctaggggggtgagatatgcctactggagtccacttccaatgcctgccatctgcaaacactggtgaggccctggctgaagggtaacaacccacaaaagtgcacaaaaggaggaagttctggaatgcgagttgatgctgccagcggtccggttggctccttgccttctgttctttgtgtgttgacatcagacctctctactgcagacaggctgccctacctgagggggcacagctgccagcagcctcagtttacaatcctagcaaaggaggagagcctttctctacatctaggtatcagtttaagggaaaagcctctgtgtttgagagtgggagcggaaactgtttcccacgtacttccttggcagtcatgacctgtcaaggctgaaactggagatgggactttttaatagaccatgatctcactgggagcatatggggaagaaagttcatcttagagatggcagggcgtgagctgtgaaaacagatagtgcacacctactagatgctgggcccccgctaggtattttatttcactggagagcaaaacaatatatcatccctgccctcatggcacagatggcctcaagtggctaaaccatagaatggctagctgagagaaatgatagttctttctttttttctttactgattgcgaatggggttgtatttttaattttggtatccatgtgttcattgctagtatatagaaatccaattgatttttttgtttttatgttgtatcttgcatgtttgctaaactcactaattagtcatagaaatttttttttgtttattccccaggattttctgcatagacaattgtatcacttgcaaatagggattgtttcatttcatcttttccaatctgtatgttttttatttctttttgttgcctgattgtgtggccaggacttctagtcctatgttgaacaagagtgctgggagtgcacatccttgccttgttcctagtcttggggaaagcatcagcctgtcaccattaagtgtaaggtcagctgtggatttgttgtagatgccacttgcactttgctggcatggttgtgagtaggactgtgggttttgtgtgtttgtgtgtgtgtgtgatgtttggctgaaatacagtggttattatctacaagttttctgtcttgaaacagggagatttgttggggcattttctctttgtgctccttggcatttctgagttgctggtctcctcagttccaagtctgagctatatgcagaaaaggaaatgcaggaagctcaccactgtgttgttccttggatcctgaggtcccagctggtctgccttcttcagactgccatttggagtcttcttatagtcatctagcatagaatgcccaggggttttcattgttcttagcaggtggaatcagggaaagtgcacctgctccatcctgctgggagtggaaatggttgggggaaattggagcgtataggtcggggctagtttagatgcaagggctccgttctgtaggtgcaggagggccgtggaggctcagccctgacagcagtgggagggggatgggaagagggggagtggagagagcctaggtggctgctgcctgtgtccaggcaggaggtcctgaagtcctgaggtcctggccgtgacagtagaactgcagcagaaagaaggacaggaagttccatgaggacagtgaggaagtgcaaggagaccaggttggtctgaggtttctagctagagcagctagctggttctgagataacagagacagagggaggggtctaagcgtggcagaggggtgtattctaggcattgtagagcagatctggaagactggacttactgtgcttcccctcaggggaggcttcacagaggaagtctggctgctggggaaaaatccagggagtgtgcattctgggcagaggaattctggctgctgggtaaaaatccagggagtgtgcattctgggcagaggaaacaacgtgggaaaaggcacagatacagaaaacggcgtgatgggcctgttgggactccagctagctgaggcataagtgggtagttactggttccatgactgggaaggatgctgtaggagtgcacaaaaggaagaagttctggaatgcgagttgatgctgccagcggtccagttggctccttgccttctgttctttgtgtgttggcatcagacctctctactgcagacaggctgccctgcctgagggggcacagccaccagcagcctcagttttacaatcccagcgaagggggagagcctttctctacatctaggtatcagtttaagggaaaggctctgattggcccaggttggtgatgtgcctgcctttggacccgtcactgttgcaagggagtggagagttctaatctaggccggatcgtctgcccacccctgttggggcaaccagagtcttttaaaggagaaggcagacaaaatgcatctggggaagataaaaaagactgtttaccatggcttactgtaatagattttgaagaatatgtagtctggcagtgcaggaactcttcatggagattaaagcaggggacttgatcaaagttaggttttattaaaatcattctggacactgtatggggttgtgattggaagtgaatgacaagaggtgtcaaggcgggttcgtaggccactgctttagctccaaggagcactgatgaggcctaagctagcttagaatcctgacttactttgtttgcacttcacctgtagcgacagcatcagtgaggtggagaacagggatagagtcctagagatgttagacaggcaagacttggtggccagatggaggcaaggagaagggggtcttatggaggattccccactgccaccaagggcataaagaatgagtctctggagggctagccttatctttggaaacactattaagtgttggcagactcgatgtaccttattgcttcttcagaagtgttagtgttgttggcttcttgtggtatccagctggaaaaggaagctgattgattgcatttccctccctttaaagagcttccttttttgagaaatcagaagataggtgatacagtcaggactgccagtggagaaataggttggggagagggagacactggcttggagactctcctgcccccagcctgccccgaggcccgcgagtctgctttaggcacattcgtccttttggcatcatccttgctgggaaggcttttaagggatttaaggaaagaaatgacacaatctgattcatattgcaccagatttcctcctctgttcagaatagactatgggtggaggtagagtgactccaagagtagcagcagggaagcagggcaccaattaggagactgtcgcagcaatctaggatggggacggtggaggtggtgagaaatggtcacattctgaatacattttgaaggtaagaaccagttttagtgaggattagatgcggagtgggagagaaaggagatgaaaatgactccaaatttttggtctgggcagctggaagaacattgtcttaaactgaggcggacacaacgctgggaggagcacgtcaggggtctgtgttggacatgtttaagtttgagacacccaccatgtcttacacaaagctcccatctacttcttacttgacacaaacagttggatgtactggtcaggagttcagagcaggggtccaggcttggagagaaatctgagcattgttagcatggaggtgatatgtgtgaatccaggagactagttgagatcaccaagggagtgacagagaagagatgaaaacaaggactgaacacgctgacataagaggtggggagatgagggagaataagcaaagataagccagtgaggtgggcggaaaaccaggagagctagagggcatgattaactggtgtcaaagctgcaaggtaaggactgagactttaccaatggatgtagcaaaatgcaagacaggccaaatgcatatgctgttggacctaagcttaactttgcaaataagtcatagttccttcccagaaggagaatataattttgcaaaaagggatcatttaagatttattaaaataaatctgagaaagatgtgaagatagtaccgtaggaatccagcagaaggaaacagtgcttctggcttttgtggggaggattgagtcagattcattcataccttcattcatttgtgtgttcattcatttggcaaaaacttattgggtgccaggggttgcggggaggagggaagagagagttgttatctagtgggtatagagtttcatttttgcagatgaaaagagttctggagatggcttgtggtaatggttgaataagaatatgaatgtacttaataccattgaactgtacacttaaaaatggttaagactgcaaattttatgtgacatgtattttctcacaattaaaaatggagagagattaaataaaaaacagagcactttttggggccccatcatgaacttggtctgggatatgatgtttgaaatggatgcgccatctcagtagatggaggtaatgtggagaagagtggaggaagacgtccagctcagagggttttgggaactatcagtcctgtttgtctggatggtagggtctatcgggggaaaccatgcaagctgagactgcagccgggccagttggtgcaggcccagcatcctggctgtggatttgggcctgccttcttagattctgggagcctctgatggtttctgcccaggggagtgtcattccaaaggtgtgtatttagattaatttcattagtccttcctgttaaaccattgcctattaaaagcagtggggttgaggcattcatttttatggtgaaaattctggcctagcagaattttagatatccaagcatgtgtcaatgaagtgagtaggttatttttccatccattttacaagtatttattgaggatcatctaagtgcccgtagtgttctaggcagttgggggtatgggacggggtgaatttaacaggtctcttctcttaaaaagcctacagtctagagaaaccccctctccttcctaaacaagaagttatgccacaacgtgccatgtgttaccataggcatgccgccacagttccatgggtactgagaggagggggtgcctggcctgcctggaacactggggaggcttacagggaaaaactgtccaatggatttaaaggacaagcagggattttctaggcaaagaagcagaatgggcatcccaggagtatggtaaatcaaaacttattgggtgctatgaatttaaagctaaacttttatttcattggcttttaggtggtgctggctagagtgtatacgtttggacccaagcttaacttttccaatgtggaatcctgggccttcattggtaagtttgtttgatgccttcttaccaaattatgctatcaaggattggtatttggaatgaaaggcaaggtagttatcattggcaagttctctgtggaggttaccagccctggacctggagaagcctgtagcacaggctgaaggggtacataggaaaagtgaaatctcactgtaggtttctgtggtagatgcagagagggaggccagaggaggggaaccaaggggtgcgggggatggatgcagcgggccttatggagaggtggagctttggctctgttttgaagggcaagctagattgaaaaaagtccggggaggagtgaaagaagattttcgggacttgagaacatagaggtgaggtgtaaacaaagtgggcctagcagcagtcccataggagcaaaatcttcatcgaaaggagtcacgggcaagaactgtggtgggatctgctggcgtctgatgattctagtccatcagcaaactttttctgtagaggaccagatgctaaatatttttggcttcgtaggccatgtggtctctgtcacagctactccactctgctgtggtaacatgcaagcagccatagataatatggaaatgaatgggtgtggcagtgttccagtaaaactttatttacagaagcaggtggtgggctggatttggcctgcgggatgtagtttgccaactccttttctagaccctaaatgcccggctaaggcacatagactttatcctgaaggcagtgggaagccattgaagttattttggataaagaagtgaagtggcagaagtgatgtttacattttaggaacattcatctgatagctggacaagaggcatgggccccttttggaaggcagcagcagtcatccaggcatgaggtcttgcggtgaacagtagtgaaaatggaagcaaaggatcaatggaggagatactgcaaagggagaaccaatagcgttttcagtcttcttagacttaagaggcaggagtcaaagaggatgaaagtttaagcttgcttgtttacggtggtatctttgacagaaatgtagatgttgggggtggaaaggatagctgatgcatctggttttagatatgttgaattcaagataacagtggttcatccataagaaatgtccagcagagaattggaaatgcagggctgaagcctggcctgagaagattaagtctagagatgtggaatggaagccataggattaaacacggtctccccaagatgagcagtgggctgagctgtggggaatatgcgtaactgtgggacgggaagacgatggaagagacccagaggccatggaggagagtcccgggaagggaagagaatggggcagcagagaccagggagaacggacctgaagggaggctgctgaatttgtgacaaggtctttgcagatggccttgagaaatgtaatgtcacaagaggggaagggaagaggaagccaggttacatggagttggacataaatgaaggataaagaattgagatgttacaaaaatagaccgctcatagaaggtttgggtagtaaaagaagggagacacataagatttagatacttgcttgtcagaataacctttgctttagctttgaggcaggcaaagcatgctgtgaccagttttcatttccttctttggagccaagctgtgtttgggagtttgtgtgtaccttgggcttgtgattgtgttcttatgctcccttttgaggtgtggtgttcgtaactctgccacaacttgcaccacggaatccagcccgtgtttggacccttgccatgagacaagatgtgatctgttggggaagtagttgcatttgtataagttggaggagaaagtagagtggaccaaaaattgaaataaaccttcttactacagagtctatccaagtatggggacttgaggataattcctccagtcatgatttaattatgtatcaatttgtgctctgagtattttgagtgtaccttctttggtttgaattctaagtagtttttgacttggtttgtgtgaatatagcagttagagagctggtaacaaaagcaacagttgtaactggtttagagccatgatttattgaacactcattatgtactaagtccagtgctaagtgctattgtgtatcatcccatttcatctttgcaatgacctatgtggggggaattattaatagtattcttatttcagccagaaataagtcatagatgagtaactatgcaaggttacaagggatttgaacccgggtctgtataatccctggcttatgctgcttcctactttatcttgcctgtgtctggaatttttcctcctactaatgtagaaggactagagatagatcgagtccctcaggttaaatattcagaggctgtagtgggtgtttccacttcttaggagtctattgaaagggcagaagaagtgtgggaagtctggaagagactaaggccaaacctcaaacacttactttaactgtttccccagataaaatttagttgaaggcagcagccttgggcttggaaagaaaatagcgctagaaggcatgagagtcagattccagtcctagcattatgacaattataatgtcatttttgtttaaactcttggcatttctctccaattacctccagctttgagctccaaaggcaggctcctattttgtcttgtttttcactgtatccccagcatcgtagcacagaatctggcatgtagtatgttatgtactcactaattatttattgcttcgaatgcaccaagggacttggtacaagacacttagcctctcaggcactgctcttggcatcatggttatagaggtgaaacaggacaaggtctctgctgtcgtgaagcagacgtctacatgtgtgagatgtagaatgtgacgtcaggtatgatcatgctctgaaataaaagacagtgagaccggggtggagagggaagggcctgtccaagaagtgagacagtgagctcgttgggggtaaaatccataaaattcctcttggggtgactacagattgtcagctgcgctgtcagcaccttgttttaattgttttacttggctgccattgccaatgcccagctgactgctccctgcagcgagaactcccacctcaggcctcgctttcttcagctctgctgagcgtgcctctcctgggtcggctcccggttctcctccagctgctgagattccagcctccacagcctgctctgctggttctctgttctttgtccttagcttctggtttggcttggtccctttcacgtcatccttaacgtcctccctgggtgagctcatccaccactcacctctgtcttgaagacacccggatctccatatccggtctgaacctcctcccagtccacactcctagtggtctgccccgagggcacctcaacctgtctgtcccctcctgagtgccacatgcgtctttctccctgtgctgcctgcttggtccacgcccctcagttgcttctgcttcatgagtcgtcctggccttgtcttttccctcatattcccttggttaccacatcctgaagagctcatcttctaatttgtcaactcagttcttctctgtctctccactcctgtgtttaggattcatcattttgttctatgacagcctcttaattggtcatcctgtgttcatctttttcctccctcattccactgcccacattcctatcaacgtgatctttctaacacatgtctgatcagagctttcttttgcttaaagctctccaagagctcctcattgcttagaaaataaaagctaacccccttcagcggggcctgcagtcttctcatcatctggcccttggccccctgcagcttttgctcccccacccccaccccactttgggttttcctttttccctaactcacatttctaacctcagcctagctaccaacagccatcacctcctagtgcctttgcaatgctgggccctctcctgggaatggcgtggtctctgttcaccctcttgggaactcaactccagtttcccccaaatcttcaggacaccatccttccctacccagcacctctccatgacctggaaatgaccttcctcctggctcccagaacaccctcatgtctctcttgcaaagcacttatcggtgttactgttgatttacttacctgttatgctcagcaacctgagctccttaagggtggagaccacacacacacacacacacacacacacacacacacacacacactctgtctctctctctctgttccaagtgccagcatagtttacctggctcaggaagtttttgttgtaagagtgaggagtggtctgtttgtgcagccaagcaacagattcataatgtgataaaatgtacctgaaatgggaggttcattggccattgggtttattggggtgctcttcttgtcagctttgagtgcaggacaggttgtgttgggcttgagtttgtgacgcctgttgtgtctcccagcatgctgagacctcaggaatgtctcttctctatattctttgcccctgactttttatttttttagctcttgtttttgatggaccgataatagcaattcaaaatgaaaaataatccatcaaggaattctcaggaatgaggtccacccaccttggtcctggatgaatcccaaatttcctaaataagccagaatatctattcttgcgaactactgtctgacagcctttttcccccttaatccagctgagaatgcttttcttgaagggtaaggatacctagtggcccttcatgggggtgcctgagggcctctttgtcttcattttaaaccttgtaaagtccccagtgaatactgaggagtctaacaaataggaagaagctctgaccccaggggtcccaagtcagcatctgtactttgcatgggagctagcacaatgcacctagccaatagcatataaactctcctgttttcattcagtgccttaagcttgttgcttgttgtgtcttcttcacttcctatctctgccagagacctgagaagttgtgccaagagtgcagcttttatttggggcctcacagtaatctaggaaagcttttcagaagagagccattctcagcaccgaggtgtcctgcagaccaggacactccagcaggctcttggaactgctttcctgggatggaaatgcttgtgatgctgcctccccttgtagggactttccatatgctgttccctcagcctggaatgcatttttctcctggtttgcctagctcatgcctgttcaccctttggaactcagctgattggcctgcctcctcctcagaagcctccccaacctccctgataagaaggctaggtcttgtcctcaccattcccatgccagcatctagcgcttatggactgctcaccttgtgtcaagtactgttagaatgcttcatgcgtagctactttgtattaggggcttggtagatgttggctgaggtaagtgtcatcattgtcccaaagacactgtgtgaggaaactgaggcctcgacccattgagtaggtgacagagcaggagtttatcccagatgctggactgtgggtttacgctctgacccttctatacgccaccgttccctctgctccaagtccttgcagtctgtccttttccagcacttgtcatggaggtcatgacctcggtttgtgtggttatttgattaatgaatgtttgttccctcactgggcagcccttttgagccccaggatggcaggagtacctaggactctaggcaggtgcgcagcctggagttgaccgagagcatgtgggactgcccacttgcccacagctgcttcttgccttttgcatcacaggagggtgggctaggaccataaaagagccagcccaggcctccccctttctggagctcactgagtgcgtgcatggggtttggccgtcaccctcacttccatggttctgcatcagaaccagctgtgctgaggaaacatctgtgccttgttaaggtctgttccttctgcccactccctttgcccttttctctaccttacaacccctttgttgtccttcttcaaggaaaggggccccctttgtctctcagggcagagccagctgcccttctcctggtcctcttgatctgcacacactctgaggatgactgcccatggcaggtcatgatggtccgtctgccctggactgtggtttctgtggcagagcaatactttgtacagtcagggcccatggccctacggaaggctgagggagagcctgaggtcattgccttaagagaagctgcttcatggtgcagttggtatgtgtgcatgtgtgtgtggatgtgtgcttttttcatgcatgatgtttttatttgtgttatttatccccctgctatatctccctctctcaggggtctaacatggagctttgaatagtagatacatcatagctcttggctaaatacatattttctcccccgctgatctgaaggcacctcccttttcccctacccctcactttggtaccttggtgacttcacagggttgttatgacttcccagacctcattgagattgcagtgatgtgaaaaccctacctagattccagccagctgggcaggggccttggcagcaggggaagcccagttccctagggcaactcaccaggcctccagggctctctagggccaggctggctgagcttcaactgactcatactgtttttgactgggaaaaataaaaattttaaaatggcttctgaccaaatggggaaagtggatgtgggaggaggagaagggggacgttagccacaccctaggtacatttgccagcagcaaactgagatgggcttaaagtgtggctggcctctaagacgcctgcttcaaagggcattcggcacactggtctcaggctttggaggcccacctgcttcagaacatcagctccctgtctgtctagcgttgtgacttaagacaaacccaccaagctcccttagcctccattttctcatctgtaaaatgggattgtaatcattagaataacctttataaggttcttgtgagagtggaatgaagatgtgcttagcaccgtgactggcgtgtagaaagcaccaaatatttattatctgttaacattgtttttgtttgtcaaagtattattgttaataataattataagaagactttggaacagatataaagtctaaaatgcaggctgtgatgaaagggagatggtatataagaaaagtgctttttgaattgcacattatgtccagatattattattagcacaagtatgtttattattgttttgtctttgaaaaaaatgctggagcacaattttatgatgttgagtctatgtcctttgttgttttgttttttgttttggaaaaaggtttgtcacattggcctttattggaatcttgtccagtggatgtatgacccacattggtgaccctgggtgccaaatgcctggacagcacctggcaaagaagagccattatttcaatggtcactattgtttaaaatcgttatggtaaacaatacctgacagaagttcttagaggttcattgacagtaaattgtgggcaatgcactgagttattatttactctagacctgagaaattctccctctccaagttttgtgccttgtatagctaaataaatataaacaatttccttagaatttgatacaaacagctaccattgtcttcacaagtatgttagaaatactttcttaatagcaactacttgactgttttgttttttatctccattccctgccattactctgcctcttcccatctttctgaaataaaagtgagccaaattagccatttaaaaaatacgtagatactttcaggcagaggttgaaaactgtctaccccctggctgcatctggcttgcagatgtgttttgttcagcactcatagtgttttaagatgtttaaattagtggccaacatttaaaaatgggtagatttttgaatcaaaatccagatttccagctcttcataaaaaatcaaaggtctagtgggcctgggcccgtcttccttgtggcagtgcggaagagtggtggtccctcccctgggagcttgtttctccagcctgcctccggctggcccagcctcactgtacctttccatggcctgcttggcccctgtaggaatagagtttgtagtctctgcttaatataactaataccccttagatactgtgtatcagtttagaattatttccactagcaactgtgaccataggtaggaaggatattttacttgctaagttgtcattcttatgatagcccaaatggctataatagtattttaggctcttttggatttaatagaattaccttctctcctctctgtgggatttcctcattaacaatttttaaaaagtgttcagcaaggcttatatagcaacataaaattttaaataatgcaggatataaatttctatagctgctattgaaggggggttgcaatcaagtgaactgctttaattcaacaatttatggtgttgtaaatttgaaaaataaaagacacttagttttttttttttttttttttttttttcagaataaaataattaaatagttgacctttggcagagtctttgttgaaataggcaagggttttgagcttctcagaacttgagaccattgccttctggagtctttcctcagatgagtctgtgcctccttctagctagtgcactctgagcactgtggccacatctggagggtggagaggagacttagcttccaatggtggtcactctaggggaggggggcccttgcaaataccaaaatttttttaaattattattttatgagcttttaaaaacttttttgtttttgtcatcacaaaagtaataaacacttgtgataaattcagacaacactgaagtgctttaacataagcaacaaaatcttctgtgacctcccccaaccttttccaaccattccccaaacataagcacttttgagagtttgcttcttatactcctggacttttgcatttgcttgtttctctccacccctaccctttgccctcaaccacgacatagatactttcccttttgttttctaaagatagactgtccctgtgcatggtgttctgcaactttctttttacagctgtcaattattatggttatttttccaagtccatatgtacagataaatgtacttgttacttttaaaagttgtactccatgttatggttgtatgttaagtaaatttcgttttgtattgatagacactcaggttgtttctgaccttttgccattgcagtcattgctgctgtggaaatttttgtgcacacgtgtgaacttttgcctgagattttctttggtatagatacatagaagtaggacttttggtttaaatggtttgctgtttaaaatttgaatccataatgccaaattaccctccaaaaaggctgtaccaattcatgctcttcctaggagcatcccattatggctttgctaatctagtttttgcttacacatgtgtaagaaagtaaatcttaaaagcctcacaaataatgccatcaaaattacacgtttatcttagaaaagcattcagaatatatgtctgtagatttaattatatgatttttatatcttgactttgatggtggttatcatcctgcaaggtgacaaaaagttccctaaatactgtacacaattattaaataattattaaggatatcagttgtgccaggtagcctttggaagaattacagccaaatcacagcttccttttccacagctctgccaggctggcttgtctttcccaccaagggctgagccattaatactgaggctgggtcagcatttgaaggggccctgccagggagtgccaggccttgggccccagagacctggggagtgggagatggcaagtgactgctgtgaggctgagacaaagtttttgcctacaacaccccatggctgtttcctttactgagctagatgaggaaagcaaagggaagtgatggtccaagacttctggtggtcacttttgttcatagatttctcacaggagtgctaacatttaggctcatgtttacgaaggtttgaaaccttagcatttgggaaggatctgcaaattctcagccaggggccttaactgatcacaggtagttgtgaactcttggtccaggctgtatctcaaggcttcttcttagaaggacaggtcagcttaccacctgctaactgcatgtgaaattttgaattctgccttctctagctctcctctctggctctgagctggtatctggcatttgcaaacagtttaccctttgttgacttcttagcactaacctcacttttatgagtctgagtagacttgatacccaggccatttatcctttgagggtgccctcagcttcatcagacccatgctgggcagtctggcatagtggtaagaggcacttggagccagacagacctgggttcaaatcctgacatcatcacatttactaacagtgtgaccctttggctgatgacctcacctctttgagcatcagtgtctccttctacaaagtagggacagtaattctttcccaggggtattttgaaggatatacgaattaatatttgtcaggtgcctctcagatgttcagcacaaaataaacagtgtataaatatgagtcctctcttatcttcctgctgtagagagaaagttcgttggggatgctccaagttggtggctactggctgaggatcctggagtaagaggaaggctaccatgtaaacccagagatgaatcatgaacaatgtgtattctcaggagcttagtatttgatatgggagcctaacaagcaaatagtgtgtccagtaataggaactgattaatagaggaaagattaattaaccttctaggtgggtggggtggaaaagtaggtggggtattgaaggttcaacaggagttcgacagagaagatagaccataaataataaatatacggctgtatccactagagataaagttacattgttttttatgtacatgttgacttcttttggccttgccaatgcactgatatattcaaattcagctcctctctttttctcttcccttttcccttcactctgcctttcctccagccctgccttgaaatactcagccactgaaaatttcttaaagaatttctttatactttagtaagtcctcagaggataccagttcaccctactgagattttacaagaactttggtgtagctggggttttttttgcattcctttttctacggtagatataagttcttttgggttgcccatcaatgaacaaactaccaaccatttgatgtttactgcgtgactcctgtataccaagcacatgtgccatttcacttagtccccagaatgtcagagcagctttgtgaaatgggctgcccgttctttcttatggatgaagaaactgaggcttaggtaggttaatatactgaatattatacatgtagtgagtgggaaagccacagttcacctccagggtctttttctccctctttgctgccttgcttggggtcctgctcatagtaggtggacagcagatgtttgtctgaacatatgagaacactgcctgccacgtgccggtcagtttgatttgtgctgctggttttgtaacccacatggggcaatgacagctgctcaggtactttcctacctattagtggggccccagggtcacacatcagtcataattgacaaaaaacacaatttccctttcctctcaacttttatttctaaggtacttgtaagcaggtagattagattgttaacttttcattttttgctttgtctctctcctttaaagactatgtgaaagaatacacagtgccctgagagcctggcctgggaatcagaaacttagattccagcttcggttctgctggtaactcctcagtcattatgggtaaataatattccctctccagaactactagattgtgtccttggtgcagtctggggttcgggtggtcctagggaccctgcctactgcatgaacctgttatcaccatgtgaggctggaaggatctcagcgttggtgttgggcaggcctgagtgagcatcctggctcctgtacttcccagctctgtgacctcgggctaatcacctgactccctgatgcttgttcttgtctacgaaggagggctaagaggacctgcttcccaggatcactgtccagattgaatgagaaggaacgtcggcttccttccttctgtctccaactcctgagtgcactggttttagactaactgggtgtttctgcagttgaaaccaaaacaccttcattaggtacaatgttcattatacctcgcaacaccctgagatactcaactcttagatttcttgaagctcttttttgttaagaaactcctcaaaggaagatactcttctaccccattgagctttattagtgcttcaatgacagcaccttattttttcacttttttcccccttgcagacagaagctgcagtgtgaatcagtttgcatttatataatttcttttgcatttctttgcaaagaggaaaactccattcatttagcaaatgtccgtcatgcccaggccttatgttaggtgaagggatttggagagaaatagagtcactgacctcaagaagcttacagggaggaaaggtgtaaatacataaagtgacacatgggtttgtcctgtcaccaaggtatgcagtagatgctgtgggagaagagaggatgacacaggttctctcttggaagacctcatagagaagaggtgacttgtgagcaagtctttttttttttttttttttttttttttttgagagagggtcttgctctgtcacccaggctggagtgcagtggcatgatcctagctcactgcaactttgaaatcttgggcttcaagggatcttcctgcttcagcctcccaagtagctggaactacaggtatgtgccacttgcctgtctgatttttttttttttaattttttgtagagacagcgtctagccatgttgcccaggctgatcttgaactcctggcctccagtgatcctcccaccttggcctcctaaagtgctgggattatagacatgagccactgcacccagccgttgtgagcaagtcttaaaagatgagtaggaaggagtctgtcagctgtagaagtaggaagggcccaggcagaaggagcacagggcagaggctagagccctggtaggaggtgacacactgggtgcatgtctggagctggagccaagaggtggaggacctaagtggctacatcttggcagtcacccatatattggcaagccccaaatctttgtaaccagcccagattgtcttcctgagcccccaactcccatacccactgcccattcagcagctagctgcatgttgaagtgtagtggtcttcccagacctaacataactaaacagaagtcttgatttgttccttcaaaaacaaacaaaaaactagccttgctcctcctcagtcttccccatgttatgaggtccccatcatttttacctggctacccaggcctaaaatgtgggcatcatctttgattctgcttcctcctgtgttcttcacatcatctgtttgcaattctttttttgtttgttttactggttttaaaaattatttatttattgagactgagtcttgctttgtcatccaggctggagtgcaatggtatcatcttggctcactgcaacctccgcctcccgggtttgagaaattctcgtgcctcagcctcccgagtagctgggattacagtcgtgcgctaccactcctggctaatttttgtattttcagtagagatggggtatcaccatgttggccaggctggtctcaaactcctgacctcaagtgatccacccgccttggcctcccaaagtgctgggattataggcatgagccactgcacctggccaatttatttatttttaattaacacataataattgtacatatttatggggtacatagtgatgtttcaatacatataatctgtagtaaccagatcagaataattaacatatctgtcatttcaaacattgcagttcttgacaactcttactgtatgtcctggaagccaccactgctccttattattagtttgtttctttatcaaccaagcaggccagaccactgctctaccctcgttcaaacctccactgtctttcagcaggtctcttgtcagtttgctacataggcaaagaggtcttttaaaaagcaaatttgtgtcatttccctgctctaaactctccagcggctttctggcatctttggaatggaatctaaacatctcgccttggcctgccagcccctcctgctcatcttctctggtctcatcccttggcactctctgctcactccatttcagctgccgcatcttttcttactgttccccctgttgtctcatgggctttgcacttgctgtcctccgcctgagctgctcttccccagacaccgcctgtctcaccttcactccacgctggcctctattcaagtgttctcccacctgtctgaaaaagcaccgttctgccccctctccccgctgcttcaaccattctgtcctacctcgctttggtttctctcattagcactcatcactctctgactttatatgatatgtttgtttgtcttcttatttagtgtttgtcttaccccacaagaatataaatccatgaagatgggacctggtcttatctattgcattcagcactctagggcctaaaacagagcctggcacacagtgggtgatcctgaaacacgaggtgggtggatggacaaatgactgagttaatgcatgcctgcatgcaagcgaagactttggagtttatttcataggcagtgcaaatctagtagacatctttcaggaggtgagtgacgtggtcagcacttttattttagaaagccagctggtggcagtgtgggggctggactgtaggagggaggcagcagaattactttagcggctgtgaaaatcgtccaggaaattgatgctgagtgttgtgctagagctgtggggatggagaagaggggacagatgacaggacctgaagatctttgagtgtctttgatttctattgggataacttggtatagtgattcctttataagaaaagcaggaggggacgaactggtccagggagagactgttgacactctgtggtgtttttctcaccaagaaaacctaagccctgggatgcatgttctctgtagtggcattggctctctggggagtgactctgctgctccgcagcctcccctgttccattttttaataagagaatagtcaagatggtggtgtcagtgagtgggagtcttcttcatgcagatggatccattgatctttgcatactccaagccacactaagtcattggttcttttctcgcagtgggtacatttcaccttatttgattctgatctgacaaatgctgctttttttcttttctttttttttctttttttttgtttaaagaatacctagactgtgctcaagttccaggtggggtttacagataactggggttccagcatctcccttcttacaaacacgaacaggagcctttgccgtccttgggtctcagggaggcagaccggcagcaggcacacattcctggcccaggcgtagccatgctgtctggtgctgccttttgagaccttttgtgtgtgtgtgtgtgtgtgtgtgtgtgtgtgtgtgtgggcttgaatgattccttctttcaaaaattcaaccctctccaaattttgatgaaaaccttttcatctctgagtaagcacattatttcccatcttgatgaggtgtgtcccctctgtgtccctgagagtatgtcatcccagccttttaaattttattgtatttttttattttttattttttcatactagtcaagtgcagtagtgagaagcggggaaagagtagaacaaggggccgggggcggtggctcacatctgtaatcccagcactgtgggaggctgaggtgggtggatcatgaggtcaggagattgataccatcctggccaacatgatgaaaccctgtgtctactaaaaatacaaaaattagctgggtgtggtggcacacgcctgtagtcccagctactcgggaggctgaggcaggagaattgtttgaacccgggaggcagaggttgcagttgagccgatatcatgccaccgcactccagcctggcaacagagcaagactctgtctaaaaaaaaaaaaaagagtagaacaaggagtttgatctgttacagactgaactatcaatggagataactcactaccttcggaccagcctcatcccagtcttttaagcctggtccagaattcctaatcctgcttgtcaggcccttcaaagtgaaatgctgtaccatctgtatagctggattctcacctcctacctctcctctcccttccaaaggttccgatgtcataggaatctacgctagagggcttcctgtgtgccgggcactgtggtaagcacttcacatgcattctctctaatccttaccacttcggggatgtaaggattataatcttctttttacagatgaggaagctgaagcttgccactgcttagtagttaagagtatgggcttacagccaaacagaccctggattgattctcaactagctggggaccttgggcatgctacttaatttttttaacctttttcacatttagaagataaagataatatatagagagataatatagaagattatataggtattatatatatatatatcttctatattatgaagataatacagagttgtgataaaaattaaatgaaatgaccagacatagtggctcactgttgttttgttttgttttgtttttttgagacagagtctcgctctgtcgcccaggctggagtgcagtggtgcgatctcggctcactgcaagctctgcttcccgggttcacgccagtctcctgcctcagcctcccgagtagctgggactacaggcgcccgccaccacgcccggctaattttgttgtatttttagtagagacggggtttcaccgtgttagccaggatggtctcgatctcctgacctcgtgatccacccccctcagcctcccaaagtgctgggattacaggtgtgagccactgcgcccagcccatagcggttcactcatgtaatcccagcactttgagaggctgaggtgggaggtcacttgaggccaggaattcaaggccagcctgggcaacatagcaagaccacttctcttttatgaaaaaaaaaaattaagaaaaataaaaattaaatgaaataacatgtaatttcctaagtacattaagtacgtgcctactatgcgccggacattgtgctgtcagcaaataatagctcatcgcagatgctgttatcatcatcatcatcccaaagccacagattgagtctgtaggtgaggccctgcctggctccaaagattgtgtttttttctcctgttgctcccaagttcacctgtcccaaactttctagcccctaagtttgcttccttgcgcttttctggttgtgccatttgtccctgtctgggcagtgggctcaagctaaggcacagcagttttccagtccctttgagctactgacctcttttctgtcattgactgaacagtttccggtggctgaatcgtctgtgtaagagcttggacaattttttctgattgttaccatcatcgtgtttactgtgaaagggcttcctgtatagttgtttgtgttagcagcattgtctaaatgaaacaagagtggcaacagaaagggttggtgagcagtcctagtcttttggggtcacagatcactttgtgagtctgaagaaatttatagactctctcaaaaaaataaacgacaagacaaatacaagcccagcatttttcatgagacgttttccctgaagttgatctggaaggctatgtgctcttttgtcattgtgctactccacattcacagccatgaagggtgtcatgtttctgcagggtgtttgtatttaagggttgttgggcaatttggcaacactatacctgtttcattgatactatgtgctatttgcatttatttcccatatctgagatacgtattcacacatgagaactggcctggccattttgatgagatgtacctgctgatttgcacataaacacaagccatggcctgcatctagaggatcgactggagaggcttttttttggcccaaaacatcagactagtaggaattttattatgagttatagactaaaaggggggataaacttagcttcagcagggtttaatattctcaattcaggtaagtgtaaatctctacttttcattttaaacatttttgaaatttcagtctttaaaaaaatgcttgttttttttccttccaagttttaaggtatgggtttgggagaaggcagattccaaacactttaactcttcgacctcagacttgcttatgagcctctctttggaacatttccagtgaaccgtggagcaagcctgccacatccagcagccgtaggcatgatgatcactggtgccgatggcccctccactccctgcctggcttttgaggccccgcagaaagaaaggaacagaatcctttcataaggaaggccccagaatcctttctcctgctgtagctatgctgccagtgtcctctgtagatggaaatggaacttggattttgggtgccagaactgaattcatcacagataagattagttgatataaagctgtttctgatgagcagtttttcctccagagttttcatttttgctttttctaaattatacaaaataatagacactcattacaaagggaggatcataatgctccatacctggttttgaattccacttctatcacttattagatgcagccctgggcaaaacacacgccctctctgagccttgatttttctcattgaatgggagatctaattattttacctcataatactgctgtagggattgaaggagattggtataaataatggttttctgagagtctggtgtgtatttgctttttttcagttaatatgaattgagtacctactaagagctggtcactgttctagttgatatggaaccagtcaagagcaagacagagagggtctccgctctcatggtgctcacattctaatcagaggaggcacaagaacacaagatcacttcagttattaagaaattagaacccaggggtagcatgagagtcacaggaaggacccctttacgtcggatggccagcagaaccctccctgaagagctcaatgctttgtgacccccccggtcccaagttttccaggactcctacttttaaaaacactgcccctccaagtatataggtctcaattttgagtttggaaaatctgaccacatattagttctcttgttcattaatgggcttcccatttagagagtgagttcctggggcaggagccatgtcacaggaccttttgaaggtctcagggccaatatggacgacacttctcttgaacactcacccagttgggctgacatgaaaacctcatggtgggaggtggggggtgattagtttccagccagagcccattttgctccattgctgctttgaacattctggtttctaaggagctggaagtagtttctctcagcgagaatgtggcacactgtcatctcctgattctctgcatgcagttcttcaatggcttgttgaggctgcgtggaagcccagaggtcggggcagttccaactcacacactggcatttgaacggcagagcagtaagccctacacctgacataactgcattgccttcttggggtacggtacggatttttaaatgaccatttcagcctgctgggctgggcaacggtgatccaaactgatgagtcaggaagccactgaacagaaaggcaggctgcatctgactcacctgtcatgtcgatagttgacctccttttgtttgaccttgatttgctcagtgcaattaaagatgctgttgtgagtgcacttctgctacctgatttaaataaagtctaacatgtgacagctcagggtcttaaatgcacacacgacttaggcagacggacagatgggtgagtggttagcctttcacttacctctgaattgtaattctatcacaaggaaagggcttaatttcaggaacacggagtaattatttgagactagatacaatgccaaagcagcaggccttgattccttgctacagggcagcttaatcaggaaatggcctagatggccgcctttcaagtaggtccttgcagtagcttggcaacaggcacagggtcataattggaagaatttggctgtgagtgtctgtgggtgtttacagtgcactatagggcagggcttctcttatttatagaatattttgagcaacaagcagcagaaggctgaaaagccactaaaatctcgatttatttttaacaaattccatttttctcctcatcccagaaggagaactgagttattaaaaaacagttaaaaaatacatcattgcagagcatgccatatctaattatggggttgccagcatcggcctgcagccacatttcaagggcttcgtaaatcaaccatccattcaatctgtgaacttatatgactcctgttctccatttagatgtagagcgaaattattggcaagtgggtgctgatcagaaaaagttcttccctgtctaaattaggagatgggagggataaatatagaatagtatacttatgttctcaaaaggagataaaatcattcttcattgtccattatacttagctgcacaaacatccatcccattgcactaaatagccactttagagttttcacacattgcaatggcagttctgtgccactcaaaggcgcagtattgtgatatctcgctgagcctaaacctgagtgattattgctcacgtagtcatgaagagacataaacccagtgcttttttgcctgtgttgtcgtagtgtactagagctacaaggtgggccttcagagagacactagttttaagtatatctcattgtaggtggggaagcagaggcctaggcaagggagtgacttgcctagggtcccattaagagtcatggcagaggtgggctggggcggcagtctctgtgcttctcttgacagtgccctgctgtgctcactggagctactgtattaaacagatacccttcaggggttcacagtcttagaagacacaggcacgaagatggccaaacaatcagcccatgcataagcagaccaagatatgtgtatataacagattagttgagtggtagagaaaatgagagtggggaattttggaatctatttggatagcaaagcaaaggtaacatcagttgctctctgacccacttgggaaaagcttatagagatgctatgaagttttctaatggaaaaaggtgcagtacatttgccatgtgttagtgggaaggtaagtatgatgcagtggtgggtggtaggaggcagtgaagataagtattgcaactttggaggagccctgggaatggattgttgaggtgatttcataggaatacgaaagggagcataggaccagggcacaggccagagacaggcaatcccaagttccctggagtaccctgcccttttctgggaaagcaagtgggtggcatgagtgctatgttcccaatgctctggccccacccctggtagaagaataataactgatcatggtgggttttttctgagcctctgtatctttgagtagcattctggtagccaatatcagtggactggtgccagcctgtgtggtgaacctctatctctttcttgccctgggctgcatgtcaggcacagtgcctaagccggagtgggctttggggagttacttctctttctgaggctggaaggggcagagggacgtagggaaaactttgctagggagggcaaactgtgaaagcctctggagaagtcacctgttgggataccaaaggccagcggttttagaggatgcgaagaggccgggcggggttggtctgggcctaaactaaggctgtagcggctagcatggagaggaacaagcgacggggagtgattacggatgaggaagacgtactaggatttggctacagacagacaaccaaccagagagtaaaagacagtgacatgctaggatgtgaaccacctactacagagaaggtcagaggtggggagggaggaatcagggctgtgggcagatccagcagctgggatccaaagctgaagcccttgggttattgaatccattctttctgagaagagatggttgatcttcctgcccagggagttcctagccagactggacagtggttctcaaacatggtgccaggtgttgtcagatagcaaacaattagtttgtacacagaatgtccccaaggtcacctacacatatttgtttttcctaatctttgatacctacagccacttacctgctttcgagttctcagagttgagaacatataaatttgcagtaacaagtgcacaggaaatacttggaaaatggctgatgagctttagtttggaaatttcatttttttcttggatctggattataatttcagtacaagctagcaatttttcttgttggtaaaatagtttctagttttaaaattatttctgtagttaataaagttaacactatttcatgatggaggctgccccagctctgaaccaattttcaaaaggcagattctcctctttctctctcttatttcttgctcttgaacatttcactgtgttctagcaacttttcctgtgtgtgactcggccaggagactgacttgagtaagatccaggtcaaggggttgtgtgggtgggtcggtggtaaggaggtgctgaagaacactaaaacctttgcctgagaggagtctgggaagtagcctgcgaactggaatgaccccaggcttcctgtcacggtcatagcccatggagttggcagacttgatcactctatattgtgtgcccccaggtaatggcattagtcatcgatactgtcttttttttttttttttctttgagagagagagtctcagtctgtcgcccaggctggagtgcagtggcgtgatctcagctcattgcagcctctgcctgctgggttcaagtgattctcctgcctcagtctcccaagtagctgggattacaggtacatgccaccacacccagctaatttttggatttttagtagagacggggttttgccatgttggccaggctggtctcgaactcctgacctcgggtgatctgctcacctcggcctcccaaagtgctgggattacaggcgtgatccactgcgcccggccaatactgtctttaaatcgtccagagtaagaaaatgttgatagcttgttgtcacagccctgtcattttacacattccctgaattattgtctggcaccagcaggtgttccagaaacacttttggttctttgagccattactggtcattcctgtcaccactgccaccaccagatgtggttctgagagcattaagtaaaagttttgaaggttgtgtatgttaagactggtgcaaagtccatcctccttccttcgggctgatcagccacaccctggctatcagcacttatttactcattttcaaagtgacagaatggtccagtgggcaggggcataaggggtcacttcctctaaccacccgccagtgcaggaggatcccatctgcgcagtggctgcccatgacaggcagttccctagccccagtcggacatctccgcaccaggcatcctgctcctgctttatggacatctttggctcttaaaaatcctcctttattctgaccgcagatctgccttttggcagtgtttccttagtgacctagttctgctttttgtggcaacacagaacaaaggtcggtaggcatggcacaattccagcttagaagtttgaaggtagtgctcatggacccacatcctttccctctccacccactctatctccctccacaaggtttatgttctccagtgccttcagccattctttctatggcatggcagtcagtattaatcccagtaaaggtaacatgtatccagagagtgcttgccatgggccaggcactgttctaagctccgtacgtgaattgtcttatttatgactcaaaatcaccatatgaggtgagccctgtcatcatcctcattttaccaatgaggcaactaaggaacgagggctcacatcttgtcccgagccatgcagtcaagcagcagagcagagatttggggctaggcagtgtgactccagagcccgtgctcttagttgtggtgcaagactatcttacagcctttcctgcatagtgccaaaaataagcccatggtgcactagacttgggctggccctgctttaacttattttgcaagaaatcattagacaggagccttagttgaaccattttctgtgaaaccttcagagtttgttttgacagaacagactgcagggcagaggcatctgcactgtccccaacaaatgggttcatcctgtagctctgccaggccccacagggttcataaaatggtagctttagatcaaggtgacaaatacagggctcttgatgttttttttttttttcctgaacatggtgcctgagcaataggtttcttgtttaaagtgcttagtcatggttttatggccagaaagtagaaggagagaggtacctaagaattgcaaaactgggtcatctcttcaagtgcctaatccaatattcagtctcagagaacaactccagcagttacgggggtggaaggatgtgatgaccacctaccatccaaaactgggatgtaggtgccaaatacacattctcctgaaatgatccctggtgcctctagccaggctcttccaggagtctagagaaagatggcccatgacttcatccagagtctttgcttcctgtgctctgggatgcctgggcttttctggccacagccatacactgacagggccagaagggctgagatgctgggattgaaccatctttctctttgtgagttgctttccagatagcacgcattccggtcactattttccagagatttaagcagcaaagtgagggaccctcgggcatcgactcagagacctggaggggagcagcttgaagcaatgtaaaaagcactggataaaatctggttctaccaaaaatagggctatgagagttacctcacctccctgaaaggtaatatctttatctgaaaaatggggatgataatactactaacctggaagattgacaggaggattagatgagattctgcatggacataacagtccttggcatgatgtctagcagtgaagaaacataaatatgagaataataacttccttcttcctccgctgtctattccttctcttattctagtcctgtctgctgttgggttttgtctgttgttttgggtaaatagctaacctctctgcctctttttgtctgtagaaatgctactggttctgaatgggtacttcgcgccccctataggacatcgtgggaatgtgtgtgggtgatctggatgtcacagtgacccagacgaggcttttactgggggaagaggggaaggcaggggtgctagatataatgcttggggaacaaaagattgcccaacatctgcatagctgcctaatgctcagtgcattcttgtgggcaaaaccctgcttaaaattatctgggcctagagtctgactccaattaacacataaacacaaataatttttgcatgtttttaatatatactgaattttctgcgaacacagctaccaagtatataagatttacctatttgttatgaataggtgcaagcatttcatatatctttcatgatgttttctggtgtagcggtgccccaatacttacatattgatttacatgttgtcttatttttaactatatttcctttcttctttgtattacagttagggcattatattgattatttttggaattataagtgttgtaaggttatattacttacagatttcaagagagctaaagacatatttaaaatatttttattgcatttttgacaatatgaaagagcaagagagagagagtgtgtgtgcgtgcatgcatgcacatgcttacaaattagctagaaaaatcctaagacagactttaaatgaaaagaaatggtttcatagctcctagaaatgtccttttacataaggatatgtagtagaagtccaaatttttaactgcattcattgtcagagaaatgaggtgttttgatgtttcccctgtcccttttagaaagtatatgatcctaaaagagcctgaaacagtttccattgtcatattttttcatttttgcaatctctatttttttcactcctcccacctgtgcatatatatatttaaaagcgtccccatatagacttttaaagaaagaaaagccagccaggctccccactctttactaagtttgttttgattgttttgtggcctctgcctgcacctcggcctgagtcagactgactctgggagctgtgggcaggtccaagggaaagtcaaggaggtaatgaggcttctcgtgggggcaacttgtaggccaagttgggtgggttgaagtcagtctaccagaagcttcctgcctcaagcctgggcctctacctgtcctgaaacctgagggctctccagttggaccacgagggtctgacatccaggaggatccccaggagagagcaaccgtcactagggaatatgctgcccagcactgactgtactgagcagcagtgttgtgtgcctgttgggttgatgccatggatagccaggcgttcagaactgaacacgacacctaaaaggcaaacacgaactgtgaatgtgccagtgtcagatgctgccttggtggtcatgtgtgggctggcagtaagcttttggtcccttaacactcgctgttggaaatttcccaaggctttcatctagggtagctggtgtgtgatttccctgtcctttgttactcctatctggaaactagttgaaatcttttctatgatattgatatagttacagaaaatctgaatacttactactaagttttatagttctgcttagttcaaagtaacacaacctcataagagaaagtttgaaacaggtagagaaattgaaagatgaaaatcactacccattatctcagcccacaaagatagctactatcagcattttggtttgtttcctttcagtcctttctgtgtttatgaaattttattatataaataattcatgtccaatatagaaaaagatggaaaattgagaaattataacgttaaaacaaaactgacccatctcaccagttggagatgtcttaatattctggtgaatttttttttgtcttttttctatagacacataagaagactgggaaatattgtgtatatacgtttgtaccctttttcaccaatgtatatcaatgtatatcagttcactaatgaatactaattaaatgaaaatttattaaatgtatatctatttatatctattgatatattaacagatgccagtgcatatctattaaaagagtactatgtaagagatgatgttcttaaacataaaatttaatttaggcatgaaattactttgtcaaaagatatatcagtttatattcagatatacagtgtactgacctgcccatttaccacatcttcactaatactggtattatctttaaatagaatctttgctaatatgagcagtgaaagtggcatattatctattaaattttgacggttatgagattgagcatgtttttgtatacttactggtctttgtgtttcatcttttggggtttcctattcatagtctctgcttagttttccactgaggtatttgcctttttattgatttataagagattttgttttgttttaactcagaaaaggtagtattgcttcagttgtcacagagctttggagtcagacagagctgggtttgaaccctggctttcctacttgtgagctgagggatttcaggcaatttatctgacccctctcacaattaattagttcttctttgagaactaaacgaaacaacactgactagcatgaaaaaaaagcctggtgtgtggtttctgccaatagtttttgtgttgttatttttgttgtgattcctgcactgagtattttctcagaaaaatgaccttgagctgtacgactcatgcctgttcagacccacagacacatgatactcactatatccaaagctcagaaaaatgaaactgaaatcactgaagtttgtgggttttttttttaaattcttcttgccagaaggagacaaatgaaggaaaaaaaacaagccgatttcattttcattaagaggaatttgtagagttatttctggggtcaggcaggatacattcagacgaacattttagatctagggctgggaagatcccgagactcgttatagattacatcatcttcctccaagtgcacttgccaggcaaatggacaagtgcattttagaaaggttttcagttgttcacgtttaaacagaaaggatcacctggctaacttttagttaacccattgaacagatgtgccattcccccagcccattggttattcatgtccttgttactggtttttgatatccttgccccgtaggtgggaggagggatgggtatgagcctgccctgccctctttctcctacttgggacagagctgttgcttttatttgctgagtcactgaagcaatagagcatgtgcagagtcccagcctggaggtgggcatatctgggttccagtccctgctctagcccttctcagctgtgtgatcttggacaagttgccatacctctctgagcctcagtgtcatcttctatgtgatgtcgatgcctcccccaaaaggtcgttacgaggaccaaaggagacacgtcagggcaggaaccatcctaggcacgtgtttgatgctcagtaaacgggacgtggtcagtgttcagagttgtgggggtggcaggtgactgctctgtttcacctccactcacagcaacagggcctgtggtgtcacctagacatctcataggcatcccacactgaacatgtcccaaaccagcagctcctccctggatgggtggatggtgtacagggacctcttcctccagctgtcacatggggcatgtacctggcaagtggctttgcagccctagctgcccccttggctgggggcctttgtgcagttcatggactgggagtcacccccatgtctagaccgtcaggaaacccattggcttttcctttagagcataccaagaatcaacttctcagaacatagcaagagttgactttttgtcaccctgccgtggccactcagactgactcctcttacacctcacatcccattgatcagcacagcccctggaaatatgtctagaatccagctgcttctcatcacccccacacctaatacagagggctgagtcatagcatctcttccccggactgttgtagccgtctcctaactcagcttcctgccctgcttttacacacacacacacacacacacacacatggtatcttctcaccactgcagccagacttaaaacctaagagggatcatgtcactccccattttactcagagtcaaggccaagatccttactggggtctgcaggcccccacacctggccctctgactgcacccctaccttccttagctgtctcctctccctagcatgccccaggtcgctggtcccctagcactgggcagctccctgcggccctgttcactagctgtcctctgcctggaacacatctgtcacctctcacctcctcctgtccagcctccttggggcctttctaactgcctccctcctgtggtctgcctcctccccatctctgactttcctcccgagcacttactgccatccagcacccgacataacttacttgtttcgtttgcttgccttcctcaccaggaggtgtgccagatgaggacaaggatttttatatccctacccccatctgcagcactgccatggagaacagtgcctggcacttggatgccctcagtaaatatttgttgagagactaataagtgatcgtgggccagcatgccaacagtgtcttcgttattacaaaattgtcccgaattgaaatttggctactacaagcagtttgtggtggaaatttactcaaattaccaattctttcactgaagaaattacctggcatatgtgggttctcaataaactgtgttggattgcctcaaggctttggggcagtggtagccgtctgaggcctccttgccagtcaaccaaaccctgtgctgggtgggacataagagatgcccccagcatccttagctgatgctactatgtcaccccagaatccctggggcagcccacccctcagcagcagctgtcaccctgctgggttccgcttttcctcctgtgggcttcgtctccctaaggaaatcattgtccttgctttctacatcttatctccctgagcagctccaaaattctgttattcatatcccactgacctttctcattgtcctagtccaagcttctcacaggaggagttgtctctctgttttatattaaaacaaagcggttggactcttaaaactctattcacttttcagattctttggagtcctcaatgcttcctgctatgaaatgctgcgctctggaatgccttccagacccacccccaggatacctgtagccttccctgcagccactctcctcaactccctcctcgttcccaggggtcaatgtcctggatctctccagctttaagttccttcatgtcctcttgccacccctgctctcaccatctctgagttcttgtatccccaggatttcaacctgagtttgcatctcctgacatcacttttcccagccttctcccttttcaaccagcacaaggccatccacttccatggccatagtggacgccactgagcatgctaggtgttttcttctattcaactcatgtggtctgcacaacaacccagtgcggggaatccacccctttcacagatgaggcatctctagctcctggaagtcacctaacttgcctaggacatgcagctagtaagtggcagggctgggattggaacccaagaggccccgccctgaccaccatcctgccctgcctctcctcgggcacccagaatcccctcactctattgtcaaaacccaccttgtcctgcctgtctggtacctaggggagaaccctcagcctcttcttctgctgccacttgcttcctcttctgccaggaaggtcccacgcctggccagcctgctctggagacacgcccactgcctggccttgccaggaggctctgatgctctgcaggcttcctgtcccacggatcccttcctgcctgtcctggggtcccaccaccccactttgtagttggccttgctctttattgtggtgaaaggtgcaggccattccatccaagatcctataatattccttttctctgctgttgaatgttcttcccattccccccacattctcaaagaaggcatgtggctttcttcactgcgtctcggcctgccctgagtccagcccctgctgcctggcccagcctgtcttgttggcatcccctaagccctagccagaaacacaagcacctttcaggtgctccatcctaactccaccctccctcacactggcctctctccctttgccaccagataacagcagtgcattcttttgtttcctttagaacaagatgcagatgttttccagaattttcttcaacttcaggcagtaagttttttggtgaaaggagtattactccctgagtctgtagaaccaggctctctcctcttattctgtagcaattaaagacaaagacaggcaagaaaacaatgaaaagaaacaggagccaggctgatgcaccttcatttagctggtccttgagcatgactcattgatccttcttgcttccatcagggattgcaccctgtgccctctttgaatgcaggggcatgtcaaggccaagggtcaggaagagagctttggcctcgccagcctggtccccagagtggaagtggcagggcaggaggggtgtggcagacagagcacatatcgcccccagccttgcccccagatgttgagtgctgggtgccggagtgcagaggggaacaaggcctggaccctgcctggggagaggcagcacctgggagatctttgtggcttcagatcccatgtggtcctccaggtaaagcagagcatctctggggtctaggctgggggaaaactcttgcaaaaaattcctggttctgggacagaatgcatggggtctgcgtgaggggcagaggacagtgccaggccagtgagcacgcactgggcaaaggaagtggccagagaccactcataagaaaaagtgggacatgaacctcagagcctgggctgctttcagaggagccaagagcctgggaaataagcatcttctggtgaggaaatcagcagggggaggggagggtcatacaggaggggacttttaatcctgaatggccttgcagggcatggttcccctagtgtgccccatggaacccttggctgttagatgtgaggtgataaatggtgtgtggatgcatacacttgggactcagactctgctgcccttagactttcaccctccacagggctgcgtttaaaggtccaagaagccctgcagaagaaaaacctaactattgaaccagcattccctatacgtatttggcccctgattttttcccccgaataacatcattacaatcctatgggattagtgttccatggcagaactttgggaagtgttttttgaagaatttgtaaatccctgcaccctctggactgtgcccatttcttagattgcatggaggctgtgctgtacagtggaaggagtatgggctttagatgggactggcctgtgtttaaatctgctttcccattatacaaaatctctgatcttgatcaagttacttactctctcaaacttagtttccttatctgtaagacaggggatgaaacattagctagttgtcttatgaggctgttgtgatggttaatgggaagataataatgacacttacagagggcttgttatgctccagacaccattctgagcactttatatatctcacttacttttcaccacaactgtgaggcaggtaatgttatccttatcctacaggtcaggtcaggagaccaatgacacatacaggctaaatgttgtgcccaacatcacacggctggtaaatgtgggacctaagatttgaaccctaggcactcatacatgatggggtcaggatttgaaacttgaccgtcatctcccatcagagaacatgctctgaatcagtatgttctaaagggtctagagcagtaaaagcactaattggtatcagttcccttttcagatggttcgtggatatgttagggggattgatggttcctgggactccaagtcattctgcagtcattaaaatcagccctgttgaaagagtaatctcctcgatctgcttgcccactcagatgctcccattgtgaccattttgtttgctctgctgcctcatcctgggccacttcaatttgggtggctgctcagcgttcaggtggagtcgggccactttccacagccatctcatctgtggcctgtgcctccacttccaggaccaagagtccccccaggatgcccagtgagttggtagcttgttctctttctacacctcagtgatggacttgacaaagggttaagaagacatcccttttatcattcagcaaactgagtgcctttactgagctagatgcatgccctgggggaactagcactgtttggtgacttagttagacctctgaatccctctaccaaccctcagtagctgtctgggagactgggattctgtggactctcctctatcaacgatattgggggtcttttccacaaagaccagcctggttttgattgacaaagtgcctcagatttacaaatcttaccccttgcaggatcctctcaactgatcaagccccatagctccaaatgccgtctccttgattgatgtttaatttggggatccacaagcatctagagctaccagttgaatttgggtacccaagggccacaaatgggcccccctcacaccctgacccctgacaaccagcacctttgagactgaagtaccactgcatatagtgctgtcctctgctcagggcattctccctaccagccaggccacccggcaaacccctgcaacacctcataagacctcttcgctggtctcatctccttttattaacacctcctcagcacccctccacacacacccaagcccacaagcaaatcattttttcatctgttttgctcttgtaccttacctatgctccactaatacaaaaaaagcacgccttcctcaagacacttgactgccacctgctggagagttgtcatcatggctcaacaaatatctgccacttctaaacccccaggcacctctggagtagggcagtgcattgcttgtacagctgtaaacatggcctgcctgttgaattggtcatgctgtcatgtacttattaaaacactcgtctttctaactggactgaggacatcttgaacgtaaggactgccgatttctgtcttcgtccccattgtggcttctgctaggggctagagaaatgcttattgaatgatccttgtgcaaacacctgttaccttaggttcagggcatctgctgtcattcagtgaaggtcttctaaatctgtctgttgcaaagcaaggctcgccacaggctgtcagagtaaccatggaggtcggacaggacttgcagtggggacagggccccatcagcctctcacctctgctcagaggcaccaccctctgaacagatcagagcataaacaggtcagagcaattcagcattcattccctctacagacatcagggcaggcaccatgtagtggagagtggggccaggggccatctgccatggctgtttgggctggggaaggagagcagtacttctggagcatgtgctgtgctcagggccagctccctgtaggtaggttgtgggaatgcagaggtggcaactcaagcacccctgctggggattcagagttttgtggagaagtagatcagtaagcacatggataccagatagggttgtcaaggatgttgattcactgttgtccctattttcctaagctcgccacatcatggaaggctgctacccaagtgacattcttgggcttcaccaagtgttttaacagagctccacccagctgtcacactaggggtaacacagtgggccagaaggagaggcaggccttccctggggtcccattttaaaaagggggaagtcctctgttcttttacaacacttgtttaccccaagccattcagcatagtattacttaggtcccatacagagaaccttccaacagatagctctccttgctcaggcctgtcctgatgaactccctgatattcttccaggtcttaaaagagtgagagctgagcatttccctctctgccctggctgccaggaagctcagagataacttgtttgctcagttcctgtagctttcctgacccaggacttctttttcttataaattctccttgttccttttccaggaatgcttgctttttatgttttgtttgtttatgttgcttttgtctctgtattatactttggggggtggtttttggaggcaggattggcagcagccatggtagttagaagcaccagcagtaaagctggacacacctgggtttcatccccacttgctagctgtgtcattttaagtaagataagttgcctcttcagttctcggttcctcaccttgaaaattgggataatgatcataatgaatggataggttattgtgaaaattaaacttgtttattgtaaatgcattgtttcctgttcctgctcttggatcaggcttgatctgtggctgtagaatcctagtcttaatttccttcttcctgcctgtgtctgtcagcatatgatgagttgtacaatagtagtgactaggggaccaaccatcccggtttgtctgggacggaggggtttcctgggatgcaggactttcagtgctgaatgggaaggtcccaggcaaatggatgagtcggtcaccctggtaataaacaacctcaacatctcagtggcttactgtagcaaaggtttatttcttcgttgtgctactgtccatccagggccttggctaaaggaggagcctctatcccaggaaattgacagtcatgggcacagacagaggaacacatgttaaaggtcctttagaaagttgtggctgtcacttctgccctcattcactggttggggccagtcacatggccaggcctgccaccaggctgtgcagaaccttcccactgggtgggacagctcagcctggaacactgatccactctgccaggctcacctttctcttcttttgcattttagggtgctggagcagggaccagggaaaggagagagtcacttggtctgaactgggggtcttggatgtgatcatcttcctgtagatggtcggtatgggtttcttaaggggcagggttcagcttcaccctgctctgctcagaggagcagctgtgtctcctttggacgccttctagtggttgatgccctcacctttctcagctgccaaggcctctctcgacagggcaggctgggctgtgacttctcttccaccctccttgctccttcctgtggagcccctgagatcctttccccatgctcctgggtggaatggagggtgccctctcacattcttccaaggcatcttgcgcaagtccctccatgccctgctttctctggcggtccagcatgcctccatctcacctttgggactctctagcttggaagtgggcacacctgcagcccctgactccaggaccacaggctaggctctccccaaagcatcctcatcacacaccatgtggatggccaggtcagggcggccgtcagagcccaccctcggcaaggataccctctcaaaggcacctctgttggctcaaatcccttttggaagtagcccagaaagaggctttcttttttcttatcttttgttgttttatttattgttcttgcatctaagaacaccttcttggtcagaaaacagttttccagaaataatgttaagtaagtgtcacaactggtttagctccctaacctggtctaagcatataagagaggcttttgaggctgggcgtggtggctcatgcccataatcccaatactttgggaggccgagatggagggattgcttgagtccaggagtctgggcagcatagtgagaccttgtctcttctaaaaataaaaaattagctacgtatggtggcacatgcctgtagtcccagctacttgggaggctgaggtgggaagatcacttgaggccaggagttctaggttgcagtgagctatgatcacaccactgcaccctaacctgggcaacagagtgagaccctgtctcaaaaaaaataaaaaaggctttttgatttttgttttgcagaagtaccaaaatctatattagcatttattatttttatttctataaagtaaatttgagtattgggaaaattgatcaaaatgagaaatttcatatggagtttagtacttgaaatttggatccttcatctaaatttcagggaagtcagggctgggcatggtggctcacacctgtaatctcagcattttgagaggccgagatgggcggattgcttgagcccaggactttgagaccagcctgggcaacaatgcaaagcctcctctctacaaaaaatataaaaacaagccagacatggtagtggtgcatacctgtagtcccagctacatgacaaactgaggcaggaggatagtttgagcccaggagatggagattgcagtgagccgagatcatgccattgcactccagcctgggcgacagagcaagactgtctcaaaaaataattaaataagtaagtaaatttcagggaactcagagaacgagaaaggacatgaaattgttcatttatttagcatttgttgagtaccacctggagtgaggcacgagatcaggcacaggagacgcctataaataaggccctacctgcctgaagcttatgggaggtggaggagacacgcctacaagcagagaatggtcacagggcgtgaaggagcctgggcaggagctgctgcaggagagccagggagagaggatacagctctgaaggcttctccaggaggtgtgcccacgggcacaggaaaggaaagcaggagtttatcaggtgactgggtggttgaaaggagccacacctgcaagaaacgtgggcccagcagaggcagggtggttttgggaactcttgtcttttagtctgtcggggggctttgggtagcagatgggagggttgggctgaagactaagcagtgtttcctgctgggtgggtttgaactttgtttggaagacttagggggaacagtgaagctattgcagtggtctgagcaagggggtatcccgcctctgaccacagtggagaggggatggggctggagacgacagcagactgaacagaggcagtgacaaggatctggagggaagtggctgggcccatcccttagagggctgtgtgggggctgtggggtgtgggaggaagagaggaaggaagcccagggtaggttctgggttgctaatttgggggctgggaggatagcgtgtgacctaaacagagaatcagatttagatggaattacctatattaagcctggggatttcatatctatttgctgctgctttaccagttgaggctcaagaatgagaagcacaaaatttctggtcacattatttgcatgtgcccagactggggttaacagaatcggacagtgagcgttcctgaatcagactgcaatggggaatgaatgccttgggaggctggaagcagttgtattcgcagatattcatttggagatctctatagcgatcgaggcaaagataccccaaagactgcaagaattagccagtggaatttgaaatgccaaaattttttttcagaaaggtcaggaaagccccgtttaaaatctaaattttgccatctcaaggcagtgcagggatggattaggaggatgtggggtgacccttttcttcctttcagagccagtttctgccagacacaggaatcctccacatgagtcatagggtggagaggagacccctcagtcctttcagtaaggtgggagggcagtaccgcccggtggctaccatgaaccctgtttcagaatttctttcttaacttcgtgtgtgcccaggtgcacttgagattcactgatgttttctttagaccgaggagctcgcttcagcagttagtttcaggtgttggctctgctggcattatgcttcggcttaatgttttctgaagacttgttttctgttgtttttcattgttcttgttgtctggcttcaggccactaccttcaacctagcaagagctgagtggtgccttcagcagtgaggtagcttctgaaggccaccactctcttgctgtgtgactttggctagtttctccacctctctgtgcctcagtctcttctgtaaaacggagaacacaggagtatctccctcatagagttactttcaggtttcaatgagttaatctacataaaacaataaggatagagcctgacacaaaatcacactcaacaagttttcacaattatgattacttgacccagtaggagaaataaaaaacacaactaacttccttctaaggacatgcccaagaatccagttttagtaactttgaaggcattgtttttcaccgaaaatatctcctgccagattttttcatgtgtttgcagcttagctttaacaaggagctgaaggacggccaggcagcaaggggtggtgagtgccggtagagtgtgacgagctcgcccagccttcctccctgtaattaggagtcatgaaccatctacaccatctcccttagctaataagagatttttacatttacttacctcaaagtgacctgtctgggttttcttttcttgtggcccccactgtaggtttttggaagaagctgaccgcctgaaaagaaattataaaacatgaaaatcgctttgaggtgaccaagtccagaggcccctaactcctcccaagctggatctggggtgtaagaactgtgacttcaggtaacaaagtagtatcccctccctgccccctgtgaactcatgattcttggtagcttgcatggcagttcttcctttaggaagtgtagtttcttccaggaactctgaaacttggggtattctacctcatgcggttgtttggctggtcaaaaaagggagtgggggattctggaggtacttcatgtctgctgcatggcccaagggggccagggctccataaatcaccaagaccctgagggcagggctctgtactcattcctggccctgcttctgtaaatgttaatgacaaaataacaatgtcacccacccaacagggtctttaatatgattaaataatcatgaaatacttcttgaaggataaatcagagagaatagctaggaaatttccaaaaataaagagcagtaggagagtatttgttctgctagctattaaaatgtattctaaagcacagttgtaaaaacagtatagtactgtgatggaaataactagatcagaggaacagagtagagagtccagaaataggtgataaatcaataaaggtgtatttcaagttagtggcaatgggatgcatggactagcaaatggtgttagaaaaaatctcctatccattagagggaaataagaaattcctaagcttaggtagtatatcaaaataatttccaaatagcattaaattaaaaaaatcattaaaatcttagaaaaaagaatatttatattattttgggtaagaaaagacttaaaacatgtcacttttggtcccacatacaaatatcgtaaacaaagttaaaaagcaaaagggtgggaaaagtgtttacaacatcaatgatgaacaaagaattaatattcttagtatacaaatttattcgttcattcaatatttattgagcacttagtatgtactagaaagtattctgggcactaagggcacaagcagtaaataatgttcctgttctcctggtacttagaccctgatggagaggactgccagtgactatggtagattattgtaggtcacattttgataagggctaaggacaaaacattacgtaggtggctgggctagggaggcttggcagggtttgcattatgtggatattcaagggggcttcactgatggaatgacatgtgaagaaaaagggaaagtcattgaatgtcgagctgatagcacatttgctgtttttggaatgtcgagctcataggatttgctgatggattgaatgcgggttgtgaaagaaaggagtcagggtggcttctaggtttggggcctggcaaccagaaggattgacataggaatgactgagaggcttggcttggagatagagttttggttatggatgtttcagtttaacatctctcttgtatattcaagtgaggacgtcagggaggtggtcggccataaatatctgtaattcagggtgacatctaggctggagatataaatttgggaattgttgcagtgttgatagtatttgaaagaatgacactagctagagcccctggagagtgtgtgtagatacagaagagggcccaggacatccatgggaccctcccttagagttgagggagatggagccagctaaagagagcaaaaaggagtgaccactgaaatggaaggagtcccgtgagaagggggatctcccaagccaagagacagtgagaagggcgaggtcagctctcctctggatgtgctgatgggcaaggagagaactggccattggatctagcagtgaggaggtcactggtcaacccaacaagggctgttttatgggaatgatggggagagaatctgtttggagttggattattgagaataagaggaaaaaaactggagacagagaaatgggacaatagctggaggaggatggtattcaagtaagtttatttttcccaagatgggagttacataactcttgttttcacccaagtggaaatgattcagtagcgtggggagagtggatggtgcaggattgggctggggtgagggttctgaaatggtggtctcgaggaggtgggagaggtagaatccaggcatgagctggggaagggatcctaagtaggagcatctaaggaggtggtaggtgtgcacctgcctcttttctcagttcactaagaagcagagtcctcagcggagaatggagactaaggagacgatggaagtttgaggagagagggcaaagtatgaagtccttcatagcagaatgagaaaataaatggccaggggaatgaaggattgctgggcggcatgcaggcctctaaggggtatgtttctccagccatgtcctgttacacaggtgaacacggggtaggaggccattgtggtagaaaaacaggacatgagcagacacaacgtaagacagagaaacgcctgtaaagagaaaaagcaacatcagtaatagctgaagaatacaagtaaaaacaatgaggttttctttttttctctttagactggcaagagctcttgttggggatagaaattattgtcgcttttctggagcacagtgttacagtatgttccagaatacaacgtgtgtcccgttttgacctgtcagtcccacctttagaaatttattctaagaaataattgctcaaatgcaaggaaatatatgcacaaagatgttcaccccagcagtgcttatcaaagtgaaaaaatggcagtcatctaaacaggaggcagctggttcacttatctgtcggcctaacagtgatagtgggaaacagtagctcacactcaccctcctgttttgcagatgagggaagttgggtccagagaggggtagtgacagctccagtcctactccacggagctcagaccccctggctgtaggcaggcaccctgcccaacctcttcaactgggcttggagtcagagtcccttgcaaggcacttgtcaagcccttttcaagggccggtttgcttaatgcttttaaaatacgagttctcaaaatgttttgcaaatttgtttacaatgtcttcatttcatctcatggctttccttgcaaaggatgctgacagtggggggaaaacaggccgactgcctggccgtgatagaggggaccatattttcctgattcccaagtaagacttacagtggaagaaaggatattttctgctttcttacagtgtttacaaaagtcataacaggatgtgaggactatctggctgcaacatctgtcaccccattggtcgccagagttgattgggctgatctggctggttaggcaggtgtcccattcctccctcaccactccatgtgcgtccctcccaaagctgtatgctcagaaaggatgaccatccccgatagaggaggactggtctttggtcaagggtatatgagtagctgcaatcttctgctagggacccccaaacaagctctcaaaagtcataacaggagtacaaagataataaggaacttgcatttatttgtttccttgatcatatgtttattgattagaagaaaataaaattagcagccagccgtggtggctcacacttgaaatctcagcactttgggaggctgagacgggcagatctcttgaggtccagagttcaagaccagcctggccaacatggtgaaaccccatctctactaaaaatacaaatattagccaggtgtggtggtgtatgcctttagtcccagcttcccagcgttttggatggctgaggcacgagagtcacttgaacctgggaggtggaggtggtagtgagctgagattgcaccactgcactccagcctgggtgacagagtgagactttgtctcaaaacaaataaaaaataaaaataaaataaaattagctttgtgtgtggagaaaagggaggaaaaataattagcattgtcagagaacatctgggttatttggtcccctccgtgggaactgccctgggttttcacttctagagtttctggttctggtttaatttttccacgccacagcacagggaccgagaagctgctcagcttctctaggcttttatgtcttcaccagaaaaatgagcgggtgggcttaaatttcctacaaaaactcttaaaataaatatgatgctctttccattctatcacatgcctgttctgggtccgggggtgtgagagatgcattagtgctgctgtaaaccagccccgggtctccccccccggccccccaccaccaaacccccaagcaccaacctgggttctccaccacttttgagagctcatcgaaataaacacacctttgtgcctcttgtaacaattccagatcatccaatggcagaccagagaatggacatttcttcaaccatcagtgatttcatgtccccgggccccaccgacctgctttccagctctcttggtaccagtggtgtggattgcaaccgcaaacggaaaggcagctccactgactaccagtaaggcctttggggcatgtcttcctcttgttaaacttggtgtcagttctcgggcatggaacatctagcagccagctactgtttcatcctggaaaaggggatgggaataaaaaacccaactctaggtggcgacacagttggtttttggctttaccttcccctagtttgtaagcaagaaggagccttcagcagtgctgaggcatttaacttccacttcctgtccccaaaatgttctacacccagagaaaaagaacagccttaaggccaagttctgtcttttacccctttcttcgtcttctttctttgctcctttgagcaagagggttaagtctatgggtgtcatctcagggggttcaaagagagctttgcctgagggcctctctgaggaagacagcaagtgtcaggtgcttaatgaatgtttatggaaggaatgagtggaggtcctctctgaaaacaatttaggaacattgatgttgtccttaaacattatttaaattagtatgaacttgttatattaaatagtatttttgtttatttttagacttgttgacttttcgtttgagtaagtaaattttcacacttacagtcatcccttctatatatgtacaaacacctagggaataaggcagtgtagaatattcaaaggcacattttgttttgccgaagcacctgcgtggaatcttacccaaatgtccatttaagaggttttcttttgtttaatgagggaaaatctccgaggaggtataccccctacagcagatgtcctttctgctgaagttcacaggtcgaatttggggagcacaatggctggaggtcagatgcccactaggagatgctatgattaatatgtaagttatcccagatgattaagacagccaacacccaggggctggagagtgggtatgagggctgtgagggcgttcttccatagcagtaactccccagcagaaagactgcgagatgttggccacaaaccctttgtcttgagcaagcgctaagggagccactgatgtgttctaaggcctctgtcatctggacctgtgggttccagcctggtcaccacccaagatttcccttgtggactctggtttgctaatcttctgtaattcatggagactcaattaattaagcaaccttaatccctttcactatcattttaatgtaactgaagtcatctgtgactgtcaggcagagctttttctcacctgagattatcacctggcctcaaggaacagatagaattctagacaaaagggagaggggagtttttgtccttccgtgcggcctgcgtgatctctgaactttagaactagctggggaaactctctgcctgtgaggaaccccagggcgtctaattgggaacactgttctagaatgcccatgatatgatccagtgctcctagaaacagctatttttgcccttgggattacattgtttgaagggccatgctctctcctttcctgtgggataaaggaaaaaggagagaggcccagctggcagtccatgccctcctgataaatgtatggattggagaaggcggtgagggggatttggaactccttcctctggggatttcagtctgttttcttctactgaaccacaggatgcaacgaaacttggttttctgaagtctgtgaaagggagggagatccttgctgtgaccccaggacttctgtggccctcagccccactacgcccctccatcccaattcctaaaatctaggggttcccacctacctgagaagcagaatatttggcagtagtgcctttgaaaagctgcctggggctctgctcagtactttgttggtactttaattccaccctcctcacttcgtcccttccctgccaaatagatatgtatgcacatttatctttgatgctcaatatgttttgcaaacagaataagcttcatttatccagaatgatggggggggagaatgagaggttatatagatatttcaatcctatggttaactaagcatttttataaacactacatattcccaattttcaaacaatcagaatatggtaaaatatatgttaacacacaaactcttttgagatgataacttttgtttgataacctgagaagctggtccaggttttatagtaagttcaagttaattttcatttgttttacccttattatacatcattaattgatactgtggctgttcgaactttatgattgtttggtttctggataaatgagagccttctgtcttatgataagaagctcttctgtatgtctttattaacatgcagtcacattctcttttgttttttcagagaaagcatggacacagacaaagatgaccctcatggaaggtaccatgaacctagtaatttgaacttcagcatccttatagccattttctttgcactgttacacattctgttacttggggcagcacccatgtcctcaactggagatgagcaaggaggccgtgagcctgtgggcgctcactgtgtccctccaacccccagtccccttgtgtgtctgcagagagatgacaggatcaggcagaagaaaacagcaatgtgtaactttgccattcatctccagagaattatgtttttatcttttgctttttcctccccccaggttagaatatacagaacaccaaggaaggataaaaaatgcaaggtaagcttggaccttattttgtctacaaagcatcctagttctggttgcttagagagcagctgaggaggctctgcatgtttggtcctgtctaagagttctgttgggcactgtcacctccttagggaataggcaggtagtgggccttggccgaggtggccttctgccctccatgctctccatactggctggcctttactctttgctgtctaagcacctttaacctgaagtggatttgaaggtagcagaaatcaatcaaggctcaagtttttccccagtcttcagcagagaacgtcttcctgactggagcgccctccgcaggagacatggctcagtgatttggttcctgggctgggacttgcctctgtcaggggcccctattgcactgcgagttgcaactgaatgcaccacatggggcatgctcggtgtctcgagtagattctctgcctgggtctgtcctgcctccagccacacttgctgacctcttcccattgcgtcctcagttcttctgccgttagtaccaggctgtgttctgaggctgcgtcatgacagactgatacagggggctgcagaaattggctgccctaaggcttcaagctcttccctcggaggccagccttagcaggagctcccatggctctgtatctgcggcagctgcagcaaactacatttccatcgttgctgcacctccttaggaggaccatcaccaatggcaggtgcacatcagtcagtgtcaccctgcctcagcgggaggagtgtgacattcctcagaggaggctcctggggacagatgtagcatctgctgcacctaggtggggacctagttttgatccaaggatgacggcgttggttactgggtgccctagtcagtgaggctgtgactggaaagaattggtgccctgcccaggtcacatggccacacagcgggctcctcacagacctcagggacagcccacggggctctggatgctctgtgctatgaagccaccacctcccttctctttcctttcacccccatttcaaaatccaatttgacaaaggctgagaggaaaagaaacgaggagaaatgaacaattcagtttactctgaagagacaatttttgtagcttttctcctgaattctaaagatgaggtaaacataaaaaaattaatactgacctggcagtgagaccattttcttggagactttagttgaaaagtctaattttaaacattctgcaaattctaaatttgccttgtcagatgaacattgaaaacagttacaactcatttatttttgtcatcttttcttgatgcttggttacattttataagaaatcgtttttcatattgttgttcagggaagctcacagtcagattgaaaagcggcgtcgggataaaatgaacag

SEQ ID NO: 15447 - DNA, 87778 bp, Homo sapiens
gaaagtaggtcagggacggaggtgcctgtttacccgcgccggactcaccgccgccgccgccgcgggatccgagtgcgggcgcgggcgcgggcgctcccggcgagccacggtgagtgtcaggccggcggcggccagcgacgcgatcccgcgcaccccgtcgggggccgttagcaccctcgcgggcgctgcgcccctgccgccgccccgggggcaacccggccgccgaagaaccctgcccgacgtgcccgctgccggccttaaagggcccgtgaccgctccctgcccccacccgggccgtggggaggctgcgccccttaaaggcgccgcgcccgtccgcccccatcctcctcgcgggggctgccgctgcgggctagggcaggcagaggtgctgcaggagcccttaaaggggccgggaaagtgttcgctggagtacccaccgcccttccgcgggcatcgctacctggcggggggagggggcagctagctgcctcttaaagggatagctctgcccttgggggcagtgactcggccgaagaggactcctagatgtgtccccgggagcttcggggatccccgaggggaccatgcctggtggctgcccctcaagggcgttgggcgaacggtgccgcgtctgcccttcctccccgcttcacttccctttcgggagcccgcgaggctgggtgggggcggggagggcgtctccgtcgggcttggggagtccaagtccgcccgccccttcggccctgtagccagggctggcgctgcacccgggaatccccggccggcacggggccgaccccagcctgcgaactttcgtggggcctgtgccgtccaggtcctgggcggccctcaaggatgccccgtgggtctgcgggcaggtgcgcgtcggcctggggatgtcgcccggagcccgggtgcgggccggccttggagtcccagagctccgcggagggcgcagcgagcctggctccagctccgggtttgacagatgtcagggaagaaaaggttcccgctcggctattgccgggcgttgacatcccagagagcttcccgtttgcttggaagaagacgaggaaggtagaggtgaacgtcgaccttgtggggcgcatgttagcctccccgaggggtcgcgagagccggcagcggggtgagctcaggtgcccgccggcaggagctggggagggaaggggagtgctggacaccggcgcctgctgtcaagttctcgccggccggtgagagacccgctgccgccgcgcaccccgcacctcctgacccctctcccctctccgcctcggccccttcccggtcacctagcgttgttttggcgctttggcgcttgcggtctcttccttcttccaccgctactcctcagcgaggaattattagccaagttttctcacccagcttccaaaaatcagattccgtatttgtgaacaagcttttcttgacactacccgtatacccgtatttccagcatcgtcgttttattaaacatccataaaagctgccccttagatgcattcatttcccacgacacctgcttgcttgtcatttgtccttctgacatctgctgttgttcacccctttaatctattattaaatgacaactattattttaattcttctggtctcattgatatccggatctgtgaatttgggttggtggagtttttaattaatgtacccgttgaatcatgagcttaaaataatcattgctgctcctgagcagttttgaataatatcatgctctctctgcttgcaagacttaaaaaaattcgctggtgttatatttgatttccatatcaatggaattcccaaatatttttgaaaatacaaaattcagtctttcagtccatgttttgttactcagatcattttactgataagtctttaacgcagcttatagaacatatttagaaggtttggaaatttcctggacaggatttgaaattgcctgtatcatctgaagctggttctgtagaagcattttggttttgattgtagatgcagccagtgaatgataacaataagttaaaactgtagttaaatttgttctttattcaaccctctgaagaacgaacagatctggtagaaaagcactaacctgggagttaggagctggacatcctggttctagtttaggcttgggctctcatggccgttccagtcggggcaagttattaaagatttctaggttgtgtttgcctctgatggaaagtaagacggttgaactaggtgatctcaaaggttcctctcttttgaagttctgtaagtctctaaatatttaatacatttgaattcaggttggtatttacctcctggcacctccagaatatctgagctgaagccctattttcataagaaagttaagcagatcaacagatggtgttttgaagaatccatttcaaatgatttataaaatgatgactacttacgagtttgtctgctatttgcagaagaggtttgcatgccacagggcaggaaaaggaagtggccatgttttcagatttatcccttcacaccaacaatctctgtggaatttatatgctaaaagatggagaagcaccatagaaagatttggctgtattaacaaaactgcatatgaaaaggtaaaaactagatagttaatatctctctttggtgtaagggttataatgtatctgagctttctttgtgatttcatcatcaactctcactgtggtaggaaaatcaatattaaataaacagtttcagccccgtgattacatgcagtgattttaggaagcatcatgataactaaagtaggtacttgcagggaagtaaaatatcctttctagaccttgaggtttcgttgggagctagggacacaggcatgttatccttctccacagtcttttttcattgtcaccttatcacaagactcagatttatcccaaatacccaccttgtcttttcttctccctctcatgaaataagacctgctctgactcaaccccctcagcatctcttacttcccacccaaaatgtcctgtctctatccccatcgtcccctcatctcctcccaattcagagaaagcaagtggacctctcctctgttccttttcttggcctctcaccatgggcaagtgcctgggctctggtggcagaagaatccatggctcaggtttgggctttgtggtcttggatgtgtgcttgactcctctgacctcaggtttctcctcttggtgtaatggcagtgcctgcctcgtggagtctgtgtgaggattaagggagatggtgcatgtaaaaggcctggcacacaggaagcctttcctttgtgccagctgccattccttctcacctctacccgggtcctatcactagaatattatttgtgctgtttgtccttagtctcccctgccccaccctgaaaaccttaggcttgacttaggagaggaaggatggaagaggcagagtcagacttgtggtgagcctgctgtgtaccaggcaatttacatgtgtctttacttggtaccctgggttcgtaagcctctctttcctccctcctgccagcctcccccactctcccatctcctgctccattcttagtacctgccctctggcttctctcgctaccacctttctttatatttcttctcaaagttttctccaaaactttgtcgtgagttcctggggcccatctgcccatccttattcctgagtggttgttcttggcccctttgcagtatttcttttatttttttaaacatggtctcagtcttgcctggttggagtgcagtggtgcaatcgtggctcactgcagcctcccaagtctcaggtaatcctcctgcctcagcctccagagtagctgagcctacagacacgtgccatcacacctggctcatttttgtatttttattagagatggagttttgccatgttgcccaggctggtctcaaactcctgggctcaagtgacccacctgcactggcctcccaaagtgctgggattacaggcgtgagtcactgtgctcagcccctttgaagcttttacctcacttgttttttgtcctttgaaatcctttcctctctcagcctttgggtcatgctggtttcttgattctcttcctgcacccctgtaaagataaatgtctgtcctagcttctgctattcacactgtccgtggcctggggtcccctctctagccctgacctgtctctcctgtgttctgctagcaggtccgttgtggacatgaatggcagcctgtaatctgcatttgtggtctcggagttacaggtttgcagactgcttgcaagcactgtcacattgagtcctcatgacacactggagcctacatcccttcattccccaggctgtcctaaaaggcagtttggttgggtagtttagcatacagactctggagccagatttcacatcctaagtattccctactggcttcgtgacttgtggtcaattttcttttgctctctatgccttggtgtcctcatctataaaactgggatcatagtagcccctacatcagagagttgaggtgtggattaaatgagttaaagcattggaaaaagtgtgccagtctattcatggcacattgcaaacactcagtgaatgttgctgtcagtcttgctgctcttcgttgccttgccggggtgccttggcctggtttgtagtggtctccacattcagcctgcctgtctgccagaccttgccatgtgcctggacactgtagtcaagctgaggggctgtccattccctgtaccagcccttggcccagtccatccctcaattttcacgtgtccaaatcctcctctgcttttaggacccagggccttggtcctgcagcactatttcttcattttgttttccttcctccccacacctggcagcaatgtccacattgatttttctccaattctcttaggttctgctgcattccatattgtgttgggctgtctctgaaaatatctcacctgctcgctcagcctgagcattctgggagaagtttatcttgctttttccaaaatgacaggcacagggagcctttaggccatggttgtccaatgcacattgatcttgtggaggaggagatgggatggggtgggcactcagggacggagcaggtggagggaacaggatgcacactgcatagaggtgggggtgcaacagggccataagtggacatggccgtaagtacttaggtctgcatggaaggagggtttgaattggggacttaacctcagggggagataagattggataaggtttagtcatctttgctgcaggggaacgttgagtactggcatgtaatggagagtggtttttaccttagtatgtgctgtccttttaaatagtgtaaactaattctttatctagcctggttaaagaaggggatggctggtctgcctaatttaatatttggctattgctctacccactgggttttgtgcatatactgaatgaagcattggcttgtatttattccttcaatcactgtttgaaatgtctgacctgggcaagttaattagcttctctgagtgcaaaataggaataataattattacgataatagcagctaacatttattgaacactttctatgtgccagcacatatgtgagtcacctttgcttattaactcatttaaaccccataacaactacatgaggcaggtactattatccttacttcacaaatgaggtggttttataaactgcccaaggtcactcagctgttatggcttggggcagaatttgtgctggtgaactccagagtctgccctgtaacaccctagtagattcctactgggaggaaacaccccgttatatcccttacctcactcagccgcaccatgccaggagcctagtaggctgacagcaattgggaaccagtcttattgttgacaaacatggtatgagcctcttttagagcggagctgcctgaaaccctccgcataagggatgcggacctggatgctacctgagcagcagctccaggggcttgtgaacattctcctcacatcctgttatgcatggctgtctctctggcctccccctgctttctctgcagcattgctctgacccaggccccctgtggctcagccagctcctccccaggcagctccttgtgtgagatgaaccttttaacataactcactaaccccacctcccaccctcatctagccatctgcagagctcctcactggggaggggaccttttcaaaggtccctcaccttcgtccttttctccctgaagaccaacgtccacaactttggtatatccacagtgttggggtgtgtgtgtgtgtgtgtgtgtgtgtgtgtgtgtatatatatgtgtgtgtgtatatatatatatatgtgtatatatatatatgtgtgtatatatatatatgtgtatatatatatatgtgtgtatatatatatgtgtatatatatatatatgtgtgtgtatatatatatatatatatatatatatatatatttttttttttaatgccagttgttccccaaatacatttagatagtaagggacacattgttttatgtcaagaacctgttacataaaaatgtgttatataatgttcaaatatatactgcacagtgaaattagataccactttttttttttcaaagaataaaaggataataaacacaggccgtcctgaatataattaacctcagatttgggaggcatggaaggacgtgccctgccctcagagctctcgtcctgagctctgcctttcttgagtgcgccgggagcaggatggatgggaagttggcctgaatctgccatggtgtggtactgtgagatgctctggaaattgtcttttttttttggcggggggtgggggatgccttcgcatcttgctcacttgtatctttctcacacctaagcagagggaagaagctctttttgccccctcgtacttagaccacccaggtcatcttttgaccagttttctgctctgctcaactcctttcaatcttcccagatgacaggccagctttgcctgctaagaacagccctggtgccagtggcatgcaggtggcacccctgtgtccagtcttccaggctctccagggtctggtcctgttcctcctccccagccctgcttccccgctcaacctccattcccagccacagccctgtgcccgaggttcagtcctccttgcctctccgctgtcctccctaggccacctcacttcacactctccctctggctagcggggtctttgcttaaattgttcccttgaggcctctcttccttgcccgtgcctgccttggatctcacttctctgtgaggtacctctgataacatttgttccctttgtgtgtgctctcccttttgctcttgattgccaaccattcattcgttcagaagcaggggtatgtcataatgagcaaattaccatatcatactgaatcaggatggccagttgtctcattttttaattgtttcatggttaattatcttacgctcacttcccactctccagtttcactcagttactccgtcagtgaagtttattggatgcctagcactgttgtgggcactgaggatacagcagtgaacaaaacaaggggcccgcaggaggggacagatgatgaatagtgaaacacgttcatgccttgttgtgagaagtgctaggagtgctaggatagcaagcaaatagagtaaagcagtagcgatgaggtatggtgggagggagggtaccttatctagatcacaggggagacctctctgaggaggtgacatttgaacttagcttcagaaagatctgggggaaagtatcccaggaagagagaacagcacatgtaaaggccctggggttgaaaggtgcttgatatttttgaggaaagtaaaggctagtgtgactcgattatgagctgcttgtgtacagatgttttctgcctcttttatactccctttaaccctgagcccagtgttaggaaggccttgtaaatacttacatacagaattatagcatttgtcattggttatatattataaaatagtaattttataaaataataatttatcataccctgcttagaaggcttttaataaaacattatattgcatataaacaaattaagggtttgaagggttttcttataaatgcactcctagcatgtttcaccaaatattactgttttaattgtgtttagtgcagaactttagacctcataattctgcttcatgtgcacaaccatcttaaaaacaggttttgttccaaaagtttatttgtaaggcactaggtggaaacttgggataaatttttctataagaaacaatgaagtaaatagtgatgtagtttctaggcgagccctcaaaagctatttagtggtgactgtagctgaaaacatactggttggtatcagcagtcgtcaagccttctgctggtagaccctcctctcagtagcattgtacctcatttgctgttagcaatcataggacccatttacctcagtcacttctcctactgtattttcagtctgttaaagttttatagaagggattttttacctttatacctttaagatttggttgcatgtgttataaatgagacagtagtgcagagagtggggaaaactctggactgggagctgggagaggcctgggctccagactgggcccagccactgactggctgagtaaatttgagtaagttatcctctttgaactttgatttctcaggttcttcttggctgtaaaatcctattgttttctcaccatagcagggaaacgtagatatacttcgttgttcaaacctgccctcaaatggctgcctctgatttcttcttgaagaagtatatggcactcagcaatgaggaactcaagcagttccccatgtgcagagctctgcagtgacattctcagtaggaaccttgattttgatctgctatctttcttgatgagttgaaagaaattttgtcccagaacttttggtccagataagatttctgtgttcttggccaacttatcttccatataattatgtaaattgttttttctttttaactcttagggataaaaatggtgactctggcttgcctgcttataaaatatagttataagtgcccttagggaatggaatgagtttgcaggagagagcagagctgaaagagtgtgggatcaaaaacaactttaaatgttaaatgcaaagctattttcagtaccctgctggaagaaaaaatttttttcaaggttttagaggatagaagaggtttttgctccaaagaagaaaggaacctaaggttttgcagtggtgaaaagtacctgatcctttaaccaactaccaccctcccttcccacctctgagttttgttttcgacatcatgaaccacatttgccatttgagaggtttgatatttaagtgacgttagtggcagagctcaactggcagtgttcaaatgacttaggtgcagagtgctgtgctgcaaacttccccagtgcattctagggtaagggatgcctcatagagagtgacagagcacttttagctctgcctctatttggtcagttgtgaatggtgtgttcctttttttccttacttgaaggcatagcgaggagttggtacaagaagttattgcttcatggacttcactttggagctagagggtggcattagacctagcctgccttcttggatgctggaataccagtggcaatgtcatctcttgttctctgctatacccctagcaatgaaaacagtgtctgtacagaaaagtctctcaataaatacttgtttattccttcaaaaagtgaattcagctttggataaatttttaatttcctccactctctagcagtataggcttatgaggttggtcttgcaaggtactttggagtttaggttgccatttctttttgacatctgtgtttttcttattcttcaggttggtcaggtatcagtgtcttttactgatgatggttgtccctgccctgctgatgttcatcttctgttatctttaattggctccaaactgcagcaaatctatagctgagccacattaactaaaagaaaacttgttgcatatttatttaggcatagtactacacatgtatttattcagtcaacaaatatctgtgagtctatatgccaagaatgttactagacccaaaggaagagcagaaattgttgttgtgaccaaggagcctgcagtttgattgccttgtggaacatctttatgagcattgtagaagggaggaggcttcatagaactggtcaggttttcacctttaaggatggtaggatttcgattcacagacaaggtgaggacaggtatttccaggaagtggctgagcggaaacagcataattaaaaacacagaagtaggaatggaccagtttgcattcatggacacagacttgtctaaaatggaaggttcttaaataatggtgggaatttaagtatggaagatcactgaaggcccaaacctgaagccattttagacacctagtgacttgcctaaagtgacagctgataagtggtagatccaggcttaaaataaggccatgggagctctcgaccactggcactggacttggctgtttcccagcagtctctagatgcaggatttgggtttgattggggattttcttttttctttctttctttctttctttttttttcttttttttttttttgtgatggacactgagattgggggttttagagtcatgagctggaaataggcaaggctctatttagcccactctttcattttgcagttggggaaactcagtgaggttaagtggcaagtcggagtttacctagtgagtcagagactgctaggcaatggataaccactggatttgttttattatgattatgattttagtgacatgaaatatttctctctaaagcatcagtccagtgttagtgttccagttggattggagcaatgaaggactaaatgcagcagagacctgacaggaggctgctagatgaatccaggaaggagagagagaagccagaactgagaattaattgtcaattatgttaatcagcatggtgttatcagtcaccctttagatttctagagtgcggtgaacatctgcctgtgtgagtggctttcaagtgtgtgaatctgcactgtactgtgaccaagataccttaatgaattctccagacagaaagtgccactatggaagtcgaatgttttaaaacaaatgcccacattttctggaaagagcaccagattaggagtcagatgacctgcattttaggctgcttctgctgcttagtcaccatatagccaaagcaaatcacttaatgtctcaaactgagcctgactccttatctgtggaacaggtataacaattcctgttgagcccttttcagtgtatgtgtgatgcttgtgtgagctaaggaaagaataggcattttgaagctgtaaagttgctttctggctgcagggagcagcagtgcagttttaatagtgaagatgtactggcccttacaggaatagcctaggagaaccagaagaaagttcccctacctccagggcatgtttagggaatctggcgctgtccaccaggtgggtgctgatgtgtactactttattggatagggccatgttttttgtttatttgtttgtttttattatactttaagttctagggtacatgtgcacaacacacaggtttgttacataggtatacatgtgccatgttggtttgctgcacccattaactcatcatttacattaggtatatctcctaatgctatccctctcccagccccccagcccctgacaggccccggagtgtgatgttccccgccccgtgtccaagtgttctcattgttcagttcccacctataagtgagaacatgcggtgtttggttttctgtccttgtgatagtttgctcagaatgatggtttctagcttcatccatgtccctgcaaagaacatgaactcatccttttttatggctgcatagtattccatggtacatgtgtgccacattttcttaatccagtctgtcattgatggacatttgggttggttccaagtctttgctattgtgaatagtgccacaataaacatacatatgcatgtgtctttatagtagcatgatttataatcctttgggtatatacccagtaatgggatcactgggtcaaatgatatttctagttctagatccttgaggaatctccacactgtattccacaatgattgaactagtttacactcccaccaacagtgtaaaagcattcctatttctccacatcctctccagcatctgttgtttcctgactttttaatgatcaccattctaactggtgtgagatggtatctcattttggttttgatttgcatttctctgatgaccagtgatgatgagcatttttttcatgtgtctgttggctgcataaatgtcttcttttgagaaatgtctgttcatatcctttgggatagggccatgttttaaagatgattacatttcacccccgtaagcctgggcatggacggaaaagttaggcatggatagccatgtgaatctattatctgtagacacctttcaggatagtgacaggcagctgtgaaccagaaaaacaagtgtcagaatctagccagctggccagtctggcattcttggatgtttcatctgtcctggggcattaggcagcgatccagaggaaccttgattagcctgggggattcatggctgagccagcatgctgtccaggtaatacctggctgcaaagcctgactggagatctgccaaatctaaatttctgccagcattacaagtgtatatattattattattattattattattattattattaatagcagtatctaaccttgactacctaccatatgccagcaactgtgctaagtgcttacatactttttctcattcagtcttcacagtattcatataaggtgggtaatgtcagttctgttttctagttagagagactgaaactcagacgagcttcagctgatacatactaagtgtaaaagccatgattcaaactcagaacagtctcagtccagtgcccagctgcataactgctatgttcttctttctctcttttcctggtacctgaaaatacttcttgtctctggttttgaggtttctgactgtgttattggttgatggatgggttgccacacagaggctcagctcagcacagctcttttttcttcatagcttatgacggacatcctcctggatactctggctggtgagcaaatgggtgccagtggtgaatgcagcagaaagactaactcttgccagctagtgcatgtgggtgaattttaaagacaacaaaagaaatttctgtaggtcagtttttcaaagagtaactggtagcttgtagtctacttaaaggccaagtttgatgttcatcaaagtcaccctgtaaaaacctttccaaatgctgtgattctgataacaataccatagaacattcctgtgtaattgacaagtagtttttacatacaatgtcttgtttagtcatcatcacaaccctatgagggtttgcaactacatatagttgcaaagaagactgggagatatctttagttgggaagccatgagtctagcaaaatctctgtttttaagggtggcgaggggagtgaatgaggggagctagcaatctgatgtgttgtggtggtgatggaagggataagtagagtttgaagctgttgtcagtagagttgggaggatgcctcctagtctatgacatctcctagtgttatgacatctcctcttgtggactgggaaattgcttagagtttaagcaactgtccagggttctacaactggtcagcggcagaggcagcacttaagtattgcttttgtgacttaattcactctctattcaagtttcatctttgctttctctattgaagttcttaaatattctgattcactgtatttagaagtcggcaggaattattaaagtgaacttctttgtggtatacactgttactgaatcagagtaaataaaaggtcacatgattggttgttgtgttaggtttaattgacgtgtactctgtatgatacagaatactcacatatcttttgtgggatatcattggtccaacagctttaaaaatcccaaggctttaatagatgataaaacacggagtttgtgtaatttcttgaaaaagttggccatcgagttcttggtcaggaacacaagcttcaattgtaacagtttccatggagacattagccttggcttgcatcatttcagctttcagtgcctttcctaggaatggagtgaactgctaaaagaagagctctggttgtggttgtcacttagagctctctcccctactgtttctgctggaggctgatttgcttttctgggtcttctcagttttttctgtgacctaagcataaattgtctttgagatcctggtaatctcatattttaaaagttttccacaaaagacaactgaatggaacacttttttttttcacccctttaaagtatttaattggccatcaacggtggctcacgcctgtaatcccagcactttgggaggtcgaggcaggcagatcacgaggtcaggagatcgagaccatcctgctagcacggtgaaaccccgtctctactaaaaatacaaaaaaaaaattacctgggcgtagtggcgggcgcctgtaatcccagctcctcgggaggctgaggcaggagaatggcgtgaacctggggggcggagcttgcagtgagccgagatcgcgccactgcactccagcctgggcgacagagcgagactccatctcaaaaaaaaaaaaataaaataaaatgaaaaataaagtatttaattggtggcaaggggctttgctagaagaatggacacctggtctcactcaagcttcttgtattagttgggataccaggtgagtccctctgttaaagagacccacaggcacaatggctgaaaccaggtagaagttttctctctcatgtactagtccctagtagatagtggtccaggcctagtatttttaacacatggcttccatttgatggttgaaggtaaaaacttaccatctcccagaggaaacacccaagggggcacacatccagtcatttttaagggaaagacccggaagcagcacattctctttttccagtagccggaatttgcaactacatatagttgcaaagaagactgggagatatctttagttgggaagcaatgagtctagcaaaatctctgtttttaagggtggcaaggggactgaatgaggaaagctagcggtctgctgtgttgtggtggcgatggaagggataagtagagtttgaagctgttgtcagtagagttgggaagatgcctgagtcaagggtgagaatctaagcaggcacacagaaaccagggcatgtgcagccatctagaggtcagggaagctcttggctctgaaactaagcagtggggggcacccaggcatggaagggaatgtgaattactcagaagacattaggttgtcagtaaaaggaaattcaccagtgtgactgaatcagtagaaagagcacttagactaggagtcagaagacctaggtttgagtccagcccttttacttcataacctggggcaaaaaactcccataaatatttgctttattatttagataatggcaataacagtgatggcctttcctgcctcccaggcttagtgtgagaccaaagggtgaggaagtactgtgtagactgcagccccatggagatgtgcacagtgtctgcccagcccagggcctgccatgggtgtatttgttgaatgaagtgtgaactattaaaagagttgggaaaaatgcattatactaaggagatcttaatcctggacagtcttctctaccaggcagaaaggttctgctctccactggtcaaggccttgggcctatgtgtaaaactgggtacctaacaaacacatgggcagacgcctgcagctccttactgggtagcacatgacacatagtatgtccttggcaaggccatttgctcattcctctgtgtaggtaaccaagtgcaacagaagtggaggtatagcccatgaatgtgaactaatcatttttaaatgatttggtccatgggcaggttagaagatgaaaccttcccaaggccaccaaaacttgatttcttgcttgaaaatgataagatgcagttataaaatgcttctgttgatttggaaaaaatgtgtgacttgttcaaaacaatatgtattaatagaaaatgtaacataaataagaggatacaaaaaagagcttaatgtttctatcttctgggcctagcaatagtgatttttttttccttttggtaggaaaatgggggctcagtggaataatcagttttatttctttttcttttaacttcatgaagggtttgtattgttcattttgttatttaatttgttcatttgctaaggaaagaacttctttcttggaactctgcggagtgtttttagatggactttactggaaaaaaacaggaattgaaattatattcacagtgcgctctaaactcttttaaaatctcatgcatggatggaggaaaatgcactgaaatatcaatagtggttctcacctcatggaattagaggtgacttttattctcatctccttctctgtggtttcctatttttcaacgagtgtgaattacttttatcatcatgaaagaccagttaaaaattaatctcacaaattaacactctcaagccaaaccacgaatttttgtttttcacaacctggcttggactataaactgtcacactatctcagacctatgcagattcttttctgagtgaggcattgaggaacttgttataaagatgatgctttccttctggaaatcaagaaacaagccaagggcttataatgtgttaggaaagatgtcctgagtaactttcctcctggaatctgactagcctttattacagctacttaaggaaatgagttttgtgggttccctgttcactgtgtcaccatttttttctttatcctgtactcatatgtacctcagggtccccagattttcttatcctgggattgcatgaccttgtccttggctctctcgggcccctgccgtttccagtgttctctgttcatgttcacaatattgttgatttggctgtggcttcttcccgcagtgttcttgtagactgaagagagcacattgctgcccttgtccctgtgcagcttcctcttcctctttatcattgctcaggtgagtggcctgagcagtgctcctgggatgaggtgaagagaagcagtcaagactgcagggaagggctaggggtgctgagctggccgagcttccctgggggaaggcactgggccatctgtccagcagcagttggcccacagctggcagggcaggctcaggagtggctcttgaagatggctgcttggtgtttgaagacagttcccagggcatgcattcatttgttgagcaccttcaatctggcagcctgtgttctagatgctggctgatgaccaaggctgacatggctttggctgtcatgggagtttcattctagtggtagagggagagagagagagacgatgtggtagagggagagagagagagacgattagcaggggaatcaatgaagaagataattacaggttgtaagaacagccccagaggaggttacaggtgcctgtttgtcgagaagtgggagggccagagttgggataggaacctatgtccctgattgcaaggtctggctccttctgtgtcctctgggctttctggtgggaagggaggaggtggaggagaccccttgcgagggccgagcttctcccattcagccagtctggaccagcctggggccttcagatggagatagcaaaagttgagggcataagctagggactggctctcttggtcactccagttgcccatctctgtacttccccaggtgaatagccatgttttttaaagaacacggagcaaatttgcatacaagagtccagatttatgcatgctgcagctttgtctgaaggcaagcttatattttctctcctattattttcaacttttaatgagttaccagcatctcagtgcccctccagcaaggatattgggctggtgttttcagggaacaattttaattaactcctccttgcctccctctcacccagccacccccagtccccttcctggtggctcagagtctggctttggcatgcaataagaatatttttgccttggtgttagcctttctgaaactcttgattaccagtgctcacaggacctttctgcagcactgtctgcttggctgtggactacccagaggagcttggtgtcaggcaaacttaggcgatttccctgagcatccttgttgagtctgcctttgtacttctttgtcaggtctagaggcttggccgtttgtcctgctcttttgtcccctccttctgggaaccctcaggaccctcactccatggagactcagcacccttcctcctgcaaacatcagtgatggggctttcccagccctttcccctatcttccttttcaaagaacaaagcctttgaagcttgtctcatacctgtctgatgcagtatgggaatctgtaagttctttgcctcctgaaggggtctggggaatcacttggctttcagagctttcctcgctcctctcccacccacagaccgattttaaccagagagtaagtcattcatgctgtgcttgaatactccttccagtcccactaggaagactctttgttactaaattctgttttcttgggaaaggggagcttattactatctcattttgttggttgttattaccctcctttaaaaatgtatctacatacacgcatgtgtgtacctacatgtttctatatttcccttgtgaatgtggccctcagagggcctggatttaaaccctgggagtggtagtgaccctttgggaaatgtatactttttgttccaaatcttctctggcttaaatttgtgaagttttgtttcagccttggtttcatagtttttcccagtttccaagataagtttggggctcactgtaatcagcatgtaaaggagaatatggccatcagctctgccccttaaattcatagtcagactcagtggggaagccgttcctgtcccatcttgcgctcgtggctctgtcagcctcaggcagctcctgcaccgtcctcctgcctgtgacagtgttgtcaggagttcttggtacctgggtgctgcttggcctcagggtgccagggctcccatgtggagtgtgcttgctgcagtctctacagcccaggtgtctctgcagccctcctcttacatagccacagcgtggtaaagtacatccagtttgcgctgtagtaagcaattttattaaaaaaataagtttaatatgtaagtggtcccttagttcgtttgaatggctcccctctctggctttggtttgaatgagctacacctggctggagccctgctgctcccctcagcatggagtcacctccctgtgctatggaggaaaggaagaagttattcttaccttggttttgagacaagacaagcctggagaaggctgtagggatgaaggagttgcccatttgtccagcatcagttgagagtctactgtgtgcctggcatcataggaagcctctggagtgctgtgagcaagaaaataatacttgatttatgtttttaagggttcttctcgctgcctgtgggccggcagtgaggaggacaagagcgcagcagggagatgggttaggaggcagttgctccggtgcagggagcagtgccagcttgagggctgctggtgggtattggtgtgagggtgggcaggctgcagataggccttcgcccattgcccttgccatgtgtccccatgtgtccccaggggaggctctgggcatcccaaactgtgagcctgccctttcccaagtgtgctaggccctgccaagctcctgcttcatggcctatgctgttcattccatctggaatgctctcttccccctgctttccatcctagctgagtgacattgggcaagtgaccagatctctcttgagcctcaatctcttattctgtgaaagagtgctcatggaacctactgcatgggaccatgaggataagactatagttgagtgtggtgattgcagtagcctccaaagctgtctcctgcttccaatttcatcccgctactgtgcattctttacacagcgatcctgtgaccgagggtcagatcagggcaggcctctgctcagaatcctctccacagtagcttcctgtcccagtcagaggaaaagccaaatcttagcatggccctcagagcttcctggtacttctgacctcatctcccaccccaaggccatggtgtatggttgatcatgctgggttctgcacagctcattgtggtgcatgtaagtggcactcacttcctccccaacttatgcattgcacaacttgtgcagctgtacatgctgctcctacctgcgcctctctagctccactccagccacagtggaatccgtgttgttcttcaaacacaccaggcatgcttcctgtttaagctctccctactgcctgctcccttggcctggaccattcttcccccagaggtgtgtatggctagttagctcaccttcttcaggtcttttttcaaatgtcaccctatttaaaattgttccatctgggtcactgccccccaaatgttccctttttcccttgctctttatttttcctcctagcacttatcaccatctaatatattatacgttttccttatttatttggtttatttttatttatttatttatttctcaacagaacataagcttgatgcaggcaggcaccagtgttaattttgttcactgctgtatccccagtgcctggattggtgcctggcagtaggggttcagtgatgcatgagtgaatgagtttggatgcacaaaggtaaagtattgggtacggtgcttagcacactggaagcacctaatacatggatgccagtattttcattgtctctgttaactctccaggccctggctcaaatgtggctttctctgagcctttctgcagtcccttctcaggctgaattaagtcaccaccacctgtgctctgtgttccccttcattttgccttctctgtctgctcggcatttatcacactgcagtagtgggcttatctcacactttttcctgttccaattgcaattcctgtggggcaaagactggcctgttcagatttgtatctcaggcggtctgcgcccccagctggcatgtggtaggagcttaggaagtgcttgctgctggtggctgtgggaggtggaaagagctttttaatccatcaggacccttacaagggggactggctccagcatcactgccgtctgatgtttgtgccccctcccaaggggtgtcaagggagagcttggcaaccacttaaatgagagtctccagtggtatatttagagcaaattttggagagaggagtctcttggataacagcatctgggtgacctgattgtttcacatataagagtttggctttttggctactcaggctttgagaggttggggtcattcaagggaggcagtgtaatacccatgtgttcagaggtggctgggacgagagggtgcaggagaaaaggcttgagctggcctgtaagggatctgagttggtgaagggagcacagcttctgggggtggcagaaggaataggagagctgcccctgccatacctggggaggggtggttaggtaggtgccttgggaggcatggttaggtaggtggtttggggccatggggggaaaactgtaatgccagggcaattactttggcctcttgtatttggcaggaggggtccacactggggattgtggtggcgtgagggagagggccctgggagagaagctctagagtcattttcttttccagaggtggagttgtcttggggacctgcacgtggcacgcagagcccatgctctcaggcacctttggggtggcagagtttcaactgaaccaacagaggacaaggggctgagaagtcggaggccttggctgaggtgcccagtttcttggttcactttctttacctgccaggttagcagcaagtgagcaaatccctcctgcctttgctcagcattagcctcagagacttgaggagagctgggccttcaggtgggagcctggtggccacactggagaggaccaagcttgacattgagtgtccgaggggctgaaagttgttcgctcatccagagatggattcgttctgcaaacatagggaaagttcccttcccattcctcatggctgtttgaggatggaattcctgcattgaccttggcctttccctgatcttggcctttcccctgcactatggcctctctactcttaacattacgccccagcccttttccatgggcccctcgtcttccctatggccatctaaaatggccgtataatattctatcaagggaatgttttcagtaagccatgagcttgatatggagcatttagattgcttctaatttttgctctttcagctaatgctacattaagccatctctgtgtattatggaatcatttcattagttggcatttgtctagctaatggcaatggcccaagatttaatagcgaatcagaatttcttttttcaagaagaatgtcatgaggatatataaaaaatttacttaaaatgctaggaatcatctatgttggggttttcatgaatgaggaagcagggaaacagtaacatgaaattagttgtaagtgaaagactgtgtgtataaaagtaactcgtgacttgtttgttcctgagtgtggaggggagccaataaatccttggaaggagcaatctacctgtgaaaatcaaagagatctgtattcctgcatctgatgaaaacataacaaacagtgatctcttcttaaggatatttttagaaatgccctaaaacaagaaaaagtaaataagatttccgagaaaaaacatgtctccttaattccaaatgagcctctctggaaatgccatttagtagtggaagcaggttgtagacttgctgaaaggatttggttctttggttattaggaaataactagaatgaaattgacaaacagacaacactgacttggtccccagtactgctttgagcctgaggtatgtgttggctttggaatgatggggaaggcttcctctgacttgctgatttgttgtagttgttgttgttattgttttgagatggagtctcgttctgtcaccaggctggagtgcagtggcgtgatcttggctcactgcaacttctgactacctgattcaagcgattctcctacctctgcctcccgagaggtgggattataggcacgtgccaccacacccagttaatttttgtattttcagtagaaatggggtttcaccatgttggccaggatggtctcaatctcctgacctcatgatctacctgcctcggcctcccaaagtgttgggattacaggcatgagccactgcgcctggtctgttgttgtttttattgtttcagtctctggtggcttattatgtagacttgggctgtaagctttgcatttcagtttaaaccagcaaatgtttacactatataaggttgcaagggctaaaactttagggagaaagaacccagtgcacccctgtttctgagaagctcatgaccagggagtgggaaggataaagcaatgttaaaaccaatggttattcaagggagattaagaagggggccctgggagagtcagctccatccttttagagaagggaggagttctacctcactgctgggcagggtggggctaaggggcaggagaatcaagaaaggttttatggaactagttgcatttgtcaacatcttgaaggacaggctgaaatggaggctggacattctcagcaaaggtaaaaggcctgagtagaggagatggagatggaaggacatggggcaatgtttgggatttggctgaagaattgcatgcctgtagtaatggtcatagtagcactttatggagagtatcaggtgccaggcatggttctaagagctttatatgtagtaactcacttaatccatgcaatgaaccaaatgaggtactgttattatccccattttacagatgaggaagctaagataaatagcaaggaattaattgcccaggatcacactgctgtggagccaagatcagaccaagttcatctggctccaggctctgtgcttacgaccatgaagctgtcctgtctctgatttggggaaagaacagtcactagaatcagacagatggacagatgccgtatgtttagaggctgggattatcaacattcaggaatgcagaggtggaaaagagaccagagatggagatgaggggcattggagaggtggggatgggaggagggtttggtgagagccgtgaagggccacaggaagacagagctttaaggagaagtttgtcagtgaggcccagagctgcagacaatcccaggaggtgagacctgaggaataggtctgggctgaggagaaagctgtgagggcctcgggagaggggcagcagggtgacccaggctggagctgctgtggtgtcctatcctggctgcagagtgctgcgtgttcctgggggatcatagctgttgatgagtatcactgtccctgtcctcttatctgtagaaagaggtgagtgtgacagagggggcaggtgagagctggcactgctaatttggcaaacctggtgacttttctgcagcctaatgatttttgaaagctgtttgctatgctgaggcacaagtgtgacttcccccatctaaatgctgtgcaatcgctattttccctggaaaattgggcccatgtgggctctgtgtgtggtttatttgagttccatttttatagccttattaccttgtccccatgatgcaagaggcctctctcttttcttgagctttgctgtgaaaattgtttcttaaaaggcacaaagtgatctctcgtcatctgggtggtgctcgctccacaagcagcacttttctcagactccgcacacacttgtcatcgcccctgcccccacttggcaggttcctctgattgttggcaatttactgagaacttttaggcagctcttgaagctcactacctatgtgtttgtcttgatttcttccggaagagtttgtgcatgtaaatatccattcagcctctttctctccgagatgttgccctgccactgaccgtgcttggggctgaaacccagtcttgtcctctggcctcgagctgattaacaatagcagtcatcatgtacagagcctgagtggttatcaggcactaagctaagggatttacgttcgtgatcttaattattcccaatttctttgaggtaggtactattacttcccccattttacagataaagaaaatgagccttcaagggatagagtaagttaccccaggttacatagctagtacatggcagagctgggcttaagcgggcctttctaaccttagactccatgtgctccattcattcattcattggcaacaaatgattgtctgcaacaggctgagaactgttgtagacccagggtgtacagcaaagggaaaaaaggccaaactcccaccttcagcttatattctaacttggggaggtagagatcatataataaatgacatatacattatgctatgtggtaatgagaactatggagaaaaatgaagcaaggaggtcagatgggaagtgggaggattttgaggagtggtcaaagaaggcctcattgagagtacaacaaattgttaggttaacaaacaaacccccaaatctcagtgtagcaacacaacaaaactgcacttctctgcagaaaaaattccaaagtggctgctcctggttagcaggcagccttccttgcagtcatccagggacctagactccttttatcctgtgtctctgccttcttcaagggccttggtttcctttgcattcaaatgctggagcgtgaggaagaagaagagagggtagtttgtgaggaaggctttatggaccagtctggaggaagcatacctccctcccacccactggccagaattcagtcacatgttcactcctgactgcaagggaggctgggaaaggaagtctggccatgtgccgcctaaaaaaaggaagtgggttctggtgaactcatggcatggtgtgttgcagcgagtgaggtgaagaagtgagctatgtgtttagctggaggaagagcattttacacaaaaggagcagcaagacaaaggctgctggaatggagtggggaggagagaaggagagtgggagaagatgagggcatggagttgtgggggccaggccactggggtcactgtaaggatttggttgccttgggaatgacaagcagagccagaacatagagttttgaaggaggaacgacaggatctgaggcacgtctcacagggctcactctggctgctgtgttgagagtggactgagggagcaagggggatgcaggggagaagcgggcgtttgcgggtgttatccaggtatgtgaccagaagggctggccctgagccggggtggtagaggtggggagaagccgttagatttgagatcagttctgaaggtgggccagcaacttttgctgtgggattggtagtggggcatgagagaaagaaaggagtcaagattattctgaggttttggctttgcctaatgagtattagtctcacttcctaccctcagaagcaagaggggaaattttttggaaaaggatatctgagtgttctctgggccctgacctgtcctccataacctctttcactctgtgatacttttttcagcacagatgggcaattcccattcatgactaggctttcagacatggagagggcacttggagtccctcctggcacacagcagaggtgaggcagcactgggaattgtctcactttggggtctttgggtcaaaccttgggacccctttagagtgacatggcagggactgagtgtgccctctaggggggtgagatatgcctactggagtccacttccaatgcctgccatctgcaaacactggtgaggccctggctgaagggtaacaacccacaaaagtgcacaaaaggaggaagttctggaatgcgagttgatgctgccagcggtccggttggctccttgccttctgttctttgtgtgttgacatcagacctctctactgcagacaggctgccctacctgagggggcacagctgccagcagcctcagtttacaatcctagcaaaggaggagagcctttctctacatctaggtatcagtttaagggaaaagcctctgtgtttgagagtgggagcggaaactgtttcccacgtacttccttggcagtcatgacctgtcaaggctgaaactggagatgggactttttaatagaccatgatctcactgggagcatatggggaagaaagttcatcttagagatggcagggcgtgagctgtgaaaacagatagtgcacacctactagatgctgggcccccgctaggtattttatttcactggagagcaaaacaatatatcatccctgccctcatggcacagatggcctcaagtggctaaaccatagaatggctagctgagagaaatgatagttctttctttttttctttactgattgcgaatggggttgtatttttaattttggtatccatgtgttcattgctagtatatagaaatccaattgatttttttgtttttatgttgtatcttgcatgtttgctaaactcactaattagtcatagaaatttttttttgtttattccccaggattttctgcatagacaattgtatcacttgcaaatagggattgtttcatttcatcttttccaatctgtatgttttttatttctttttgttgcctgattgtgtggccaggacttctagtcctatgttgaacaagagtgctgggagtgcacatccttgccttgttcctagtcttggggaaagcatcagcctgtcaccattaagtgtaaggtcagctgtggatttgttgtagatgccacttgcactttgctggcatggttgtgagtaggactgtgggttttgtgtgtttgtgtgtgtgtgtgatgtttggctgaaatacagtggttattatctacaagttttctgtcttgaaacagggagatttgttggggcattttctctttgtgctccttggcatttctgagttgctggtctcctcagttccaagtctgagctatatgcagaaaaggaaatgcaggaagctcaccactgtgttgttccttggatcctgaggtcccagctggtctgccttcttcagactgccatttggagtcttcttatagtcatctagcatagaatgcccaggggttttcattgttcttagcaggtggaatcagggaaagtgcacctgctccatcctgctgggagtggaaatggttgggggaaattggagcgtataggtcggggctagtttagatgcaagggctccgttctgtaggtgcaggagggccgtggaggctcagccctgacagcagtgggagggggatgggaagagggggagtggagagagcctaggtggctgctgcctgtgtccaggcaggaggtcctgaagtcctgaggtcctggccgtgacagtagaactgcagcagaaagaaggacaggaagttccatgaggacagtgaggaagtgcaaggagaccaggttggtctgaggtttctagctagagcagctagctggttctgagataacagagacagagggaggggtctaagcgtggcagaggggtgtattctaggcattgtagagcagatctggaagactggacttactgtgcttcccctcaggggaggcttcacagaggaagtctggctgctggggaaaaatccagggagtgtgcattctgggcagaggaattctggctgctgggtaaaaatccagggagtgtgcattctgggcagaggaaacaacgtgggaaaaggcacagatacagaaaacggcgtgatgggcctgttgggactccagctagctgaggcataagtgggtagttactggttccatgactgggaaggatgctgtaggagtgcacaaaaggaagaagttctggaatgcgagttgatgctgccagcggtccagttggctccttgccttctgttctttgtgtgttggcatcagacctctctactgcagacaggctgccctgcctgagggggcacagccaccagcagcctcagttttacaatcccagcgaagggggagagcctttctctacatctaggtatcagtttaagggaaaggctctgattggcccaggttggtgatgtgcctgcctttggacccgtcactgttgcaagggagtggagagttctaatctaggccggatcgtctgcccacccctgttggggcaaccagagtcttttaaaggagaaggcagacaaaatgcatctggggaagataaaaaagactgtttaccatggcttactgtaatagattttgaagaatatgtagtctggcagtgcaggaactcttcatggagattaaagcaggggacttgatcaaagttaggttttattaaaatcattctggacactgtatggggttgtgattggaagtgaatgacaagaggtgtcaaggcgggttcgtaggccactgctttagctccaaggagcactgatgaggcctaagctagcttagaatcctgacttactttgtttgcacttcacctgtagcgacagcatcagtgaggtggagaacagggatagagtcctagagatgttagacaggcaagacttggtggccagatggaggcaaggagaagggggtcttatggaggattccccactgccaccaagggcataaagaatgagtctctggagggctagccttatctttggaaacactattaagtgttggcagactcgatgtaccttattgcttcttcagaagtgttagtgttgttggcttcttgtggtatccagctggaaaaggaagctgattgattgcatttccctccctttaaagagcttccttttttgagaaatcagaagataggtgatacagtcaggactgccagtggagaaataggttggggagagggagacactggcttggagactctcctgcccccagcctgccccgaggcccgcgagtctgctttaggcacattcgtccttttggcatcatccttgctgggaaggcttttaagggatttaaggaaagaaatgacacaatctgattcatattgcaccagatttcctcctctgttcagaatagactatgggtggaggtagagtgactccaagagtagcagcagggaagcagggcaccaattaggagactgtcgcagcaatctaggatggggacggtggaggtggtgagaaatggtcacattctgaatacattttgaaggtaagaaccagttttagtgaggattagatgcggagtgggagagaaaggagatgaaaatgactccaaatttttggtctgggcagctggaagaacattgtcttaaactgaggcggacacaacgctgggaggagcacgtcaggggtctgtgttggacatgtttaagtttgagacacccaccatgtcttacacaaagctcccatctacttcttacttgacacaaacagttggatgtactggtcaggagttcagagcaggggtccaggcttggagagaaatctgagcattgttagcatggaggtgatatgtgtgaatccaggagactagttgagatcaccaagggagtgacagagaagagatgaaaacaaggactgaacacgctgacataagaggtggggagatgagggagaataagcaaagataagccagtgaggtgggcggaaaaccaggagagctagagggcatgattaactggtgtcaaagctgcaaggtaaggactgagactttaccaatggatgtagcaaaatgcaagacaggccaaatgcatatgctgttggacctaagcttaactttgcaaataagtcatagttccttcccagaaggagaatataattttgcaaaaagggatcatttaagatttattaaaataaatctgagaaagatgtgaagatagtaccgtaggaatccagcagaaggaaacagtgcttctggcttttgtggggaggattgagtcagattcattcataccttcattcatttgtgtgttcattcatttggcaaaaacttattgggtgccaggggttgcggggaggagggaagagagagttgttatctagtgggtatagagtttcatttttgcagatgaaaagagttctggagatggcttgtggtaatggttgaataagaatatgaatgtacttaataccattgaactgtacacttaaaaatggttaagactgcaaattttatgtgacatgtattttctcacaattaaaaatggagagagattaaataaaaaacagagcactttttggggccccatcatgaacttggtctgggatatgatgtttgaaatggatgcgccatctcagtagatggaggtaatgtggagaagagtggaggaagacgtccagctcagagggttttgggaactatcagtcctgtttgtctggatggtagggtctatcgggggaaaccatgcaagctgagactgcagccgggccagttggtgcaggcccagcatcctggctgtggatttgggcctgccttcttagattctgggagcctctgatggtttctgcccaggggagtgtcattccaaaggtgtgtatttagattaatttcattagtccttcctgttaaaccattgcctattaaaagcagtggggttgaggcattcatttttatggtgaaaattctggcctagcagaattttagatatccaagcatgtgtcaatgaagtgagtaggttatttttccatccattttacaagtatttattgaggatcatctaagtgcccgtagtgttctaggcagttgggggtatgggacggggtgaatttaacaggtctcttctcttaaaaagcctacagtctagagaaaccccctctccttcctaaacaagaagttatgccacaacgtgccatgtgttaccataggcatgccgccacagttccatgggtactgagaggagggggtgcctggcctgcctggaacactggggaggcttacagggaaaaactgtccaatggatttaaaggacaagcagggattttctaggcaaagaagcagaatgggcatcccaggagtatggtaaatcaaaacttattgggtgctatgaatttaaagctaaacttttatttcattggcttttaggtggtgctggctagagtgtatacgtttggacccaagcttaacttttccaatgtggaatcctgggccttcattggtaagtttgtttgatgccttcttaccaaattatgctatcaaggattggtatttggaatgaaaggcaaggtagttatcattggcaagttctctgtggaggttaccagccctggacctggagaagcctgtagcacaggctgaaggggtacataggaaaagtgaaatctcactgtaggtttctgtggtagatgcagagagggaggccagaggaggggaaccaaggggtgcgggggatggatgcagcgggccttatggagaggtggagctttggctctgttttgaagggcaagctagattgaaaaaagtccggggaggagtgaaagaagattttcgggacttgagaacatagaggtgaggtgtaaacaaagtgggcctagcagcagtcccataggagcaaaatcttcatcgaaaggagtcacgggcaagaactgtggtgggatctgctggcgtctgatgattctagtccatcagcaaactttttctgtagaggaccagatgctaaatatttttggcttcgtaggccatgtggtctctgtcacagctactccactctgctgtggtaacatgcaagcagccatagataatatggaaatgaatgggtgtggcagtgttccagtaaaactttatttacagaagcaggtggtgggctggatttggcctgcgggatgtagtttgccaactccttttctagaccctaaatgcccggctaaggcacatagactttatcctgaaggcagtgggaagccattgaagttattttggataaagaagtgaagtggcagaagtgatgtttacattttaggaacattcatctgatagctggacaagaggcatgggccccttttggaaggcagcagcagtcatccaggcatgaggtcttgcggtgaacagtagtgaaaatggaagcaaaggatcaatggaggagatactgcaaagggagaaccaatagcgttttcagtcttcttagacttaagaggcaggagtcaaagaggatgaaagtttaagcttgcttgtttacggtggtatctttgacagaaatgtagatgttgggggtggaaaggatagctgatgcatctggttttagatatgttgaattcaagataacagtggttcatccataagaaatgtccagcagagaattggaaatgcagggctgaagcctggcctgagaagattaagtctagagatgtggaatggaagccataggattaaacacggtctccccaagatgagcagtgggctgagctgtggggaatatgcgtaactgtgggacgggaagacgatggaagagacccagaggccatggaggagagtcccgggaagggaagagaatggggcagcagagaccagggagaacggacctgaagggaggctgctgaatttgtgacaaggtctttgcagatggccttgagaaatgtaatgtcacaagaggggaagggaagaggaagccaggttacatggagttggacataaatgaaggataaagaattgagatgttacaaaaatagaccgctcatagaaggtttgggtagtaaaagaagggagacacataagatttagatacttgcttgtcagaataacctttgctttagctttgaggcaggcaaagcatgctgtgaccagttttcatttccttctttggagccaagctgtgtttgggagtttgtgtgtaccttgggcttgtgattgtgttcttatgctcccttttgaggtgtggtgttcgtaactctgccacaacttgcaccacggaatccagcccgtgtttggacccttgccatgagacaagatgtgatctgttggggaagtagttgcatttgtataagttggaggagaaagtagagtggaccaaaaattgaaataaaccttcttactacagagtctatccaagtatggggacttgaggataattcctccagtcatgatttaattatgtatcaatttgtgctctgagtattttgagtgtaccttctttggtttgaattctaagtagtttttgacttggtttgtgtgaatatagcagttagagagctggtaacaaaagcaacagttgtaactggtttagagccatgatttattgaacactcattatgtactaagtccagtgctaagtgctattgtgtatcatcccatttcatctttgcaatgacctatgtggggggaattattaatagtattcttatttcagccagaaataagtcatagatgagtaactatgcaaggttacaagggatttgaacccgggtctgtataatccctggcttatgctgcttcctactttatcttgcctgtgtctggaatttttcctcctactaatgtagaaggactagagatagatcgagtccctcaggttaaatattcagaggctgtagtgggtgtttccacttcttaggagtctattgaaagggcagaagaagtgtgggaagtctggaagagactaaggccaaacctcaaacacttactttaactgtttccccagataaaatttagttgaaggcagcagccttgggcttggaaagaaaatagcgctagaaggcatgagagtcagattccagtcctagcattatgacaattataatgtcatttttgtttaaactcttggcatttctctccaattacctccagctttgagctccaaaggcaggctcctattttgtcttgtttttcactgtatccccagcatcgtagcacagaatctggcatgtagtatgttatgtactcactaattatttattgcttcgaatgcaccaagggacttggtacaagacacttagcctctcaggcactgctcttggcatcatggttatagaggtgaaacaggacaaggtctctgctgtcgtgaagcagacgtctacatgtgtgagatgtagaatgtgacgtcaggtatgatcatgctctgaaataaaagacagtgagaccggggtggagagggaagggcctgtccaagaagtgagacagtgagctcgttgggggtaaaatccataaaattcctcttggggtgactacagattgtcagctgcgctgtcagcaccttgttttaattgttttacttggctgccattgccaatgcccagctgactgctccctgcagcgagaactcccacctcaggcctcgctttcttcagctctgctgagcgtgcctctcctgggtcggctcccggttctcctccagctgctgagattccagcctccacagcctgctctgctggttctctgttctttgtccttagcttctggtttggcttggtccctttcacgtcatccttaacgtcctccctgggtgagctcatccaccactcacctctgtcttgaagacacccggatctccatatccggtctgaacctcctcccagtccacactcctagtggtctgccccgagggcacctcaacctgtctgtcccctcctgagtgccacatgcgtctttctccctgtgctgcctgcttggtccacgcccctcagttgcttctgcttcatgagtcgtcctggccttgtcttttccctcatattcccttggttaccacatcctgaagagctcatcttctaatttgtcaactcagttcttctctgtctctccactcctgtgtttaggattcatcattttgttctatgacagcctcttaattggtcatcctgtgttcatctttttcctccctcattccactgcccacattcctatcaacgtgatctttctaacacatgtctgatcagagctttcttttgcttaaagctctccaagagctcctcattgcttagaaaataaaagctaacccccttcagcggggcctgcagtcttctcatcatctggcccttggccccctgcagcttttgctcccccacccccaccccactttgggttttcctttttccctaactcacatttctaacctcagcctagctaccaacagccatcacctcctagtgcctttgcaatgctgggccctctcctgggaatggcgtggtctctgttcaccctcttgggaactcaactccagtttcccccaaatcttcaggacaccatccttccctacccagcacctctccatgacctggaaatgaccttcctcctggctcccagaacaccctcatgtctctcttgcaaagcacttatcggtgttactgttgatttacttacctgttatgctcagcaacctgagctccttaagggtggagaccacacacacacacacacacacacacacacacacacacacacactctgtctctctctctctgttccaagtgccagcatagtttacctggctcaggaagtttttgttgtaagagtgaggagtggtctgtttgtgcagccaagcaacagattcataatgtgataaaatgtacctgaaatgggaggttcattggccattgggtttattggggtgctcttcttgtcagctttgagtgcaggacaggttgtgttgggcttgagtttgtgacgcctgttgtgtctcccagcatgctgagacctcaggaatgtctcttctctatattctttgcccctgactttttatttttttagctcttgtttttgatggaccgataatagcaattcaaaatgaaaaataatccatcaaggaattctcaggaatgaggtccacccaccttggtcctggatgaatcccaaatttcctaaataagccagaatatctattcttgcgaactactgtctgacagcctttttcccccttaatccagctgagaatgcttttcttgaagggtaaggatacctagtggcccttcatgggggtgcctgagggcctctttgtcttcattttaaaccttgtaaagtccccagtgaatactgaggagtctaacaaataggaagaagctctgaccccaggggtcccaagtcagcatctgtactttgcatgggagctagcacaatgcacctagccaatagcatataaactctcctgttttcattcagtgccttaagcttgttgcttgttgtgtcttcttcacttcctatctctgccagagacctgagaagttgtgccaagagtgcagcttttatttggggcctcacagtaatctaggaaagcttttcagaagagagccattctcagcaccgaggtgtcctgcagaccaggacactccagcaggctcttggaactgctttcctgggatggaaatgcttgtgatgctgcctccccttgtagggactttccatatgctgttccctcagcctggaatgcatttttctcctggtttgcctagctcatgcctgttcaccctttggaactcagctgattggcctgcctcctcctcagaagcctccccaacctccctgataagaaggctaggtcttgtcctcaccattcccatgccagcatctagcgcttatggactgctcaccttgtgtcaagtactgttagaatgcttcatgcgtagctactttgtattaggggcttggtagatgttggctgaggtaagtgtcatcattgtcccaaagacactgtgtgaggaaactgaggcctcgacccattgagtaggtgacagagcaggagtttatcccagatgctggactgtgggtttacgctctgacccttctatacgccaccgttccctctgctccaagtccttgcagtctgtccttttccagcacttgtcatggaggtcatgacctcggtttgtgtggttatttgattaatgaatgtttgttccctcactgggcagcccttttgagccccaggatggcaggagtacctaggactctaggcaggtgcgcagcctggagttgaccgagagcatgtgggactgcccacttgcccacagctgcttcttgccttttgcatcacaggagggtgggctaggaccataaaagagccagcccaggcctccccctttctggagctcactgagtgcgtgcatggggtttggccgtcaccctcacttccatggttctgcatcagaaccagctgtgctgaggaaacatctgtgccttgttaaggtctgttccttctgcccactccctttgcccttttctctaccttacaacccctttgttgtccttcttcaaggaaaggggccccctttgtctctcagggcagagccagctgcccttctcctggtcctcttgatctgcacacactctgaggatgactgcccatggcaggtcatgatggtccgtctgccctggactgtggtttctgtggcagagcaatactttgtacagtcagggcccatggccctacggaaggctgagggagagcctgaggtcattgccttaagagaagctgcttcatggtgcagttggtatgtgtgcatgtgtgtgtggatgtgtgcttttttcatgcatgatgtttttatttgtgttatttatccccctgctatatctccctctctcaggggtctaacatggagctttgaatagtagatacatcatagctcttggctaaatacatattttctcccccgctgatctgaaggcacctcccttttcccctacccctcactttggtaccttggtgacttcacagggttgttatgacttcccagacctcattgagattgcagtgatgtgaaaaccctacctagattccagccagctgggcaggggccttggcagcaggggaagcccagttccctagggcaactcaccaggcctccagggctctctagggccaggctggctgagcttcaactgactcatactgtttttgactgggaaaaataaaaattttaaaatggcttctgaccaaatggggaaagtggatgtgggaggaggagaagggggacgttagccacaccctaggtacatttgccagcagcaaactgagatgggcttaaagtgtggctggcctctaagacgcctgcttcaaagggcattcggcacactggtctcaggctttggaggcccacctgcttcagaacatcagctccctgtctgtctagcgttgtgacttaagacaaacccaccaagctcccttagcctccattttctcatctgtaaaatgggattgtaatcattagaataacctttataaggttcttgtgagagtggaatgaagatgtgcttagcaccgtgactggcgtgtagaaagcaccaaatatttattatctgttaacattgtttttgtttgtcaaagtattattgttaataataattataagaagactttggaacagatataaagtctaaaatgcaggctgtgatgaaagggagatggtatataagaaaagtgctttttgaattgcacattatgtccagatattattattagcacaagtatgtttattattgttttgtctttgaaaaaaatgctggagcacaattttatgatgttgagtctatgtcctttgttgttttgttttttgttttggaaaaaggtttgtcacattggcctttattggaatcttgtccagtggatgtatgacccacattggtgaccctgggtgccaaatgcctggacagcacctggcaaagaagagccattatttcaatggtcactattgtttaaaatcgttatggtaaacaatacctgacagaagttcttagaggttcattgacagtaaattgtgggcaatgcactgagttattatttactctagacctgagaaattctccctctccaagttttgtgccttgtatagctaaataaatataaacaatttccttagaatttgatacaaacagctaccattgtcttcacaagtatgttagaaatactttcttaatagcaactacttgactgttttgttttttatctccattccctgccattactctgcctcttcccatctttctgaaataaaagtgagccaaattagccatttaaaaaatacgtagatactttcaggcagaggttgaaaactgtctaccccctggctgcatctggcttgcagatgtgttttgttcagcactcatagtgttttaagatgtttaaattagtggccaacatttaaaaatgggtagatttttgaatcaaaatccagatttccagctcttcataaaaaatcaaaggtctagtgggcctgggcccgtcttccttgtggcagtgcggaagagtggtggtccctcccctgggagcttgtttctccagcctgcctccggctggcccagcctcactgtacctttccatggcctgcttggcccctgtaggaatagagtttgtagtctctgcttaatataactaataccccttagatactgtgtatcagtttagaattatttccactagcaactgtgaccataggtaggaaggatattttacttgctaagttgtcattcttatgatagcccaaatggctataatagtattttaggctcttttggatttaatagaattaccttctctcctctctgtgggatttcctcattaacaatttttaaaaagtgttcagcaaggcttatatagcaacataaaattttaaataatgcaggatataaatttctatagctgctattgaaggggggttgcaatcaagtgaactgctttaattcaacaatttatggtgttgtaaatttgaaaaataaaagacacttagttttttttttttttttttttttttttcagaataaaataattaaatagttgacctttggcagagtctttgttgaaataggcaagggttttgagcttctcagaacttgagaccattgccttctggagtctttcctcagatgagtctgtgcctccttctagctagtgcactctgagcactgtggccacatctggagggtggagaggagacttagcttccaatggtggtcactctaggggaggggggcccttgcaaataccaaaatttttttaaattattattttatgagcttttaaaaacttttttgtttttgtcatcacaaaagtaataaacacttgtgataaattcagacaacactgaagtgctttaacataagcaacaaaatcttctgtgacctcccccaaccttttccaaccattccccaaacataagcacttttgagagtttgcttcttatactcctggacttttgcatttgcttgtttctctccacccctaccctttgccctcaaccacgacatagatactttcccttttgttttctaaagatagactgtccctgtgcatggtgttctgcaactttctttttacagctgtcaattattatggttatttttccaagtccatatgtacagataaatgtacttgttacttttaaaagttgtactccatgttatggttgtatgttaagtaaatttcgttttgtattgatagacactcaggttgtttctgaccttttgccattgcagtcattgctgctgtggaaatttttgtgcacacgtgtgaacttttgcctgagattttctttggtatagatacatagaagtaggacttttggtttaaatggtttgctgtttaaaatttgaatccataatgccaaattaccctccaaaaaggctgtaccaattcatgctcttcctaggagcatcccattatggctttgctaatctagtttttgcttacacatgtgtaagaaagtaaatcttaaaagcctcacaaataatgccatcaaaattacacgtttatcttagaaaagcattcagaatatatgtctgtagatttaattatatgatttttatatcttgactttgatggtggttatcatcctgcaaggtgacaaaaagttccctaaatactgtacacaattattaaataattattaaggatatcagttgtgccaggtagcctttggaagaattacagccaaatcacagcttccttttccacagctctgccaggctggcttgtctttcccaccaagggctgagccattaatactgaggctgggtcagcatttgaaggggccctgccagggagtgccaggccttgggccccagagacctggggagtgggagatggcaagtgactgctgtgaggctgagacaaagtttttgcctacaacaccccatggctgtttcctttactgagctagatgaggaaagcaaagggaagtgatggtccaagacttctggtggtcacttttgttcatagatttctcacaggagtgctaacatttaggctcatgtttacgaaggtttgaaaccttagcatttgggaaggatctgcaaattctcagccaggggccttaactgatcacaggtagttgtgaactcttggtccaggctgtatctcaaggcttcttcttagaaggacaggtcagcttaccacctgctaactgcatgtgaaattttgaattctgccttctctagctctcctctctggctctgagctggtatctggcatttgcaaacagtttaccctttgttgacttcttagcactaacctcacttttatgagtctgagtagacttgatacccaggccatttatcctttgagggtgccctcagcttcatcagacccatgctgggcagtctggcatagtggtaagaggcacttggagccagacagacctgggttcaaatcctgacatcatcacatttactaacagtgtgaccctttggctgatgacctcacctctttgagcatcagtgtctccttctacaaagtagggacagtaattctttcccaggggtattttgaaggatatacgaattaatatttgtcaggtgcctctcagatgttcagcacaaaataaacagtgtataaatatgagtcctctcttatcttcctgctgtagagagaaagttcgttggggatgctccaagttggtggctactggctgaggatcctggagtaagaggaaggctaccatgtaaacccagagatgaatcatgaacaatgtgtattctcaggagcttagtatttgatatgggagcctaacaagcaaatagtgtgtccagtaataggaactgattaatagaggaaagattaattaaccttctaggtgggtggggtggaaaagtaggtggggtattgaaggttcaacaggagttcgacagagaagatagaccataaataataaatatacggctgtatccactagagataaagttacattgttttttatgtacatgttgacttcttttggccttgccaatgcactgatatattcaaattcagctcctctctttttctcttcccttttcccttcactctgcctttcctccagccctgccttgaaatactcagccactgaaaatttcttaaagaatttctttatactttagtaagtcctcagaggataccagttcaccctactgagattttacaagaactttggtgtagctggggttttttttgcattcctttttctacggtagatataagttcttttgggttgcccatcaatgaacaaactaccaaccatttgatgtttactgcgtgactcctgtataccaagcacatgtgccatttcacttagtccccagaatgtcagagcagctttgtgaaatgggctgcccgttctttcttatggatgaagaaactgaggcttaggtaggttaatatactgaatattatacatgtagtgagtgggaaagccacagttcacctccagggtctttttctccctctttgctgccttgcttggggtcctgctcatagtaggtggacagcagatgtttgtctgaacatatgagaacactgcctgccacgtgccggtcagtttgatttgtgctgctggttttgtaacccacatggggcaatgacagctgctcaggtactttcctacctattagtggggccccagggtcacacatcagtcataattgacaaaaaacacaatttccctttcctctcaacttttatttctaaggtacttgtaagcaggtagattagattgttaacttttcattttttgctttgtctctctcctttaaagactatgtgaaagaatacacagtgccctgagagcctggcctgggaatcagaaacttagattccagcttcggttctgctggtaactcctcagtcattatgggtaaataatattccctctccagaactactagattgtgtccttggtgcagtctggggttcgggtggtcctagggaccctgcctactgcatgaacctgttatcaccatgtgaggctggaaggatctcagcgttggtgttgggcaggcctgagtgagcatcctggctcctgtacttcccagctctgtgacctcgggctaatcacctgactccctgatgcttgttcttgtctacgaaggagggctaagaggacctgcttcccaggatcactgtccagattgaatgagaaggaacgtcggcttccttccttctgtctccaactcctgagtgcactggttttagactaactgggtgtttctgcagttgaaaccaaaacaccttcattaggtacaatgttcattatacctcgcaacaccctgagatactcaactcttagatttcttgaagctcttttttgttaagaaactcctcaaaggaagatactcttctaccccattgagctttattagtgcttcaatgacagcaccttattttttcacttttttcccccttgcagacagaagctgcagtgtgaatcagtttgcatttatataatttcttttgcatttctttgcaaagaggaaaactccattcatttagcaaatgtccgtcatgcccaggccttatgttaggtgaagggatttggagagaaatagagtcactgacctcaagaagcttacagggaggaaaggtgtaaatacataaagtgacacatgggtttgtcctgtcaccaaggtatgcagtagatgctgtgggagaagagaggatgacacaggttctctcttggaagacctcatagagaagaggtgacttgtgagcaagtctttttttttttttttttttttttttttttgagagagggtcttgctctgtcacccaggctggagtgcagtggcatgatcctagctcactgcaactttgaaatcttgggcttcaagggatcttcctgcttcagcctcccaagtagctggaactacaggtatgtgccacttgcctgtctgatttttttttttttaattttttgtagagacagcgtctagccatgttgcccaggctgatcttgaactcctggcctccagtgatcctcccaccttggcctcctaaagtgctgggattatagacatgagccactgcacccagccgttgtgagcaagtcttaaaagatgagtaggaaggagtctgtcagctgtagaagtaggaagggcccaggcagaaggagcacagggcagaggctagagccctggtaggaggtgacacactgggtgcatgtctggagctggagccaagaggtggaggacctaagtggctacatcttggcagtcacccatatattggcaagccccaaatctttgtaaccagcccagattgtcttcctgagcccccaactcccatacccactgcccattcagcagctagctgcatgttgaagtgtagtggtcttcccagacctaacataactaaacagaagtcttgatttgttccttcaaaaacaaacaaaaaactagccttgctcctcctcagtcttccccatgttatgaggtccccatcatttttacctggctacccaggcctaaaatgtgggcatcatctttgattctgcttcctcctgtgttcttcacatcatctgtttgcaattctttttttgtttgttttactggttttaaaaattatttatttattgagactgagtcttgctttgtcatccaggctggagtgcaatggtatcatcttggctcactgcaacctccgcctcccgggtttgagaaattctcgtgcctcagcctcccgagtagctgggattacagtcgtgcgctaccactcctggctaatttttgtattttcagtagagatggggtatcaccatgttggccaggctggtctcaaactcctgacctcaagtgatccacccgccttggcctcccaaagtgctgggattataggcatgagccactgcacctggccaatttatttatttttaattaacacataataattgtacatatttatggggtacatagtgatgtttcaatacatataatctgtagtaaccagatcagaataattaacatatctgtcatttcaaacattgcagttcttgacaactcttactgtatgtcctggaagccaccactgctccttattattagtttgtttctttatcaaccaagcaggccagaccactgctctaccctcgttcaaacctccactgtctttcagcaggtctcttgtcagtttgctacataggcaaagaggtcttttaaaaagcaaatttgtgtcatttccctgctctaaactctccagcggctttctggcatctttggaatggaatctaaacatctcgccttggcctgccagcccctcctgctcatcttctctggtctcatcccttggcactctctgctcactccatttcagctgccgcatcttttcttactgttccccctgttgtctcatgggctttgcacttgctgtcctccgcctgagctgctcttccccagacaccgcctgtctcaccttcactccacgctggcctctattcaagtgttctcccacctgtctgaaaaagcaccgttctgccccctctccccgctgcttcaaccattctgtcctacctcgctttggtttctctcattagcactcatcactctctgactttatatgatatgtttgtttgtcttcttatttagtgtttgtcttaccccacaagaatataaatccatgaagatgggacctggtcttatctattgcattcagcactctagggcctaaaacagagcctggcacacagtgggtgatcctgaaacacgaggtgggtggatggacaaatgactgagttaatgcatgcctgcatgcaagcgaagactttggagtttatttcataggcagtgcaaatctagtagacatctttcaggaggtgagtgacgtggtcagcacttttattttagaaagccagctggtggcagtgtgggggctggactgtaggagggaggcagcagaattactttagcggctgtgaaaatcgtccaggaaattgatgctgagtgttgtgctagagctgtggggatggagaagaggggacagatgacaggacctgaagatctttgagtgtctttgatttctattgggataacttggtatagtgattcctttataagaaaagcaggaggggacgaactggtccagggagagactgttgacactctgtggtgtttttctcaccaagaaaacctaagccctgggatgcatgttctctgtagtggcattggctctctggggagtgactctgctgctccgcagcctcccctgttccattttttaataagagaatagtcaagatggtggtgtcagtgagtgggagtcttcttcatgcagatggatccattgatctttgcatactccaagccacactaagtcattggttcttttctcgcagtgggtacatttcaccttatttgattctgatctgacaaatgctgctttttttcttttctttttttttctttttttttgtttaaagaatacctagactgtgctcaagttccaggtggggtttacagataactggggttccagcatctcccttcttacaaacacgaacaggagcctttgccgtccttgggtctcagggaggcagaccggcagcaggcacacattcctggcccaggcgtagccatgctgtctggtgctgccttttgagaccttttgtgtgtgtgtgtgtgtgtgtgtgtgtgtgtgtgtgtgggcttgaatgattccttctttcaaaaattcaaccctctccaaattttgatgaaaaccttttcatctctgagtaagcacattatttcccatcttgatgaggtgtgtcccctctgtgtccctgagagtatgtcatcccagccttttaaattttattgtatttttttattttttattttttcatactagtcaagtgcagtagtgagaagcggggaaagagtagaacaaggggccgggggcggtggctcacatctgtaatcccagcactgtgggaggctgaggtgggtggatcatgaggtcaggagattgataccatcctggccaacatgatgaaaccctgtgtctactaaaaatacaaaaattagctgggtgtggtggcacacgcctgtagtcccagctactcgggaggctgaggcaggagaattgtttgaacccgggaggcagaggttgcagttgagccgatatcatgccaccgcactccagcctggcaacagagcaagactctgtctaaaaaaaaaaaaaagagtagaacaaggagtttgatctgttacagactgaactatcaatggagataactcactaccttcggaccagcctcatcccagtcttttaagcctggtccagaattcctaatcctgcttgtcaggcccttcaaagtgaaatgctgtaccatctgtatagctggattctcacctcctacctctcctctcccttccaaaggttccgatgtcataggaatctacgctagagggcttcctgtgtgccgggcactgtggtaagcacttcacatgcattctctctaatccttaccacttcggggatgtaaggattataatcttctttttacagatgaggaagctgaagcttgccactgcttagtagttaagagtatgggcttacagccaaacagaccctggattgattctcaactagctggggaccttgggcatgctacttaatttttttaacctttttcacatttagaagataaagataatatatagagagataatatagaagattatataggtattatatatatatatatcttctatattatgaagataatacagagttgtgataaaaattaaatgaaatgaccagacatagtggctcactgttgttttgttttgttttgtttttttgagacagagtctcgctctgtcgcccaggctggagtgcagtggtgcgatctcggctcactgcaagctctgcttcccgggttcacgccagtctcctgcctcagcctcccgagtagctgggactacaggcgcccgccaccacgcccggctaattttgttgtatttttagtagagacggggtttcaccgtgttagccaggatggtctcgatctcctgacctcgtgatccacccccctcagcctcccaaagtgctgggattacaggtgtgagccactgcgcccagcccatagcggttcactcatgtaatcccagcactttgagaggctgaggtgggaggtcacttgaggccaggaattcaaggccagcctgggcaacatagcaagaccacttctcttttatgaaaaaaaaaaattaagaaaaataaaaattaaatgaaataacatgtaatttcctaagtacattaagtacgtgcctactatgcgccggacattgtgctgtcagcaaataatagctcatcgcagatgctgttatcatcatcatcatcccaaagccacagattgagtctgtaggtgaggccctgcctggctccaaagattgtgtttttttctcctgttgctcccaagttcacctgtcccaaactttctagcccctaagtttgcttccttgcgcttttctggttgtgccatttgtccctgtctgggcagtgggctcaagctaaggcacagcagttttccagtccctttgagctactgacctcttttctgtcattgactgaacagtttccggtggctgaatcgtctgtgtaagagcttggacaattttttctgattgttaccatcatcgtgtttactgtgaaagggcttcctgtatagttgtttgtgttagcagcattgtctaaatgaaacaagagtggcaacagaaagggttggtgagcagtcctagtcttttggggtcacagatcactttgtgagtctgaagaaatttatagactctctcaaaaaaataaacgacaagacaaatacaagcccagcatttttcatgagacgttttccctgaagttgatctggaaggctatgtgctcttttgtcattgtgctactccacattcacagccatgaagggtgtcatgtttctgcagggtgtttgtatttaagggttgttgggcaatttggcaacactatacctgtttcattgatactatgtgctatttgcatttatttcccatatctgagatacgtattcacacatgagaactggcctggccattttgatgagatgtacctgctgatttgcacataaacacaagccatggcctgcatctagaggatcgactggagaggcttttttttggcccaaaacatcagactagtaggaattttattatgagttatagactaaaaggggggataaacttagcttcagcagggtttaatattctcaattcaggtaagtgtaaatctctacttttcattttaaacatttttgaaatttcagtctttaaaaaaatgcttgttttttttccttccaagttttaaggtatgggtttgggagaaggcagattccaaacactttaactcttcgacctcagacttgcttatgagcctctctttggaacatttccagtgaaccgtggagcaagcctgccacatccagcagccgtaggcatgatgatcactggtgccgatggcccctccactccctgcctggcttttgaggccccgcagaaagaaaggaacagaatcctttcataaggaaggccccagaatcctttctcctgctgtagctatgctgccagtgtcctctgtagatggaaatggaacttggattttgggtgccagaactgaattcatcacagataagattagttgatataaagctgtttctgatgagcagtttttcctccagagttttcatttttgctttttctaaattatacaaaataatagacactcattacaaagggaggatcataatgctccatacctggttttgaattccacttctatcacttattagatgcagccctgggcaaaacacacgccctctctgagccttgatttttctcattgaatgggagatctaattattttacctcataatactgctgtagggattgaaggagattggtataaataatggttttctgagagtctggtgtgtatttgctttttttcagttaatatgaattgagtacctactaagagctggtcactgttctagttgatatggaaccagtcaagagcaagacagagagggtctccgctctcatggtgctcacattctaatcagaggaggcacaagaacacaagatcacttcagttattaagaaattagaacccaggggtagcatgagagtcacaggaaggacccctttacgtcggatggccagcagaaccctccctgaagagctcaatgctttgtgacccccccggtcccaagttttccaggactcctacttttaaaaacactgcccctccaagtatataggtctcaattttgagtttggaaaatctgaccacatattagttctcttgttcattaatgggcttcccatttagagagtgagttcctggggcaggagccatgtcacaggaccttttgaaggtctcagggccaatatggacgacacttctcttgaacactcacccagttgggctgacatgaaaacctcatggtgggaggtggggggtgattagtttccagccagagcccattttgctccattgctgctttgaacattctggtttctaaggagctggaagtagtttctctcagcgagaatgtggcacactgtcatctcctgattctctgcatgcagttcttcaatggcttgttgaggctgcgtggaagcccagaggtcggggcagttccaactcacacactggcatttgaacggcagagcagtaagccctacacctgacataactgcattgccttcttggggtacggtacggatttttaaatgaccatttcagcctgctgggctgggcaacggtgatccaaactgatgagtcaggaagccactgaacagaaaggcaggctgcatctgactcacctgtcatgtcgatagttgacctccttttgtttgaccttgatttgctcagtgcaattaaagatgctgttgtgagtgcacttctgctacctgatttaaataaagtctaacatgtgacagctcagggtcttaaatgcacacacgacttaggcagacggacagatgggtgagtggttagcctttcacttacctctgaattgtaattctatcacaaggaaagggcttaatttcaggaacacggagtaattatttgagactagatacaatgccaaagcagcaggccttgattccttgctacagggcagcttaatcaggaaatggcctagatggccgcctttcaagtaggtccttgcagtagcttggcaacaggcacagggtcataattggaagaatttggctgtgagtgtctgtgggtgtttacagtgcactatagggcagggcttctcttatttatagaatattttgagcaacaagcagcagaaggctgaaaagccactaaaatctcgatttatttttaacaaattccatttttctcctcatcccagaaggagaactgagttattaaaaaacagttaaaaaatacatcattgcagagcatgccatatctaattatggggttgccagcatcggcctgcagccacatttcaagggcttcgtaaatcaaccatccattcaatctgtgaacttatatgactcctgttctccatttagatgtagagcgaaattattggcaagtgggtgctgatcagaaaaagttcttccctgtctaaattaggagatgggagggataaatatagaatagtatacttatgttctcaaaaggagataaaatcattcttcattgtccattatacttagctgcacaaacatccatcccattgcactaaatagccactttagagttttcacacattgcaatggcagttctgtgccactcaaaggcgcagtattgtgatatctcgctgagcctaaacctgagtgattattgctcacgtagtcatgaagagacataaacccagtgcttttttgcctgtgttgtcgtagtgtactagagctacaaggtgggccttcagagagacactagttttaagtatatctcattgtaggtggggaagcagaggcctaggcaagggagtgacttgcctagggtcccattaagagtcatggcagaggtgggctggggcggcagtctctgtgcttctcttgacagtgccctgctgtgctcactggagctactgtattaaacagatacccttcaggggttcacagtcttagaagacacaggcacgaagatggccaaacaatcagcccatgcataagcagaccaagatatgtgtatataacagattagttgagtggtagagaaaatgagagtggggaattttggaatctatttggatagcaaagcaaaggtaacatcagttgctctctgacccacttgggaaaagcttatagagatgctatgaagttttctaatggaaaaaggtgcagtacatttgccatgtgttagtgggaaggtaagtatgatgcagtggtgggtggtaggaggcagtgaagataagtattgcaactttggaggagccctgggaatggattgttgaggtgatttcataggaatacgaaagggagcataggaccagggcacaggccagagacaggcaatcccaagttccctggagtaccctgcccttttctgggaaagcaagtgggtggcatgagtgctatgttcccaatgctctggccccacccctggtagaagaataataactgatcatggtgggttttttctgagcctctgtatctttgagtagcattctggtagccaatatcagtggactggtgccagcctgtgtggtgaacctctatctctttcttgccctgggctgcatgtcaggcacagtgcctaagccggagtgggctttggggagttacttctctttctgaggctggaaggggcagagggacgtagggaaaactttgctagggagggcaaactgtgaaagcctctggagaagtcacctgttgggataccaaaggccagcggttttagaggatgcgaagaggccgggcggggttggtctgggcctaaactaaggctgtagcggctagcatggagaggaacaagcgacggggagtgattacggatgaggaagacgtactaggatttggctacagacagacaaccaaccagagagtaaaagacagtgacatgctaggatgtgaaccacctactacagagaaggtcagaggtggggagggaggaatcagggctgtgggcagatccagcagctgggatccaaagctgaagcccttgggttattgaatccattctttctgagaagagatggttgatcttcctgcccagggagttcctagccagactggacagtggttctcaaacatggtgccaggtgttgtcagatagcaaacaattagtttgtacacagaatgtccccaaggtcacctacacatatttgtttttcctaatctttgatacctacagccacttacctgctttcgagttctcagagttgagaacatataaatttgcagtaacaagtgcacaggaaatacttggaaaatggctgatgagctttagtttggaaatttcatttttttcttggatctggattataatttcagtacaagctagcaatttttcttgttggtaaaatagtttctagttttaaaattatttctgtagttaataaagttaacactatttcatgatggaggctgccccagctctgaaccaattttcaaaaggcagattctcctctttctctctcttatttcttgctcttgaacatttcactgtgttctagcaacttttcctgtgtgtgactcggccaggagactgacttgagtaagatccaggtcaaggggttgtgtgggtgggtcggtggtaaggaggtgctgaagaacactaaaacctttgcctgagaggagtctgggaagtagcctgcgaactggaatgaccccaggcttcctgtcacggtcatagcccatggagttggcagacttgatcactctatattgtgtgcccccaggtaatggcattagtcatcgatactgtcttttttttttttttttctttgagagagagagtctcagtctgtcgcccaggctggagtgcagtggcgtgatctcagctcattgcagcctctgcctgctgggttcaagtgattctcctgcctcagtctcccaagtagctgggattacaggtacatgccaccacacccagctaatttttggatttttagtagagacggggttttgccatgttggccaggctggtctcgaactcctgacctcgggtgatctgctcacctcggcctcccaaagtgctgggattacaggcgtgatccactgcgcccggccaatactgtctttaaatcgtccagagtaagaaaatgttgatagcttgttgtcacagccctgtcattttacacattccctgaattattgtctggcaccagcaggtgttccagaaacacttttggttctttgagccattactggtcattcctgtcaccactgccaccaccagatgtggttctgagagcattaagtaaaagttttgaaggttgtgtatgttaagactggtgcaaagtccatcctccttccttcgggctgatcagccacaccctggctatcagcacttatttactcattttcaaagtgacagaatggtccagtgggcaggggcataaggggtcacttcctctaaccacccgccagtgcaggaggatcccatctgcgcagtggctgcccatgacaggcagttccctagccccagtcggacatctccgcaccaggcatcctgctcctgctttatggacatctttggctcttaaaaatcctcctttattctgaccgcagatctgccttttggcagtgtttccttagtgacctagttctgctttttgtggcaacacagaacaaaggtcggtaggcatggcacaattccagcttagaagtttgaaggtagtgctcatggacccacatcctttccctctccacccactctatctccctccacaaggtttatgttctccagtgccttcagccattctttctatggcatggcagtcagtattaatcccagtaaaggtaacatgtatccagagagtgcttgccatgggccaggcactgttctaagctccgtacgtgaattgtcttatttatgactcaaaatcaccatatgaggtgagccctgtcatcatcctcattttaccaatgaggcaactaaggaacgagggctcacatcttgtcccgagccatgcagtcaagcagcagagcagagatttggggctaggcagtgtgactccagagcccgtgctcttagttgtggtgcaagactatcttacagcctttcctgcatagtgccaaaaataagcccatggtgcactagacttgggctggccctgctttaacttattttgcaagaaatcattagacaggagccttagttgaaccattttctgtgaaaccttcagagtttgttttgacagaacagactgcagggcagaggcatctgcactgtccccaacaaatgggttcatcctgtagctctgccaggccccacagggttcataaaatggtagctttagatcaaggtgacaaatacagggctcttgatgttttttttttttttcctgaacatggtgcctgagcaataggtttcttgtttaaagtgcttagtcatggttttatggccagaaagtagaaggagagaggtacctaagaattgcaaaactgggtcatctcttcaagtgcctaatccaatattcagtctcagagaacaactccagcagttacgggggtggaaggatgtgatgaccacctaccatccaaaactgggatgtaggtgccaaatacacattctcctgaaatgatccctggtgcctctagccaggctcttccaggagtctagagaaagatggcccatgacttcatccagagtctttgcttcctgtgctctgggatgcctgggcttttctggccacagccatacactgacagggccagaagggctgagatgctgggattgaaccatctttctctttgtgagttgctttccagatagcacgcattccggtcactattttccagagatttaagcagcaaagtgagggaccctcgggcatcgactcagagacctggaggggagcagcttgaagcaatgtaaaaagcactggataaaatctggttctaccaaaaatagggctatgagagttacctcacctccctgaaaggtaatatctttatctgaaaaatggggatgataatactactaacctggaagattgacaggaggattagatgagattctgcatggacataacagtccttggcatgatgtctagcagtgaagaaacataaatatgagaataataacttccttcttcctccgctgtctattccttctcttattctagtcctgtctgctgttgggttttgtctgttgttttgggtaaatagctaacctctctgcctctttttgtctgtagaaatgctactggttctgaatgggtacttcgcgccccctataggacatcgtgggaatgtgtgtgggtgatctggatgtcacagtgacccagacgaggcttttactgggggaagaggggaaggcaggggtgctagatataatgcttggggaacaaaagattgcccaacatctgcatagctgcctaatgctcagtgcattcttgtgggcaaaaccctgcttaaaattatctgggcctagagtctgactccaattaacacataaacacaaataatttttgcatgtttttaatatatactgaattttctgcgaacacagctaccaagtatataagatttacctatttgttatgaataggtgcaagcatttcatatatctttcatgatgttttctggtgtagcggtgccccaatacttacatattgatttacatgttgtcttatttttaactatatttcctttcttctttgtattacagttagggcattatattgattatttttggaattataagtgttgtaaggttatattacttacagatttcaagagagctaaagacatatttaaaatatttttattgcatttttgacaatatgaaagagcaagagagagagagtgtgtgtgcgtgcatgcatgcacatgcttacaaattagctagaaaaatcctaagacagactttaaatgaaaagaaatggtttcatagctcctagaaatgtccttttacataaggatatgtagtagaagtccaaatttttaactgcattcattgtcagagaaatgaggtgttttgatgtttcccctgtcccttttagaaagtatatgatcctaaaagagcctgaaacagtttccattgtcatattttttcatttttgcaatctctatttttttcactcctcccacctgtgcatatatatatttaaaagcgtccccatatagacttttaaagaaagaaaagccagccaggctccccactctttactaagtttgttttgattgttttgtggcctctgcctgcacctcggcctgagtcagactgactctgggagctgtgggcaggtccaagggaaagtcaaggaggtaatgaggcttctcgtgggggcaacttgtaggccaagttgggtgggttgaagtcagtctaccagaagcttcctgcctcaagcctgggcctctacctgtcctgaaacctgagggctctccagttggaccacgagggtctgacatccaggaggatccccaggagagagcaaccgtcactagggaatatgctgcccagcactgactgtactgagcagcagtgttgtgtgcctgttgggttgatgccatggatagccaggcgttcagaactgaacacgacacctaaaaggcaaacacgaactgtgaatgtgccagtgtcagatgctgccttggtggtcatgtgtgggctggcagtaagcttttggtcccttaacactcgctgttggaaatttcccaaggctttcatctagggtagctggtgtgtgatttccctgtcctttgttactcctatctggaaactagttgaaatcttttctatgatattgatatagttacagaaaatctgaatacttactactaagttttatagttctgcttagttcaaagtaacacaacctcataagagaaagtttgaaacaggtagagaaattgaaagatgaaaatcactacccattatctcagcccacaaagatagctactatcagcattttggtttgtttcctttcagtcctttctgtgtttatgaaattttattatataaataattcatgtccaatatagaaaaagatggaaaattgagaaattataacgttaaaacaaaactgacccatctcaccagttggagatgtcttaatattctggtgaatttttttttgtcttttttctatagacacataagaagactgggaaatattgtgtatatacgtttgtaccctttttcaccaatgtatatcaatgtatatcagttcactaatgaatactaattaaatgaaaatttattaaatgtatatctatttatatctattgatatattaacagatgccagtgcatatctattaaaagagtactatgtaagagatgatgttcttaaacataaaatttaatttaggcatgaaattactttgtcaaaagatatatcagtttatattcagatatacagtgtactgacctgcccatttaccacatcttcactaatactggtattatctttaaatagaatctttgctaatatgagcagtgaaagtggcatattatctattaaattttgacggttatgagattgagcatgtttttgtatacttactggtctttgtgtttcatcttttggggtttcctattcatagtctctgcttagttttccactgaggtatttgcctttttattgatttataagagattttgttttgttttaactcagaaaaggtagtattgcttcagttgtcacagagctttggagtcagacagagctgggtttgaaccctggctttcctacttgtgagctgagggatttcaggcaatttatctgacccctctcacaattaattagttcttctttgagaactaaacgaaacaacactgactagcatgaaaaaaaagcctggtgtgtggtttctgccaatagtttttgtgttgttatttttgttgtgattcctgcactgagtattttctcagaaaaatgaccttgagctgtacgactcatgcctgttcagacccacagacacatgatactcactatatccaaagctcagaaaaatgaaactgaaatcactgaagtttgtgggttttttttttaaattcttcttgccagaaggagacaaatgaaggaaaaaaaacaagccgatttcattttcattaagaggaatttgtagagttatttctggggtcaggcaggatacattcagacgaacattttagatctagggctgggaagatcccgagactcgttatagattacatcatcttcctccaagtgcacttgccaggcaaatggacaagtgcattttagaaaggttttcagttgttcacgtttaaacagaaaggatcacctggctaacttttagttaacccattgaacagatgtgccattcccccagcccattggttattcatgtccttgttactggtttttgatatccttgccccgtaggtgggaggagggatgggtatgagcctgccctgccctctttctcctacttgggacagagctgttgcttttatttgctgagtcactgaagcaatagagcatgtgcagagtcccagcctggaggtgggcatatctgggttccagtccctgctctagcccttctcagctgtgtgatcttggacaagttgccatacctctctgagcctcagtgtcatcttctatgtgatgtcgatgcctcccccaaaaggtcgttacgaggaccaaaggagacacgtcagggcaggaaccatcctaggcacgtgtttgatgctcagtaaacgggacgtggtcagtgttcagagttgtgggggtggcaggtgactgctctgtttcacctccactcacagcaacagggcctgtggtgtcacctagacatctcataggcatcccacactgaacatgtcccaaaccagcagctcctccctggatgggtggatggtgtacagggacctcttcctccagctgtcacatggggcatgtacctggcaagtggctttgcagccctagctgcccccttggctgggggcctttgtgcagttcatggactgggagtcacccccatgtctagaccgtcaggaaacccattggcttttcctttagagcataccaagaatcaacttctcagaacatagcaagagttgactttttgtcaccctgccgtggccactcagactgactcctcttacacctcacatcccattgatcagcacagcccctggaaatatgtctagaatccagctgcttctcatcacccccacacctaatacagagggctgagtcatagcatctcttccccggactgttgtagccgtctcctaactcagcttcctgccctgcttttacacacacacacacacacacacacacatggtatcttctcaccactgcagccagacttaaaacctaagagggatcatgtcactccccattttactcagagtcaaggccaagatccttactggggtctgcaggcccccacacctggccctctgactgcacccctaccttccttagctgtctcctctccctagcatgccccaggtcgctggtcccctagcactgggcagctccctgcggccctgttcactagctgtcctctgcctggaacacatctgtcacctctcacctcctcctgtccagcctccttggggcctttctaactgcctccctcctgtggtctgcctcctccccatctctgactttcctcccgagcacttactgccatccagcacccgacataacttacttgtttcgtttgcttgccttcctcaccaggaggtgtgccagatgaggacaaggatttttatatccctacccccatctgcagcactgccatggagaacagtgcctggcacttggatgccctcagtaaatatttgttgagagactaataagtgatcgtgggccagcatgccaacagtgtcttcgttattacaaaattgtcccgaattgaaatttggctactacaagcagtttgtggtggaaatttactcaaattaccaattctttcactgaagaaattacctggcatatgtgggttctcaataaactgtgttggattgcctcaaggctttggggcagtggtagccgtctgaggcctccttgccagtcaaccaaaccctgtgctgggtgggacataagagatgcccccagcatccttagctgatgctactatgtcaccccagaatccctggggcagcccacccctcagcagcagctgtcaccctgctgggttccgcttttcctcctgtgggcttcgtctccctaaggaaatcattgtccttgctttctacatcttatctccctgagcagctccaaaattctgttattcatatcccactgacctttctcattgtcctagtccaagcttctcacaggaggagttgtctctctgttttatattaaaacaaagcggttggactcttaaaactctattcacttttcagattctttggagtcctcaatgcttcctgctatgaaatgctgcgctctggaatgccttccagacccacccccaggatacctgtagccttccctgcagccactctcctcaactccctcctcgttcccaggggtcaatgtcctggatctctccagctttaagttccttcatgtcctcttgccacccctgctctcaccatctctgagttcttgtatccccaggatttcaacctgagtttgcatctcctgacatcacttttcccagccttctcccttttcaaccagcacaaggccatccacttccatggccatagtggacgccactgagcatgctaggtgttttcttctattcaactcatgtggtctgcacaacaacccagtgcggggaatccacccctttcacagatgaggcatctctagctcctggaagtcacctaacttgcctaggacatgcagctagtaagtggcagggctgggattggaacccaagaggccccgccctgaccaccatcctgccctgcctctcctcgggcacccagaatcccctcactctattgtcaaaacccaccttgtcctgcctgtctggtacctaggggagaaccctcagcctcttcttctgctgccacttgcttcctcttctgccaggaaggtcccacgcctggccagcctgctctggagacacgcccactgcctggccttgccaggaggctctgatgctctgcaggcttcctgtcccacggatcccttcctgcctgtcctggggtcccaccaccccactttgtagttggccttgctctttattgtggtgaaaggtgcaggccattccatccaagatcctataatattccttttctctgctgttgaatgttcttcccattccccccacattctcaaagaaggcatgtggctttcttcactgcgtctcggcctgccctgagtccagcccctgctgcctggcccagcctgtcttgttggcatcccctaagccctagccagaaacacaagcacctttcaggtgctccatcctaactccaccctccctcacactggcctctctccctttgccaccagataacagcagtgcattcttttgtttcctttagaacaagatgcagatgttttccagaattttcttcaacttcaggcagtaagttttttggtgaaaggagtattactccctgagtctgtagaaccaggctctctcctcttattctgtagcaattaaagacaaagacaggcaagaaaacaatgaaaagaaacaggagccaggctgatgcaccttcatttagctggtccttgagcatgactcattgatccttcttgcttccatcagggattgcaccctgtgccctctttgaatgcaggggcatgtcaaggccaagggtcaggaagagagctttggcctcgccagcctggtccccagagtggaagtggcagggcaggaggggtgtggcagacagagcacatatcgcccccagccttgcccccagatgttgagtgctgggtgccggagtgcagaggggaacaaggcctggaccctgcctggggagaggcagcacctgggagatctttgtggcttcagatcccatgtggtcctccaggtaaagcagagcatctctggggtctaggctgggggaaaactcttgcaaaaaattcctggttctgggacagaatgcatggggtctgcgtgaggggcagaggacagtgccaggccagtgagcacgcactgggcaaaggaagtggccagagaccactcataagaaaaagtgggacatgaacctcagagcctgggctgctttcagaggagccaagagcctgggaaataagcatcttctggtgaggaaatcagcagggggaggggagggtcatacaggaggggacttttaatcctgaatggccttgcagggcatggttcccctagtgtgccccatggaacccttggctgttagatgtgaggtgataaatggtgtgtggatgcatacacttgggactcagactctgctgcccttagactttcaccctccacagggctgcgtttaaaggtccaagaagccctgcagaagaaaaacctaactattgaaccagcattccctatacgtatttggcccctgattttttcccccgaataacatcattacaatcctatgggattagtgttccatggcagaactttgggaagtgttttttgaagaatttgtaaatccctgcaccctctggactgtgcccatttcttagattgcatggaggctgtgctgtacagtggaaggagtatgggctttagatgggactggcctgtgtttaaatctgctttcccattatacaaaatctctgatcttgatcaagttacttactctctcaaacttagtttccttatctgtaagacaggggatgaaacattagctagttgtcttatgaggctgttgtgatggttaatgggaagataataatgacacttacagagggcttgttatgctccagacaccattctgagcactttatatatctcacttacttttcaccacaactgtgaggcaggtaatgttatccttatcctacaggtcaggtcaggagaccaatgacacatacaggctaaatgttgtgcccaacatcacacggctggtaaatgtgggacctaagatttgaaccctaggcactcatacatgatggggtcaggatttgaaacttgaccgtcatctcccatcagagaacatgctctgaatcagtatgttctaaagggtctagagcagtaaaagcactaattggtatcagttcccttttcagatggttcgtggatatgttagggggattgatggttcctgggactccaagtcattctgcagtcattaaaatcagccctgttgaaagagtaatctcctcgatctgcttgcccactcagatgctcccattgtgaccattttgtttgctctgctgcctcatcctgggccacttcaatttgggtggctgctcagcgttcaggtggagtcgggccactttccacagccatctcatctgtggcctgtgcctccacttccaggaccaagagtccccccaggatgcccagtgagttggtagcttgttctctttctacacctcagtgatggacttgacaaagggttaagaagacatcccttttatcattcagcaaactgagtgcctttactgagctagatgcatgccctgggggaactagcactgtttggtgacttagttagacctctgaatccctctaccaaccctcagtagctgtctgggagactgggattctgtggactctcctctatcaacgatattgggggtcttttccacaaagaccagcctggttttgattgacaaagtgcctcagatttacaaatcttaccccttgcaggatcctctcaactgatcaagccccatagctccaaatgccgtctccttgattgatgtttaatttggggatccacaagcatctagagctaccagttgaatttgggtacccaagggccacaaatgggcccccctcacaccctgacccctgacaaccagcacctttgagactgaagtaccactgcatatagtgctgtcctctgctcagggcattctccctaccagccaggccacccggcaaacccctgcaacacctcataagacctcttcgctggtctcatctccttttattaacacctcctcagcacccctccacacacacccaagcccacaagcaaatcattttttcatctgttttgctcttgtaccttacctatgctccactaatacaaaaaaagcacgccttcctcaagacacttgactgccacctgctggagagttgtcatcatggctcaacaaatatctgccacttctaaacccccaggcacctctggagtagggcagtgcattgcttgtacagctgtaaacatggcctgcctgttgaattggtcatgctgtcatgtacttattaaaacactcgtctttctaactggactgaggacatcttgaacgtaaggactgccgatttctgtcttcgtccccattgtggcttctgctaggggctagagaaatgcttattgaatgatccttgtgcaaacacctgttaccttaggttcagggcatctgctgtcattcagtgaaggtcttctaaatctgtctgttgcaaagcaaggctcgccacaggctgtcagagtaaccatggaggtcggacaggacttgcagtggggacagggccccatcagcctctcacctctgctcagaggcaccaccctctgaacagatcagagcataaacaggtcagagcaattcagcattcattccctctacagacatcagggcaggcaccatgtagtggagagtggggccaggggccatctgccatggctgtttgggctggggaaggagagcagtacttctggagcatgtgctgtgctcagggccagctccctgtaggtaggttgtgggaatgcagaggtggcaactcaagcacccctgctggggattcagagttttgtggagaagtagatcagtaagcacatggataccagatagggttgtcaaggatgttgattcactgttgtccctattttcctaagctcgccacatcatggaaggctgctacccaagtgacattcttgggcttcaccaagtgttttaacagagctccacccagctgtcacactaggggtaacacagtgggccagaaggagaggcaggccttccctggggtcccattttaaaaagggggaagtcctctgttcttttacaacacttgtttaccccaagccattcagcatagtattacttaggtcccatacagagaaccttccaacagatagctctccttgctcaggcctgtcctgatgaactccctgatattcttccaggtcttaaaagagtgagagctgagcatttccctctctgccctggctgccaggaagctcagagataacttgtttgctcagttcctgtagctttcctgacccaggacttctttttcttataaattctccttgttccttttccaggaatgcttgctttttatgttttgtttgtttatgttgcttttgtctctgtattatactttggggggtggtttttggaggcaggattggcagcagccatggtagttagaagcaccagcagtaaagctggacacacctgggtttcatccccacttgctagctgtgtcattttaagtaagataagttgcctcttcagttctcggttcctcaccttgaaaattgggataatgatcataatgaatggataggttattgtgaaaattaaacttgtttattgtaaatgcattgtttcctgttcctgctcttggatcaggcttgatctgtggctgtagaatcctagtcttaatttccttcttcctgcctgtgtctgtcagcatatgatgagttgtacaatagtagtgactaggggaccaaccatcccggtttgtctgggacggaggggtttcctgggatgcaggactttcagtgctgaatgggaaggtcccaggcaaatggatgagtcggtcaccctggtaataaacaacctcaacatctcagtggcttactgtagcaaaggtttatttcttcgttgtgctactgtccatccagggccttggctaaaggaggagcctctatcccaggaaattgacagtcatgggcacagacagaggaacacatgttaaaggtcctttagaaagttgtggctgtcacttctgccctcattcactggttggggccagtcacatggccaggcctgccaccaggctgtgcagaaccttcccactgggtgggacagctcagcctggaacactgatccactctgccaggctcacctttctcttcttttgcattttagggtgctggagcagggaccagggaaaggagagagtcacttggtctgaactgggggtcttggatgtgatcatcttcctgtagatggtcggtatgggtttcttaaggggcagggttcagcttcaccctgctctgctcagaggagcagctgtgtctcctttggacgccttctagtggttgatgccctcacctttctcagctgccaaggcctctctcgacagggcaggctgggctgtgacttctcttccaccctccttgctccttcctgtggagcccctgagatcctttccccatgctcctgggtggaatggagggtgccctctcacattcttccaaggcatcttgcgcaagtccctccatgccctgctttctctggcggtccagcatgcctccatctcacctttgggactctctagcttggaagtgggcacacctgcagcccctgactccaggaccacaggctaggctctccccaaagcatcctcatcacacaccatgtggatggccaggtcagggcggccgtcagagcccaccctcggcaaggataccctctcaaaggcacctctgttggctcaaatcccttttggaagtagcccagaaagaggctttcttttttcttatcttttgttgttttatttattgttcttgcatctaagaacaccttcttggtcagaaaacagttttccagaaataatgttaagtaagtgtcacaactggtttagctccctaacctggtctaagcatataagagaggcttttgaggctgggcgtggtggctcatgcccataatcccaatactttgggaggccgagatggagggattgcttgagtccaggagtctgggcagcatagtgagaccttgtctcttctaaaaataaaaaattagctacgtatggtggcacatgcctgtagtcccagctacttgggaggctgaggtgggaagatcacttgaggccaggagttctaggttgcagtgagctatgatcacaccactgcaccctaacctgggcaacagagtgagaccctgtctcaaaaaaaataaaaaaggctttttgatttttgttttgcagaagtaccaaaatctatattagcatttattatttttatttctataaagtaaatttgagtattgggaaaattgatcaaaatgagaaatttcatatggagtttagtacttgaaatttggatccttcatctaaatttcagggaagtcagggctgggcatggtggctcacacctgtaatctcagcattttgagaggccgagatgggcggattgcttgagcccaggactttgagaccagcctgggcaacaatgcaaagcctcctctctacaaaaaatataaaaacaagccagacatggtagtggtgcatacctgtagtcccagctacatgacaaactgaggcaggaggatagtttgagcccaggagatggagattgcagtgagccgagatcatgccattgcactccagcctgggcgacagagcaagactgtctcaaaaaataattaaataagtaagtaaatttcagggaactcagagaacgagaaaggacatgaaattgttcatttatttagcatttgttgagtaccacctggagtgaggcacgagatcaggcacaggagacgcctataaataaggccctacctgcctgaagcttatgggaggtggaggagacacgcctacaagcagagaatggtcacagggcgtgaaggagcctgggcaggagctgctgcaggagagccagggagagaggatacagctctgaaggcttctccaggaggtgtgcccacgggcacaggaaaggaaagcaggagtttatcaggtgactgggtggttgaaaggagccacacctgcaagaaacgtgggcccagcagaggcagggtggttttgggaactcttgtcttttagtctgtcggggggctttgggtagcagatgggagggttgggctgaagactaagcagtgtttcctgctgggtgggtttgaactttgtttggaagacttagggggaacagtgaagctattgcagtggtctgagcaagggggtatcccgcctctgaccacagtggagaggggatggggctggagacgacagcagactgaacagaggcagtgacaaggatctggagggaagtggctgggcccatcccttagagggctgtgtgggggctgtggggtgtgggaggaagagaggaaggaagcccagggtaggttctgggttgctaatttgggggctgggaggatagcgtgtgacctaaacagagaatcagatttagatggaattacctatattaagcctggggatttcatatctatttgctgctgctttaccagttgaggctcaagaatgagaagcacaaaatttctggtcacattatttgcatgtgcccagactggggttaacagaatcggacagtgagcgttcctgaatcagactgcaatggggaatgaatgccttgggaggctggaagcagttgtattcgcagatattcatttggagatctctatagcgatcgaggcaaagataccccaaagactgcaagaattagccagtggaatttgaaatgccaaaattttttttcagaaaggtcaggaaagccccgtttaaaatctaaattttgccatctcaaggcagtgcagggatggattaggaggatgtggggtgacccttttcttcctttcagagccagtttctgccagacacaggaatcctccacatgagtcatagggtggagaggagacccctcagtcctttcagtaaggtgggagggcagtaccgcccggtggctaccatgaaccctgtttcagaatttctttcttaacttcgtgtgtgcccaggtgcacttgagattcactgatgttttctttagaccgaggagctcgcttcagcagttagtttcaggtgttggctctgctggcattatgcttcggcttaatgttttctgaagacttgttttctgttgtttttcattgttcttgttgtctggcttcaggccactaccttcaacctagcaagagctgagtggtgccttcagcagtgaggtagcttctgaaggccaccactctcttgctgtgtgactttggctagtttctccacctctctgtgcctcagtctcttctgtaaaacggagaacacaggagtatctccctcatagagttactttcaggtttcaatgagttaatctacataaaacaataaggatagagcctgacacaaaatcacactcaacaagttttcacaattatgattacttgacccagtaggagaaataaaaaacacaactaacttccttctaaggacatgcccaagaatccagttttagtaactttgaaggcattgtttttcaccgaaaatatctcctgccagattttttcatgtgtttgcagcttagctttaacaaggagctgaaggacggccaggcagcaaggggtggtgagtgccggtagagtgtgacgagctcgcccagccttcctccctgtaattaggagtcatgaaccatctacaccatctcccttagctaataagagatttttacatttacttacctcaaagtgacctgtctgggttttcttttcttgtggcccccactgtaggtttttggaagaagctgaccgcctgaaaagaaattataaaacatgaaaatcgctttgaggtgaccaagtccagaggcccctaactcctcccaagctggatctggggtgtaagaactgtgacttcaggtaacaaagtagtatcccctccctgccccctgtgaactcatgattcttggtagcttgcatggcagttcttcctttaggaagtgtagtttcttccaggaactctgaaacttggggtattctacctcatgcggttgtttggctggtcaaaaaagggagtgggggattctggaggtacttcatgtctgctgcatggcccaagggggccagggctccataaatcaccaagaccctgagggcagggctctgtactcattcctggccctgcttctgtaaatgttaatgacaaaataacaatgtcacccacccaacagggtctttaatatgattaaataatcatgaaatacttcttgaaggataaatcagagagaatagctaggaaatttccaaaaataaagagcagtaggagagtatttgttctgctagctattaaaatgtattctaaagcacagttgtaaaaacagtatagtactgtgatggaaataactagatcagaggaacagagtagagagtccagaaataggtgataaatcaataaaggtgtatttcaagttagtggcaatgggatgcatggactagcaaatggtgttagaaaaaatctcctatccattagagggaaataagaaattcctaagcttaggtagtatatcaaaataatttccaaatagcattaaattaaaaaaatcattaaaatcttagaaaaaagaatatttatattattttgggtaagaaaagacttaaaacatgtcacttttggtcccacatacaaatatcgtaaacaaagttaaaaagcaaaagggtgggaaaagtgtttacaacatcaatgatgaacaaagaattaatattcttagtatacaaatttattcgttcattcaatatttattgagcacttagtatgtactagaaagtattctgggcactaagggcacaagcagtaaataatgttcctgttctcctggtacttagaccctgatggagaggactgccagtgactatggtagattattgtaggtcacattttgataagggctaaggacaaaacattacgtaggtggctgggctagggaggcttggcagggtttgcattatgtggatattcaagggggcttcactgatggaatgacatgtgaagaaaaagggaaagtcattgaatgtcgagctgatagcacatttgctgtttttggaatgtcgagctcataggatttgctgatggattgaatgcgggttgtgaaagaaaggagtcagggtggcttctaggtttggggcctggcaaccagaaggattgacataggaatgactgagaggcttggcttggagatagagttttggttatggatgtttcagtttaacatctctcttgtatattcaagtgaggacgtcagggaggtggtcggccataaatatctgtaattcagggtgacatctaggctggagatataaatttgggaattgttgcagtgttgatagtatttgaaagaatgacactagctagagcccctggagagtgtgtgtagatacagaagagggcccaggacatccatgggaccctcccttagagttgagggagatggagccagctaaagagagcaaaaaggagtgaccactgaaatggaaggagtcccgtgagaagggggatctcccaagccaagagacagtgagaagggcgaggtcagctctcctctggatgtgctgatgggcaaggagagaactggccattggatctagcagtgaggaggtcactggtcaacccaacaagggctgttttatgggaatgatggggagagaatctgtttggagttggattattgagaataagaggaaaaaaactggagacagagaaatgggacaatagctggaggaggatggtattcaagtaagtttatttttcccaagatgggagttacataactcttgttttcacccaagtggaaatgattcagtagcgtggggagagtggatggtgcaggattgggctggggtgagggttctgaaatggtggtctcgaggaggtgggagaggtagaatccaggcatgagctggggaagggatcctaagtaggagcatctaaggaggtggtaggtgtgcacctgcctcttttctcagttcactaagaagcagagtcctcagcggagaatggagactaaggagacgatggaagtttgaggagagagggcaaagtatgaagtccttcatagcagaatgagaaaataaatggccaggggaatgaaggattgctgggcggcatgcaggcctctaaggggtatgtttctccagccatgtcctgttacacaggtgaacacggggtaggaggccattgtggtagaaaaacaggacatgagcagacacaacgtaagacagagaaacgcctgtaaagagaaaaagcaacatcagtaatagctgaagaatacaagtaaaaacaatgaggttttctttttttctctttagactggcaagagctcttgttggggatagaaattattgtcgcttttctggagcacagtgttacagtatgttccagaatacaacgtgtgtcccgttttgacctgtcagtcccacctttagaaatttattctaagaaataattgctcaaatgcaaggaaatatatgcacaaagatgttcaccccagcagtgcttatcaaagtgaaaaaatggcagtcatctaaacaggaggcagctggttcacttatctgtcggcctaacagtgatagtgggaaacagtagctcacactcaccctcctgttttgcagatgagggaagttgggtccagagaggggtagtgacagctccagtcctactccacggagctcagaccccctggctgtaggcaggcaccctgcccaacctcttcaactgggcttggagtcagagtcccttgcaaggcacttgtcaagcccttttcaagggccggtttgcttaatgcttttaaaatacgagttctcaaaatgttttgcaaatttgtttacaatgtcttcatttcatctcatggctttccttgcaaaggatgctgacagtggggggaaaacaggccgactgcctggccgtgatagaggggaccatattttcctgattcccaagtaagacttacagtggaagaaaggatattttctgctttcttacagtgtttacaaaagtcataacaggatgtgaggactatctggctgcaacatctgtcaccccattggtcgccagagttgattgggctgatctggctggttaggcaggtgtcccattcctccctcaccactccatgtgcgtccctcccaaagctgtatgctcagaaaggatgaccatccccgatagaggaggactggtctttggtcaagggtatatgagtagctgcaatcttctgctagggacccccaaacaagctctcaaaagtcataacaggagtacaaagataataaggaacttgcatttatttgtttccttgatcatatgtttattgattagaagaaaataaaattagcagccagccgtggtggctcacacttgaaatctcagcactttgggaggctgagacgggcagatctcttgaggtccagagttcaagaccagcctggccaacatggtgaaaccccatctctactaaaaatacaaatattagccaggtgtggtggtgtatgcctttagtcccagcttcccagcgttttggatggctgaggcacgagagtcacttgaacctgggaggtggaggtggtagtgagctgagattgcaccactgcactccagcctgggtgacagagtgagactttgtctcaaaacaaataaaaaataaaaataaaataaaattagctttgtgtgtggagaaaagggaggaaaaataattagcattgtcagagaacatctgggttatttggtcccctccgtgggaactgccctgggttttcacttctagagtttctggttctggtttaatttttccacgccacagcacagggaccgagaagctgctcagcttctctaggcttttatgtcttcaccagaaaaatgagcgggtgggcttaaatttcctacaaaaactcttaaaataaatatgatgctctttccattctatcacatgcctgttctgggtccgggggtgtgagagatgcattagtgctgctgtaaaccagccccgggtctccccccccggccccccaccaccaaacccccaagcaccaacctgggttctccaccacttttgagagctcatcgaaataaacacacctttgtgcctcttgtaacaattccagatcatccaatggcagaccagagaatggacatttcttcaaccatcagtgatttcatgtccccgggccccaccgacctgctttccagctctcttggtaccagtggtgtggattgcaaccgcaaacggaaaggcagctccactgactaccagtaaggcctttggggcatgtcttcctcttgttaaacttggtgtcagttctcgggcatggaacatctagcagccagctactgtttcatcctggaaaaggggatgggaataaaaaacccaactctaggtggcgacacagttggtttttggctttaccttcccctagtttgtaagcaagaaggagccttcagcagtgctgaggcatttaacttccacttcctgtccccaaaatgttctacacccagagaaaaagaacagccttaaggccaagttctgtcttttacccctttcttcgtcttctttctttgctcctttgagcaagagggttaagtctatgggtgtcatctcagggggttcaaagagagctttgcctgagggcctctctgaggaagacagcaagtgtcaggtgcttaatgaatgtttatggaaggaatgagtggaggtcctctctgaaaacaatttaggaacattgatgttgtccttaaacattatttaaattagtatgaacttgttatattaaatagtatttttgtttatttttagacttgttgacttttcgtttgagtaagtaaattttcacacttacagtcatcccttctatatatgtacaaacacctagggaataaggcagtgtagaatattcaaaggcacattttgttttgccgaagcacctgcgtggaatcttacccaaatgtccatttaagaggttttcttttgtttaatgagggaaaatctccgaggaggtataccccctacagcagatgtcctttctgctgaagttcacaggtcgaatttggggagcacaatggctggaggtcagatgcccactaggagatgctatgattaatatgtaagttatcccagatgattaagacagccaacacccaggggctggagagtgggtatgagggctgtgagggcgttcttccatagcagtaactccccagcagaaagactgcgagatgttggccacaaaccctttgtcttgagcaagcgctaagggagccactgatgtgttctaaggcctctgtcatctggacctgtgggttccagcctggtcaccacccaagatttcccttgtggactctggtttgctaatcttctgtaattcatggagactcaattaattaagcaaccttaatccctttcactatcattttaatgtaactgaagtcatctgtgactgtcaggcagagctttttctcacctgagattatcacctggcctcaaggaacagatagaattctagacaaaagggagaggggagtttttgtccttccgtgcggcctgcgtgatctctgaactttagaactagctggggaaactctctgcctgtgaggaaccccagggcgtctaattgggaacactgttctagaatgcccatgatatgatccagtgctcctagaaacagctatttttgcccttgggattacattgtttgaagggccatgctctctcctttcctgtgggataaaggaaaaaggagagaggcccagctggcagtccatgccctcctgataaatgtatggattggagaaggcggtgagggggatttggaactccttcctctggggatttcagtctgttttcttctactgaaccacaggatgcaacgaaacttggttttctgaagtctgtgaaagggagggagatccttgctgtgaccccaggacttctgtggccctcagccccactacgcccctccatcccaattcctaaaatctaggggttcccacctacctgagaagcagaatatttggcagtagtgcctttgaaaagctgcctggggctctgctcagtactttgttggtactttaattccaccctcctcacttcgtcccttccctgccaaatagatatgtatgcacatttatctttgatgctcaatatgttttgcaaacagaataagcttcatttatccagaatgatggggggggagaatgagaggttatatagatatttcaatcctatggttaactaagcatttttataaacactacatattcccaattttcaaacaatcagaatatggtaaaatatatgttaacacacaaactcttttgagatgataacttttgtttgataacctgagaagctggtccaggttttatagtaagttcaagttaattttcatttgttttacccttattatacatcattaattgatactgtggctgttcgaactttatgattgtttggtttctggataaatgagagccttctgtcttatgataagaagctcttctgtatgtctttattaacatgcagtcacattctcttttgttttttcagagaaagcatggacacagacaaagatgaccctcatggaaggtaccatgaacctagtaatttgaacttcagcatccttatagccattttctttgcactgttacacattctgttacttggggcagcacccatgtcctcaactggagatgagcaaggaggccgtgagcctgtgggcgctcactgtgtccctccaacccccagtccccttgtgtgtctgcagagagatgacaggatcaggcagaagaaaacagcaatgtgtaactttgccattcatctccagagaattatgtttttatcttttgctttttcctccccccaggttagaatatacagaacaccaaggaaggataaaaaatgcaaggtaagcttggaccttattttgtctacaaagcatcctagttctggttgcttagagagcagctgaggaggctctgcatgtttggtcctgtctaagagttctgttgggcactgtcacctccttagggaataggcaggtagtgggccttggccgaggtggccttctgccctccatgctctccatactggctggcctttactctttgctgtctaagcacctttaacctgaagtggatttgaaggtagcagaaatcaatcaaggctcaagtttttccccagtcttcagcagagaacgtcttcctgactggagcgccctccgcaggagacatggctcagtgatttggttcctgggctgggacttgcctctgtcaggggcccctattgcactgcgagttgcaactgaatgcaccacatggggcatgctcggtgtctcgagtagattctctgcctgggtctgtcctgcctccagccacacttgctgacctcttcccattgcgtcctcagttcttctgccgttagtaccaggctgtgttctgaggctgcgtcatgacagactgatacagggggctgcagaaattggctgccctaaggcttcaagctcttccctcggaggccagccttagcaggagctcccatggctctgtatctgcggcagctgcagcaaactacatttccatcgttgctgcacctccttaggaggaccatcaccaatggcaggtgcacatcagtcagtgtcaccctgcctcagcgggaggagtgtgacattcctcagaggaggctcctggggacagatgtagcatctgctgcacctaggtggggacctagttttgatccaaggatgacggcgttggttactgggtgccctagtcagtgaggctgtgactggaaagaattggtgccctgcccaggtcacatggccacacagcgggctcctcacagacctcagggacagcccacggggctctggatgctctgtgctatgaagccaccacctcccttctctttcctttcacccccatttcaaaatccaatttgacaaaggctgagaggaaaagaaacgaggagaaatgaacaattcagtttactctgaagagacaatttttgtagcttttctcctgaattctaaagatgaggtaaacataaaaaaattaatactgacctggcagtgagaccattttcttggagactttagttgaaaagtctaattttaaacattctgcaaattctaaatttgccttgtcagatgaacattgaaaacagttacaactcatttatttttgtcatcttttcttgatgcttggttacattttataagaaatcgtttttcatattgttgttcagggaagctcacagtcagattgaaaagcggcgtcgggataaaatgaacagttttatagatgaattggcttctttggtaccaacatgcaacgcaatgtccaggaaattagataaacttactgtgctaaggatggctgttcagcacatgaaaacattaagaggtgagaccctgggctctattgtcctttatgtccttgcccacaaatgttaccacccttgcctagaatgttcctatccctaaggcagatgtttattacttgcaattatgtagccttcagtagtatgcctttactcttcagcaacagccgtgatgccaaatgaagtgattattgagcttatgtgggttttgacatgcaattttgcagtcacacattctcagagcatagaaactgtgctttgcacgtctctgtatatgcatgtaatcaggctatgtgcctatcagagatgatactgctctgatgtctcacatcttgcctatgtttgtgcctggatcccatccttacaattataacacgcagaaatgtaggtgcacacagtgacacagaaaagtcagttcaaagatgaaaattcatcatggttcctttgaaaagtgagtcatgggttgtgggttctcgcgacattttgttgtcaggaatgaacactgaagatattttcatcttcctggaattttcccgaaccagatccactctttgtgagggaggcagtattttccttcttttctgagtgtggggagggtgagaaaacataggcagaaaagtggaagtgacttatccaaaccacaagagaaatctgaaatatatcaggcattttagtgaatgctgttcctggaattttccatagctagtcttggacttttggaggaaattggaaagtgggcgctcagtcagatctctgacctgcgtggtagaagaattgcgtctttttatatttgcacaaggccaccagaaataagaagtagctggttttgtctgactttagatcattacccaaaaatataaatgttgtatcctgtgctggaagaatggcatttaaaaattcatattagcaaagataacatgggttaaattattataaactaatttctattaaattggaaaaaagtggcaaatctcaagttacagtaaagagcagggatagggatcaataggatggttgcaacacgtcctgtctccttccctccccatggtactttgaattgttacagatccatttccttttattccttcactattctactcgctattctacagactccaaatcatttactgctggcatttttctctgttaagtgattgttctcctgaaaaatgccagattgacagccttttaaacctaagtcttgtcccctttcagtcctgggagtgcgagctgcattgactgaagcaatgcattcctccacattgccacgctcgtttaactcacccctgatgaagagtaactcacattaaatgccttccacaatatatttactcagggcctggaagactgaatggtttcccaagaacatttagagtggtgatttgaaggactaccagacaacccatttaatacagatcttaggaggagggaactctctgaggagcctctaccagtttacttccagagctgccttctttcttagaagcagattgttaaacttccttctattatctcttggttttccctgtaatgagaaaaacaggcttgttaggtctcctgtgggtaacagtgttctctcttccatggaattctctttggcttacaggattctgtccaaagccagatctaggctcatctcagttaaggcctaaacaataaaatttaaataccaggtcatagagactaggccacttacagaaggtttgaggcagcaagttagaatgagacattttctgaatatcaagtataccaattctttctctttttgcccctaaggtgccaccaatccatacacagaagcaaactacaaaccaacttttctatcagacgatgaattgaaacacctcattctcagggtatgttcaattatgggattgttttacaacgtttgtttttataaattttcaagtaagtaccagcatgtgggaatttgatgtttcaacactgagcttttttttttaggcctgcttcctctctcaggtccctccctttatcttattgtttggacaggcttcacatttcttccacaaaaccattctcctcctcttttaacctcgtctagacaaaaatggaaggtctatgccaccgcaatttaaaatcagaagagtcaggatttgttaaaaataagggggatttgagaatcacatttctgcatgaagattttaggaagggactgaaaccaacaacaattgagaatttctcttcacctgatttaaccactagcacaaaaaagtccacctaaatctttacaccaaaatctcatcaaaataacaaaactgtggctcacgcctataatcccagcactttgagaggccaagacgggcagatcacctgaggtcgagtttgagaccagcatggccaacatgttgaaaccctgtctctattaaatatataaaaattagctgggtgtggtggcagatgccttcttgggaggctgagacatgagaattgcttgaacctgggaggtggaggttgcagtaagctgagatcactccactgcactccagcttgggcaacagagtgagactctgtctcaaaaaacaaacaaacttacaaagactagtggtccaaaaaagaaaaataaatgcaagagatatatgctttcacctgcttgacttgagtgctctctctgtcttgctaaatctctgctgggagatggttgaggtggcactatgggaacctgttgtcttccatgaagaattaggtcggcacaaagctctaagttgtgttactaggtaaagtgagattaacttgggaattgaagggaaagaaactggattcagaaacgtgttcttgtagattgtaaacagatgaatagaaaaacgtaactaaaaggaaggatacccgcttccacctcccacaaagtcagggctgaccttacctgcacagccaacagaatcttcctacccatctttgagcagaagtttgcaaagctctagagtagagggtagtccatctggaattttgcatcatcactatccattttcagctctctataagcctggcctgtctgctcactccagcattctctatttatctcctcatgacgtgctatctcaaattggaaagcattcacctgcaaggaccagaagacctgatgaataaatagagtttaatttctcaagtataactggtctggagtaggttatgttgggttgctgcagtggttcaatgaggtcaataggaaccaggttctttgtctttgcactcagccacaccaagctagcatgctagcttgtttccttaatgtagccaggtacctttgccaggtctaagtagccagacccactgtaaaaacaggggtaaatgaagctctagtctggctgtcctttttatcaagaaaggatacaccttcctgaaaactcaacagtggacttcagcttattcaaaagtgtgtcacttggtcacgcctagctgcagggcagggtgcagaaacaagtgtttatagattttccagcctccctggtggagacaggcaagagagaaggggcctgggaatggtgttgggaattggcttccccaacagtgtttgccacacacactttccagagccacatgcatttgctcgattccttccagaagtgactcccacaacccaatatagtgcttcaactgtggtctgattggcctgaggttgaatgggactagtgccttccttgccaaaaaagccatctgattagtactgtatcatttggggcagctgcagtactgcctcctcccccttctctcctgaatatgaattattgttaggtcaggttttttacatcttgtataggtgcttttttgaacttaagataggacttctctttcatttctgtcaaaacctgtttgttgaatggccccacagtccagcttgtcattagtgacccttggaatctttgtgtgacttgtagatccaatacatgcctctgtgcctttcatccttgtttattcataaattcaacaaacatttttgtttacttactagatgcatggcattgttctaggaacatccaaatcaatgataaacactttagggtgggaccaggctcccgatcaagtgagtgatagtcttttggctaccactctcaggacacagttattcaaacacccaactttgcccacctctccatccttttcgtaaagatgtccgtgttctcagagaggatttgctgaggttaaaatatgaccgatgcctgtagcatctcgagagctgccgtcggtgccagcttcatgggcatgtgacctctgcagtttcacaaggccccatgcttggtttaatgccctgtcaccatcttgaaaacgtaatttttgaacaaggatccctgcattttcattttgtactgggccccacaaattatgtaactggtcctgattcccatactggtaacagatctgcagctgtagatgtgataggcctgcctctatgcctttcattcttgcgtattcatgaattcaacaaacccttttgtgtacttactagaggcttggcattgttctaggaacatccaaatcaatgacattttgggctggggtacaggcttgattattttaagaaaaagaatctatgtctttatttcatatatatatatatatatatatatatatatatatatatatgtaaaataattatcaagcagagtcctgtggatggacaaatttaaaaataaataaaacaagctccttttgcagtggcacgtgcttaatcgttttcttgttgctgcttttcttaataattttctatcagatacccatacttaccagggtatggaacaaggattatcatgctatctcagctaaatacttcatgttgggcttgtctcttctactcccttgtttatgcagcactcaagagtgatctctcttgcccgatgaaggttttgtcacctctctagcacgtgtcagtggctgtgaaatactgtccagtcccttatcacttccagggtcccagttccagggacttgcttccacagaaagccaggtctactcagatgatgttcagacagtttggccgcaggagctggacttctgcttttcctcagcaatgcaaaatggacaaactgctttctttactaagtgctttcaaaatatctttaataaagtgtatgtcagggatcagtcaactgtatcagtttacaatgtctacgttagtctacttccccatgttttgaaaactaggcagaccgtaccaaggcctctgtgtcttttattaaccagcaccatcttcccaagagtgaccctgccactggctggcccctgtggctctgtggtgctggtagtgttctcacagcttctgctccttagctgtccttcgggcccggctccttcacagatggtctgctggccagggtgctatggagttggaatgtccagagcctcccctcgctgatgcattcactgctttggaacctgctggctttcctctggagtactgaaatagctttacctgtgttgtcggttcaggcctgaccctgcccagcattacctccagggtgtcacagttcccttctgtccaggtacctttcaagccacattgccacatcaatgaaaagcctcaaaaacacttccatgagatacaagattatctgcaaggcaaacgaggaagtttttaataccctatttgttgacagaatgaggcttccagcagatggtgcttggaaagttacttccccctcactgtcatcccttgcccctgggccagcttagggacctaacttaggaaaggatcctccccagcttccttctggctgagtagcctgccagggtcttaagcaacagtgattctgttcccctctcactcatttcttctgtcccagcacaagtacatgcaccattcttttaccttctggcacattaattcatttcctagttctttgaattaaaccacatcatgaaggcccttttgtggaaaaagagaacagtttctctgtatttttccaaagagcagattaaggaccagtgaataaggtgagaaactagtccactgtgtattagaacgagggagggctgagtcataagagcaagggcatgacagagtggggcacaccctccttgtcaccggaagaccccagcaggagttgagtggttgtatgtctggaaggcagtgggtgggattcacacagcccaagctctcaggcactatagcttgggtatttacctgcttcagtctctttaccaaatgttgtcctatcttaatggctggctttattggaacatttagattttttcctgtatttaaactgaagaaggggtaagaagaatctaagcggggagttttgcttttctgaatgcaaatagtccggccctggatggagggataacatttgagagtagtagttctcagccctatgtacattagaatcacattaacgtggaagtgggatgggtttaaaaataccccagtgatcagccccatgccagaccatcagcataaaaacaaaaacaaaaaacactgctccgaatgttgagaaccactgttttagagagctccctgtacgtggaggttttcaagttgaaggcagatgatggctgagatgttggagaggggattcttgaagagtccttccaaatctcagattctctgactctccatagagttgttattattagagcaatgaaatatgattctctggaccatgataccttcaaaagaacacgtgcaagctgaattctgctttgaaatataacttactttaattggactttcttcctataataattagatgatatgcagaaacacacacacacacacacacacacacacacacacacacaatcttacagttcttcagagacgtttgttttcagcatcctgcactcaggatatcactgaaactgttagtgttcctgtgctttggatgcttagaaagcacatcctctatttgttatcagggtgattacaaattatgtttcctacagtatgagaaattgattatccatttctcctgattaggcagcagatggatttttgtttgtcgtaggatgtgaccgagggaagatactctttgtctcagagtctgtcttcaagatcctcaactacagccag

SEQ ID NO: 15448 - DNA, 47111 bp, Homo sapiens
ggtggtgctggctagagtgtatacgtttggacccaagcttaacttttccaatgtggaatcctgggccttcattggtaagtttgtttgatgccttcttaccaaattatgctatcaaggattggtatttggaatgaaaggcaaggtagttatcattggcaagttctctgtggaggttaccagccctggacctggagaagcctgtagcacaggctgaaggggtacataggaaaagtgaaatctcactgtaggtttctgtggtagatgcagagagggaggccagaggaggggaaccaaggggtgcgggggatggatgcagcgggccttatggagaggtggagctttggctctgttttgaagggcaagctagattgaaaaaagtccggggaggagtgaaagaagattttcgggacttgagaacatagaggtgaggtgtaaacaaagtgggcctagcagcagtcccataggagcaaaatcttcatcgaaaggagtcacgggcaagaactgtggtgggatctgctggcgtctgatgattctagtccatcagcaaactttttctgtagaggaccagatgctaaatatttttggcttcgtaggccatgtggtctctgtcacagctactccactctgctgtggtaacatgcaagcagccatagataatatggaaatgaatgggtgtggcagtgttccagtaaaactttatttacagaagcaggtggtgggctggatttggcctgcgggatgtagtttgccaactccttttctagaccctaaatgcccggctaaggcacatagactttatcctgaaggcagtgggaagccattgaagttattttggataaagaagtgaagtggcagaagtgatgtttacattttaggaacattcatctgatagctggacaagaggcatgggccccttttggaaggcagcagcagtcatccaggcatgaggtcttgcggtgaacagtagtgaaaatggaagcaaaggatcaatggaggagatactgcaaagggagaaccaatagcgttttcagtcttcttagacttaagaggcaggagtcaaagaggatgaaagtttaagcttgcttgtttacggtggtatctttgacagaaatgtagatgttgggggtggaaaggatagctgatgcatctggttttagatatgttgaattcaagataacagtggttcatccataagaaatgtccagcagagaattggaaatgcagggctgaagcctggcctgagaagattaagtctagagatgtggaatggaagccataggattaaacacggtctccccaagatgagcagtgggctgagctgtggggaatatgcgtaactgtgggacgggaagacgatggaagagacccagaggccatggaggagagtcccgggaagggaagagaatggggcagcagagaccagggagaacggacctgaagggaggctgctgaatttgtgacaaggtctttgcagatggccttgagaaatgtaatgtcacaagaggggaagggaagaggaagccaggttacatggagttggacataaatgaaggataaagaattgagatgttacaaaaatagaccgctcatagaaggtttgggtagtaaaagaagggagacacataagatttagatacttgcttgtcagaataacctttgctttagctttgaggcaggcaaagcatgctgtgaccagttttcatttccttctttggagccaagctgtgtttgggagtttgtgtgtaccttgggcttgtgattgtgttcttatgctcccttttgaggtgtggtgttcgtaactctgccacaacttgcaccacggaatccagcccgtgtttggacccttgccatgagacaagatgtgatctgttggggaagtagttgcatttgtataagttggaggagaaagtagagtggaccaaaaattgaaataaaccttcttactacagagtctatccaagtatggggacttgaggataattcctccagtcatgatttaattatgtatcaatttgtgctctgagtattttgagtgtaccttctttggtttgaattctaagtagtttttgacttggtttgtgtgaatatagcagttagagagctggtaacaaaagcaacagttgtaactggtttagagccatgatttattgaacactcattatgtactaagtccagtgctaagtgctattgtgtatcatcccatttcatctttgcaatgacctatgtggggggaattattaatagtattcttatttcagccagaaataagtcatagatgagtaactatgcaaggttacaagggatttgaacccgggtctgtataatccctggcttatgctgcttcctactttatcttgcctgtgtctggaatttttcctcctactaatgtagaaggactagagatagatcgagtccctcaggttaaatattcagaggctgtagtgggtgtttccacttcttaggagtctattgaaagggcagaagaagtgtgggaagtctggaagagactaaggccaaacctcaaacacttactttaactgtttccccagataaaatttagttgaaggcagcagccttgggcttggaaagaaaatagcgctagaaggcatgagagtcagattccagtcctagcattatgacaattataatgtcatttttgtttaaactcttggcatttctctccaattacctccagctttgagctccaaaggcaggctcctattttgtcttgtttttcactgtatccccagcatcgtagcacagaatctggcatgtagtatgttatgtactcactaattatttattgcttcgaatgcaccaagggacttggtacaagacacttagcctctcaggcactgctcttggcatcatggttatagaggtgaaacaggacaaggtctctgctgtcgtgaagcagacgtctacatgtgtgagatgtagaatgtgacgtcaggtatgatcatgctctgaaataaaagacagtgagaccggggtggagagggaagggcctgtccaagaagtgagacagtgagctcgttgggggtaaaatccataaaattcctcttggggtgactacagattgtcagctgcgctgtcagcaccttgttttaattgttttacttggctgccattgccaatgcccagctgactgctccctgcagcgagaactcccacctcaggcctcgctttcttcagctctgctgagcgtgcctctcctgggtcggctcccggttctcctccagctgctgagattccagcctccacagcctgctctgctggttctctgttctttgtccttagcttctggtttggcttggtccctttcacgtcatccttaacgtcctccctgggtgagctcatccaccactcacctctgtcttgaagacacccggatctccatatccggtctgaacctcctcccagtccacactcctagtggtctgccccgagggcacctcaacctgtctgtcccctcctgagtgccacatgcgtctttctccctgtgctgcctgcttggtccacgcccctcagttgcttctgcttcatgagtcgtcctggccttgtcttttccctcatattcccttggttaccacatcctgaagagctcatcttctaatttgtcaactcagttcttctctgtctctccactcctgtgtttaggattcatcattttgttctatgacagcctcttaattggtcatcctgtgttcatctttttcctccctcattccactgcccacattcctatcaacgtgatctttctaacacatgtctgatcagagctttcttttgcttaaagctctccaagagctcctcattgcttagaaaataaaagctaacccccttcagcggggcctgcagtcttctcatcatctggcccttggccccctgcagcttttgctcccccacccccaccccactttgggttttcctttttccctaactcacatttctaacctcagcctagctaccaacagccatcacctcctagtgcctttgcaatgctgggccctctcctgggaatggcgtggtctctgttcaccctcttgggaactcaactccagtttcccccaaatcttcaggacaccatccttccctacccagcacctctccatgacctggaaatgaccttcctcctggctcccagaacaccctcatgtctctcttgcaaagcacttatcggtgttactgttgatttacttacctgttatgctcagcaacctgagctccttaagggtggagaccacacacacacacacacacacacacacacacacacacacacactctgtctctctctctctgttccaagtgccagcatagtttacctggctcaggaagtttttgttgtaagagtgaggagtggtctgtttgtgcagccaagcaacagattcataatgtgataaaatgtacctgaaatgggaggttcattggccattgggtttattggggtgctcttcttgtcagctttgagtgcaggacaggttgtgttgggcttgagtttgtgacgcctgttgtgtctcccagcatgctgagacctcaggaatgtctcttctctatattctttgcccctgactttttatttttttagctcttgtttttgatggaccgataatagcaattcaaaatgaaaaataatccatcaaggaattctcaggaatgaggtccacccaccttggtcctggatgaatcccaaatttcctaaataagccagaatatctattcttgcgaactactgtctgacagcctttttcccccttaatccagctgagaatgcttttcttgaagggtaaggatacctagtggcccttcatgggggtgcctgagggcctctttgtcttcattttaaaccttgtaaagtccccagtgaatactgaggagtctaacaaataggaagaagctctgaccccaggggtcccaagtcagcatctgtactttgcatgggagctagcacaatgcacctagccaatagcatataaactctcctgttttcattcagtgccttaagcttgttgcttgttgtgtcttcttcacttcctatctctgccagagacctgagaagttgtgccaagagtgcagcttttatttggggcctcacagtaatctaggaaagcttttcagaagagagccattctcagcaccgaggtgtcctgcagaccaggacactccagcaggctcttggaactgctttcctgggatggaaatgcttgtgatgctgcctccccttgtagggactttccatatgctgttccctcagcctggaatgcatttttctcctggtttgcctagctcatgcctgttcaccctttggaactcagctgattggcctgcctcctcctcagaagcctccccaacctccctgataagaaggctaggtcttgtcctcaccattcccatgccagcatctagcgcttatggactgctcaccttgtgtcaagtactgttagaatgcttcatgcgtagctactttgtattaggggcttggtagatgttggctgaggtaagtgtcatcattgtcccaaagacactgtgtgaggaaactgaggcctcgacccattgagtaggtgacagagcaggagtttatcccagatgctggactgtgggtttacgctctgacccttctatacgccaccgttccctctgctccaagtccttgcagtctgtccttttccagcacttgtcatggaggtcatgacctcggtttgtgtggttatttgattaatgaatgtttgttccctcactgggcagcccttttgagccccaggatggcaggagtacctaggactctaggcaggtgcgcagcctggagttgaccgagagcatgtgggactgcccacttgcccacagctgcttcttgccttttgcatcacaggagggtgggctaggaccataaaagagccagcccaggcctccccctttctggagctcactgagtgcgtgcatggggtttggccgtcaccctcacttccatggttctgcatcagaaccagctgtgctgaggaaacatctgtgccttgttaaggtctgttccttctgcccactccctttgcccttttctctaccttacaacccctttgttgtccttcttcaaggaaaggggccccctttgtctctcagggcagagccagctgcccttctcctggtcctcttgatctgcacacactctgaggatgactgcccatggcaggtcatgatggtccgtctgccctggactgtggtttctgtggcagagcaatactttgtacagtcagggcccatggccctacggaaggctgagggagagcctgaggtcattgccttaagagaagctgcttcatggtgcagttggtatgtgtgcatgtgtgtgtggatgtgtgcttttttcatgcatgatgtttttatttgtgttatttatccccctgctatatctccctctctcaggggtctaacatggagctttgaatagtagatacatcatagctcttggctaaatacatattttctcccccgctgatctgaaggcacctcccttttcccctacccctcactttggtaccttggtgacttcacagggttgttatgacttcccagacctcattgagattgcagtgatgtgaaaaccctacctagattccagccagctgggcaggggccttggcagcaggggaagcccagttccctagggcaactcaccaggcctccagggctctctagggccaggctggctgagcttcaactgactcatactgtttttgactgggaaaaataaaaattttaaaatggcttctgaccaaatggggaaagtggatgtgggaggaggagaagggggacgttagccacaccctaggtacatttgccagcagcaaactgagatgggcttaaagtgtggctggcctctaagacgcctgcttcaaagggcattcggcacactggtctcaggctttggaggcccacctgcttcagaacatcagctccctgtctgtctagcgttgtgacttaagacaaacccaccaagctcccttagcctccattttctcatctgtaaaatgggattgtaatcattagaataacctttataaggttcttgtgagagtggaatgaagatgtgcttagcaccgtgactggcgtgtagaaagcaccaaatatttattatctgttaacattgtttttgtttgtcaaagtattattgttaataataattataagaagactttggaacagatataaagtctaaaatgcaggctgtgatgaaagggagatggtatataagaaaagtgctttttgaattgcacattatgtccagatattattattagcacaagtatgtttattattgttttgtctttgaaaaaaatgctggagcacaattttatgatgttgagtctatgtcctttgttgttttgttttttgttttggaaaaaggtttgtcacattggcctttattggaatcttgtccagtggatgtatgacccacattggtgaccctgggtgccaaatgcctggacagcacctggcaaagaagagccattatttcaatggtcactattgtttaaaatcgttatggtaaacaatacctgacagaagttcttagaggttcattgacagtaaattgtgggcaatgcactgagttattatttactctagacctgagaaattctccctctccaagttttgtgccttgtatagctaaataaatataaacaatttccttagaatttgatacaaacagctaccattgtcttcacaagtatgttagaaatactttcttaatagcaactacttgactgttttgttttttatctccattccctgccattactctgcctcttcccatctttctgaaataaaagtgagccaaattagccatttaaaaaatacgtagatactttcaggcagaggttgaaaactgtctaccccctggctgcatctggcttgcagatgtgttttgttcagcactcatagtgttttaagatgtttaaattagtggccaacatttaaaaatgggtagatttttgaatcaaaatccagatttccagctcttcataaaaaatcaaaggtctagtgggcctgggcccgtcttccttgtggcagtgcggaagagtggtggtccctcccctgggagcttgtttctccagcctgcctccggctggcccagcctcactgtacctttccatggcctgcttggcccctgtaggaatagagtttgtagtctctgcttaatataactaataccccttagatactgtgtatcagtttagaattatttccactagcaactgtgaccataggtaggaaggatattttacttgctaagttgtcattcttatgatagcccaaatggctataatagtattttaggctcttttggatttaatagaattaccttctctcctctctgtgggatttcctcattaacaatttttaaaaagtgttcagcaaggcttatatagcaacataaaattttaaataatgcaggatataaatttctatagctgctattgaaggggggttgcaatcaagtgaactgctttaattcaacaatttatggtgttgtaaatttgaaaaataaaagacacttagttttttttttttttttttttttttttcagaataaaataattaaatagttgacctttggcagagtctttgttgaaataggcaagggttttgagcttctcagaacttgagaccattgccttctggagtctttcctcagatgagtctgtgcctccttctagctagtgcactctgagcactgtggccacatctggagggtggagaggagacttagcttccaatggtggtcactctaggggaggggggcccttgcaaataccaaaatttttttaaattattattttatgagcttttaaaaacttttttgtttttgtcatcacaaaagtaataaacacttgtgataaattcagacaacactgaagtgctttaacataagcaacaaaatcttctgtgacctcccccaaccttttccaaccattccccaaacataagcacttttgagagtttgcttcttatactcctggacttttgcatttgcttgtttctctccacccctaccctttgccctcaaccacgacatagatactttcccttttgttttctaaagatagactgtccctgtgcatggtgttctgcaactttctttttacagctgtcaattattatggttatttttccaagtccatatgtacagataaatgtacttgttacttttaaaagttgtactccatgttatggttgtatgttaagtaaatttcgttttgtattgatagacactcaggttgtttctgaccttttgccattgcagtcattgctgctgtggaaatttttgtgcacacgtgtgaacttttgcctgagattttctttggtatagatacatagaagtaggacttttggtttaaatggtttgctgtttaaaatttgaatccataatgccaaattaccctccaaaaaggctgtaccaattcatgctcttcctaggagcatcccattatggctttgctaatctagtttttgcttacacatgtgtaagaaagtaaatcttaaaagcctcacaaataatgccatcaaaattacacgtttatcttagaaaagcattcagaatatatgtctgtagatttaattatatgatttttatatcttgactttgatggtggttatcatcctgcaaggtgacaaaaagttccctaaatactgtacacaattattaaataattattaaggatatcagttgtgccaggtagcctttggaagaattacagccaaatcacagcttccttttccacagctctgccaggctggcttgtctttcccaccaagggctgagccattaatactgaggctgggtcagcatttgaaggggccctgccagggagtgccaggccttgggccccagagacctggggagtgggagatggcaagtgactgctgtgaggctgagacaaagtttttgcctacaacaccccatggctgtttcctttactgagctagatgaggaaagcaaagggaagtgatggtccaagacttctggtggtcacttttgttcatagatttctcacaggagtgctaacatttaggctcatgtttacgaaggtttgaaaccttagcatttgggaaggatctgcaaattctcagccaggggccttaactgatcacaggtagttgtgaactcttggtccaggctgtatctcaaggcttcttcttagaaggacaggtcagcttaccacctgctaactgcatgtgaaattttgaattctgccttctctagctctcctctctggctctgagctggtatctggcatttgcaaacagtttaccctttgttgacttcttagcactaacctcacttttatgagtctgagtagacttgatacccaggccatttatcctttgagggtgccctcagcttcatcagacccatgctgggcagtctggcatagtggtaagaggcacttggagccagacagacctgggttcaaatcctgacatcatcacatttactaacagtgtgaccctttggctgatgacctcacctctttgagcatcagtgtctccttctacaaagtagggacagtaattctttcccaggggtattttgaaggatatacgaattaatatttgtcaggtgcctctcagatgttcagcacaaaataaacagtgtataaatatgagtcctctcttatcttcctgctgtagagagaaagttcgttggggatgctccaagttggtggctactggctgaggatcctggagtaagaggaaggctaccatgtaaacccagagatgaatcatgaacaatgtgtattctcaggagcttagtatttgatatgggagcctaacaagcaaatagtgtgtccagtaataggaactgattaatagaggaaagattaattaaccttctaggtgggtggggtggaaaagtaggtggggtattgaaggttcaacaggagttcgacagagaagatagaccataaataataaatatacggctgtatccactagagataaagttacattgttttttatgtacatgttgacttcttttggccttgccaatgcactgatatattcaaattcagctcctctctttttctcttcccttttcccttcactctgcctttcctccagccctgccttgaaatactcagccactgaaaatttcttaaagaatttctttatactttagtaagtcctcagaggataccagttcaccctactgagattttacaagaactttggtgtagctggggttttttttgcattcctttttctacggtagatataagttcttttgggttgcccatcaatgaacaaactaccaaccatttgatgtttactgcgtgactcctgtataccaagcacatgtgccatttcacttagtccccagaatgtcagagcagctttgtgaaatgggctgcccgttctttcttatggatgaagaaactgaggcttaggtaggttaatatactgaatattatacatgtagtgagtgggaaagccacagttcacctccagggtctttttctccctctttgctgccttgcttggggtcctgctcatagtaggtggacagcagatgtttgtctgaacatatgagaacactgcctgccacgtgccggtcagtttgatttgtgctgctggttttgtaacccacatggggcaatgacagctgctcaggtactttcctacctattagtggggccccagggtcacacatcagtcataattgacaaaaaacacaatttccctttcctctcaacttttatttctaaggtacttgtaagcaggtagattagattgttaacttttcattttttgctttgtctctctcctttaaagactatgtgaaagaatacacagtgccctgagagcctggcctgggaatcagaaacttagattccagcttcggttctgctggtaactcctcagtcattatgggtaaataatattccctctccagaactactagattgtgtccttggtgcagtctggggttcgggtggtcctagggaccctgcctactgcatgaacctgttatcaccatgtgaggctggaaggatctcagcgttggtgttgggcaggcctgagtgagcatcctggctcctgtacttcccagctctgtgacctcgggctaatcacctgactccctgatgcttgttcttgtctacgaaggagggctaagaggacctgcttcccaggatcactgtccagattgaatgagaaggaacgtcggcttccttccttctgtctccaactcctgagtgcactggttttagactaactgggtgtttctgcagttgaaaccaaaacaccttcattaggtacaatgttcattatacctcgcaacaccctgagatactcaactcttagatttcttgaagctcttttttgttaagaaactcctcaaaggaagatactcttctaccccattgagctttattagtgcttcaatgacagcaccttattttttcacttttttcccccttgcagacagaagctgcagtgtgaatcagtttgcatttatataatttcttttgcatttctttgcaaagaggaaaactccattcatttagcaaatgtccgtcatgcccaggccttatgttaggtgaagggatttggagagaaatagagtcactgacctcaagaagcttacagggaggaaaggtgtaaatacataaagtgacacatgggtttgtcctgtcaccaaggtatgcagtagatgctgtgggagaagagaggatgacacaggttctctcttggaagacctcatagagaagaggtgacttgtgagcaagtctttttttttttttttttttttttttttttgagagagggtcttgctctgtcacccaggctggagtgcagtggcatgatcctagctcactgcaactttgaaatcttgggcttcaagggatcttcctgcttcagcctcccaagtagctggaactacaggtatgtgccacttgcctgtctgatttttttttttttaattttttgtagagacagcgtctagccatgttgcccaggctgatcttgaactcctggcctccagtgatcctcccaccttggcctcctaaagtgctgggattatagacatgagccactgcacccagccgttgtgagcaagtcttaaaagatgagtaggaaggagtctgtcagctgtagaagtaggaagggcccaggcagaaggagcacagggcagaggctagagccctggtaggaggtgacacactgggtgcatgtctggagctggagccaagaggtggaggacctaagtggctacatcttggcagtcacccatatattggcaagccccaaatctttgtaaccagcccagattgtcttcctgagcccccaactcccatacccactgcccattcagcagctagctgcatgttgaagtgtagtggtcttcccagacctaacataactaaacagaagtcttgatttgttccttcaaaaacaaacaaaaaactagccttgctcctcctcagtcttccccatgttatgaggtccccatcatttttacctggctacccaggcctaaaatgtgggcatcatctttgattctgcttcctcctgtgttcttcacatcatctgtttgcaattctttttttgtttgttttactggttttaaaaattatttatttattgagactgagtcttgctttgtcatccaggctggagtgcaatggtatcatcttggctcactgcaacctccgcctcccgggtttgagaaattctcgtgcctcagcctcccgagtagctgggattacagtcgtgcgctaccactcctggctaatttttgtattttcagtagagatggggtatcaccatgttggccaggctggtctcaaactcctgacctcaagtgatccacccgccttggcctcccaaagtgctgggattataggcatgagccactgcacctggccaatttatttatttttaattaacacataataattgtacatatttatggggtacatagtgatgtttcaatacatataatctgtagtaaccagatcagaataattaacatatctgtcatttcaaacattgcagttcttgacaactcttactgtatgtcctggaagccaccactgctccttattattagtttgtttctttatcaaccaagcaggccagaccactgctctaccctcgttcaaacctccactgtctttcagcaggtctcttgtcagtttgctacataggcaaagaggtcttttaaaaagcaaatttgtgtcatttccctgctctaaactctccagcggctttctggcatctttggaatggaatctaaacatctcgccttggcctgccagcccctcctgctcatcttctctggtctcatcccttggcactctctgctcactccatttcagctgccgcatcttttcttactgttccccctgttgtctcatgggctttgcacttgctgtcctccgcctgagctgctcttccccagacaccgcctgtctcaccttcactccacgctggcctctattcaagtgttctcccacctgtctgaaaaagcaccgttctgccccctctccccgctgcttcaaccattctgtcctacctcgctttggtttctctcattagcactcatcactctctgactttatatgatatgtttgtttgtcttcttatttagtgtttgtcttaccccacaagaatataaatccatgaagatgggacctggtcttatctattgcattcagcactctagggcctaaaacagagcctggcacacagtgggtgatcctgaaacacgaggtgggtggatggacaaatgactgagttaatgcatgcctgcatgcaagcgaagactttggagtttatttcataggcagtgcaaatctagtagacatctttcaggaggtgagtgacgtggtcagcacttttattttagaaagccagctggtggcagtgtgggggctggactgtaggagggaggcagcagaattactttagcggctgtgaaaatcgtccaggaaattgatgctgagtgttgtgctagagctgtggggatggagaagaggggacagatgacaggacctgaagatctttgagtgtctttgatttctattgggataacttggtatagtgattcctttataagaaaagcaggaggggacgaactggtccagggagagactgttgacactctgtggtgtttttctcaccaagaaaacctaagccctgggatgcatgttctctgtagtggcattggctctctggggagtgactctgctgctccgcagcctcccctgttccattttttaataagagaatagtcaagatggtggtgtcagtgagtgggagtcttcttcatgcagatggatccattgatctttgcatactccaagccacactaagtcattggttcttttctcgcagtgggtacatttcaccttatttgattctgatctgacaaatgctgctttttttcttttctttttttttctttttttttgtttaaagaatacctagactgtgctcaagttccaggtggggtttacagataactggggttccagcatctcccttcttacaaacacgaacaggagcctttgccgtccttgggtctcagggaggcagaccggcagcaggcacacattcctggcccaggcgtagccatgctgtctggtgctgccttttgagaccttttgtgtgtgtgtgtgtgtgtgtgtgtgtgtgtgtgtgtgggcttgaatgattccttctttcaaaaattcaaccctctccaaattttgatgaaaaccttttcatctctgagtaagcacattatttcccatcttgatgaggtgtgtcccctctgtgtccctgagagtatgtcatcccagccttttaaattttattgtatttttttattttttattttttcatactagtcaagtgcagtagtgagaagcggggaaagagtagaacaaggggccgggggcggtggctcacatctgtaatcccagcactgtgggaggctgaggtgggtggatcatgaggtcaggagattgataccatcctggccaacatgatgaaaccctgtgtctactaaaaatacaaaaattagctgggtgtggtggcacacgcctgtagtcccagctactcgggaggctgaggcaggagaattgtttgaacccgggaggcagaggttgcagttgagccgatatcatgccaccgcactccagcctggcaacagagcaagactctgtctaaaaaaaaaaaaaagagtagaacaaggagtttgatctgttacagactgaactatcaatggagataactcactaccttcggaccagcctcatcccagtcttttaagcctggtccagaattcctaatcctgcttgtcaggcccttcaaagtgaaatgctgtaccatctgtatagctggattctcacctcctacctctcctctcccttccaaaggttccgatgtcataggaatctacgctagagggcttcctgtgtgccgggcactgtggtaagcacttcacatgcattctctctaatccttaccacttcggggatgtaaggattataatcttctttttacagatgaggaagctgaagcttgccactgcttagtagttaagagtatgggcttacagccaaacagaccctggattgattctcaactagctggggaccttgggcatgctacttaatttttttaacctttttcacatttagaagataaagataatatatagagagataatatagaagattatataggtattatatatatatatatcttctatattatgaagataatacagagttgtgataaaaattaaatgaaatgaccagacatagtggctcactgttgttttgttttgttttgtttttttgagacagagtctcgctctgtcgcccaggctggagtgcagtggtgcgatctcggctcactgcaagctctgcttcccgggttcacgccagtctcctgcctcagcctcccgagtagctgggactacaggcgcccgccaccacgcccggctaattttgttgtatttttagtagagacggggtttcaccgtgttagccaggatggtctcgatctcctgacctcgtgatccacccccctcagcctcccaaagtgctgggattacaggtgtgagccactgcgcccagcccatagcggttcactcatgtaatcccagcactttgagaggctgaggtgggaggtcacttgaggccaggaattcaaggccagcctgggcaacatagcaagaccacttctcttttatgaaaaaaaaaaattaagaaaaataaaaattaaatgaaataacatgtaatttcctaagtacattaagtacgtgcctactatgcgccggacattgtgctgtcagcaaataatagctcatcgcagatgctgttatcatcatcatcatcccaaagccacagattgagtctgtaggtgaggccctgcctggctccaaagattgtgtttttttctcctgttgctcccaagttcacctgtcccaaactttctagcccctaagtttgcttccttgcgcttttctggttgtgccatttgtccctgtctgggcagtgggctcaagctaaggcacagcagttttccagtccctttgagctactgacctcttttctgtcattgactgaacagtttccggtggctgaatcgtctgtgtaagagcttggacaattttttctgattgttaccatcatcgtgtttactgtgaaagggcttcctgtatagttgtttgtgttagcagcattgtctaaatgaaacaagagtggcaacagaaagggttggtgagcagtcctagtcttttggggtcacagatcactttgtgagtctgaagaaatttatagactctctcaaaaaaataaacgacaagacaaatacaagcccagcatttttcatgagacgttttccctgaagttgatctggaaggctatgtgctcttttgtcattgtgctactccacattcacagccatgaagggtgtcatgtttctgcagggtgtttgtatttaagggttgttgggcaatttggcaacactatacctgtttcattgatactatgtgctatttgcatttatttcccatatctgagatacgtattcacacatgagaactggcctggccattttgatgagatgtacctgctgatttgcacataaacacaagccatggcctgcatctagaggatcgactggagaggcttttttttggcccaaaacatcagactagtaggaattttattatgagttatagactaaaaggggggataaacttagcttcagcagggtttaatattctcaattcaggtaagtgtaaatctctacttttcattttaaacatttttgaaatttcagtctttaaaaaaatgcttgttttttttccttccaagttttaaggtatgggtttgggagaaggcagattccaaacactttaactcttcgacctcagacttgcttatgagcctctctttggaacatttccagtgaaccgtggagcaagcctgccacatccagcagccgtaggcatgatgatcactggtgccgatggcccctccactccctgcctggcttttgaggccccgcagaaagaaaggaacagaatcctttcataaggaaggccccagaatcctttctcctgctgtagctatgctgccagtgtcctctgtagatggaaatggaacttggattttgggtgccagaactgaattcatcacagataagattagttgatataaagctgtttctgatgagcagtttttcctccagagttttcatttttgctttttctaaattatacaaaataatagacactcattacaaagggaggatcataatgctccatacctggttttgaattccacttctatcacttattagatgcagccctgggcaaaacacacgccctctctgagccttgatttttctcattgaatgggagatctaattattttacctcataatactgctgtagggattgaaggagattggtataaataatggttttctgagagtctggtgtgtatttgctttttttcagttaatatgaattgagtacctactaagagctggtcactgttctagttgatatggaaccagtcaagagcaagacagagagggtctccgctctcatggtgctcacattctaatcagaggaggcacaagaacacaagatcacttcagttattaagaaattagaacccaggggtagcatgagagtcacaggaaggacccctttacgtcggatggccagcagaaccctccctgaagagctcaatgctttgtgacccccccggtcccaagttttccaggactcctacttttaaaaacactgcccctccaagtatataggtctcaattttgagtttggaaaatctgaccacatattagttctcttgttcattaatgggcttcccatttagagagtgagttcctggggcaggagccatgtcacaggaccttttgaaggtctcagggccaatatggacgacacttctcttgaacactcacccagttgggctgacatgaaaacctcatggtgggaggtggggggtgattagtttccagccagagcccattttgctccattgctgctttgaacattctggtttctaaggagctggaagtagtttctctcagcgagaatgtggcacactgtcatctcctgattctctgcatgcagttcttcaatggcttgttgaggctgcgtggaagcccagaggtcggggcagttccaactcacacactggcatttgaacggcagagcagtaagccctacacctgacataactgcattgccttcttggggtacggtacggatttttaaatgaccatttcagcctgctgggctgggcaacggtgatccaaactgatgagtcaggaagccactgaacagaaaggcaggctgcatctgactcacctgtcatgtcgatagttgacctccttttgtttgaccttgatttgctcagtgcaattaaagatgctgttgtgagtgcacttctgctacctgatttaaataaagtctaacatgtgacagctcagggtcttaaatgcacacacgacttaggcagacggacagatgggtgagtggttagcctttcacttacctctgaattgtaattctatcacaaggaaagggcttaatttcaggaacacggagtaattatttgagactagatacaatgccaaagcagcaggccttgattccttgctacagggcagcttaatcaggaaatggcctagatggccgcctttcaagtaggtccttgcagtagcttggcaacaggcacagggtcataattggaagaatttggctgtgagtgtctgtgggtgtttacagtgcactatagggcagggcttctcttatttatagaatattttgagcaacaagcagcagaaggctgaaaagccactaaaatctcgatttatttttaacaaattccatttttctcctcatcccagaaggagaactgagttattaaaaaacagttaaaaaatacatcattgcagagcatgccatatctaattatggggttgccagcatcggcctgcagccacatttcaagggcttcgtaaatcaaccatccattcaatctgtgaacttatatgactcctgttctccatttagatgtagagcgaaattattggcaagtgggtgctgatcagaaaaagttcttccctgtctaaattaggagatgggagggataaatatagaatagtatacttatgttctcaaaaggagataaaatcattcttcattgtccattatacttagctgcacaaacatccatcccattgcactaaatagccactttagagttttcacacattgcaatggcagttctgtgccactcaaaggcgcagtattgtgatatctcgctgagcctaaacctgagtgattattgctcacgtagtcatgaagagacataaacccagtgcttttttgcctgtgttgtcgtagtgtactagagctacaaggtgggccttcagagagacactagttttaagtatatctcattgtaggtggggaagcagaggcctaggcaagggagtgacttgcctagggtcccattaagagtcatggcagaggtgggctggggcggcagtctctgtgcttctcttgacagtgccctgctgtgctcactggagctactgtattaaacagatacccttcaggggttcacagtcttagaagacacaggcacgaagatggccaaacaatcagcccatgcataagcagaccaagatatgtgtatataacagattagttgagtggtagagaaaatgagagtggggaattttggaatctatttggatagcaaagcaaaggtaacatcagttgctctctgacccacttgggaaaagcttatagagatgctatgaagttttctaatggaaaaaggtgcagtacatttgccatgtgttagtgggaaggtaagtatgatgcagtggtgggtggtaggaggcagtgaagataagtattgcaactttggaggagccctgggaatggattgttgaggtgatttcataggaatacgaaagggagcataggaccagggcacaggccagagacaggcaatcccaagttccctggagtaccctgcccttttctgggaaagcaagtgggtggcatgagtgctatgttcccaatgctctggccccacccctggtagaagaataataactgatcatggtgggttttttctgagcctctgtatctttgagtagcattctggtagccaatatcagtggactggtgccagcctgtgtggtgaacctctatctctttcttgccctgggctgcatgtcaggcacagtgcctaagccggagtgggctttggggagttacttctctttctgaggctggaaggggcagagggacgtagggaaaactttgctagggagggcaaactgtgaaagcctctggagaagtcacctgttgggataccaaaggccagcggttttagaggatgcgaagaggccgggcggggttggtctgggcctaaactaaggctgtagcggctagcatggagaggaacaagcgacggggagtgattacggatgaggaagacgtactaggatttggctacagacagacaaccaaccagagagtaaaagacagtgacatgctaggatgtgaaccacctactacagagaaggtcagaggtggggagggaggaatcagggctgtgggcagatccagcagctgggatccaaagctgaagcccttgggttattgaatccattctttctgagaagagatggttgatcttcctgcccagggagttcctagccagactggacagtggttctcaaacatggtgccaggtgttgtcagatagcaaacaattagtttgtacacagaatgtccccaaggtcacctacacatatttgtttttcctaatctttgatacctacagccacttacctgctttcgagttctcagagttgagaacatataaatttgcagtaacaagtgcacaggaaatacttggaaaatggctgatgagctttagtttggaaatttcatttttttcttggatctggattataatttcagtacaagctagcaatttttcttgttggtaaaatagtttctagttttaaaattatttctgtagttaataaagttaacactatttcatgatggaggctgccccagctctgaaccaattttcaaaaggcagattctcctctttctctctcttatttcttgctcttgaacatttcactgtgttctagcaacttttcctgtgtgtgactcggccaggagactgacttgagtaagatccaggtcaaggggttgtgtgggtgggtcggtggtaaggaggtgctgaagaacactaaaacctttgcctgagaggagtctgggaagtagcctgcgaactggaatgaccccaggcttcctgtcacggtcatagcccatggagttggcagacttgatcactctatattgtgtgcccccaggtaatggcattagtcatcgatactgtcttttttttttttttttctttgagagagagagtctcagtctgtcgcccaggctggagtgcagtggcgtgatctcagctcattgcagcctctgcctgctgggttcaagtgattctcctgcctcagtctcccaagtagctgggattacaggtacatgccaccacacccagctaatttttggatttttagtagagacggggttttgccatgttggccaggctggtctcgaactcctgacctcgggtgatctgctcacctcggcctcccaaagtgctgggattacaggcgtgatccactgcgcccggccaatactgtctttaaatcgtccagagtaagaaaatgttgatagcttgttgtcacagccctgtcattttacacattccctgaattattgtctggcaccagcaggtgttccagaaacacttttggttctttgagccattactggtcattcctgtcaccactgccaccaccagatgtggttctgagagcattaagtaaaagttttgaaggttgtgtatgttaagactggtgcaaagtccatcctccttccttcgggctgatcagccacaccctggctatcagcacttatttactcattttcaaagtgacagaatggtccagtgggcaggggcataaggggtcacttcctctaaccacccgccagtgcaggaggatcccatctgcgcagtggctgcccatgacaggcagttccctagccccagtcggacatctccgcaccaggcatcctgctcctgctttatggacatctttggctcttaaaaatcctcctttattctgaccgcagatctgccttttggcagtgtttccttagtgacctagttctgctttttgtggcaacacagaacaaaggtcggtaggcatggcacaattccagcttagaagtttgaaggtagtgctcatggacccacatcctttccctctccacccactctatctccctccacaaggtttatgttctccagtgccttcagccattctttctatggcatggcagtcagtattaatcccagtaaaggtaacatgtatccagagagtgcttgccatgggccaggcactgttctaagctccgtacgtgaattgtcttatttatgactcaaaatcaccatatgaggtgagccctgtcatcatcctcattttaccaatgaggcaactaaggaacgagggctcacatcttgtcccgagccatgcagtcaagcagcagagcagagatttggggctaggcagtgtgactccagagcccgtgctcttagttgtggtgcaagactatcttacagcctttcctgcatagtgccaaaaataagcccatggtgcactagacttgggctggccctgctttaacttattttgcaagaaatcattagacaggagccttagttgaaccattttctgtgaaaccttcagagtttgttttgacagaacagactgcagggcagaggcatctgcactgtccccaacaaatgggttcatcctgtagctctgccaggccccacagggttcataaaatggtagctttagatcaaggtgacaaatacagggctcttgatgttttttttttttttcctgaacatggtgcctgagcaataggtttcttgtttaaagtgcttagtcatggttttatggccagaaagtagaaggagagaggtacctaagaattgcaaaactgggtcatctcttcaagtgcctaatccaatattcagtctcagagaacaactccagcagttacgggggtggaaggatgtgatgaccacctaccatccaaaactgggatgtaggtgccaaatacacattctcctgaaatgatccctggtgcctctagccaggctcttccaggagtctagagaaagatggcccatgacttcatccagagtctttgcttcctgtgctctgggatgcctgggcttttctggccacagccatacactgacagggccagaagggctgagatgctgggattgaaccatctttctctttgtgagttgctttccagatagcacgcattccggtcactattttccagagatttaagcagcaaagtgagggaccctcgggcatcgactcagagacctggaggggagcagcttgaagcaatgtaaaaagcactggataaaatctggttctaccaaaaatagggctatgagagttacctcacctccctgaaaggtaatatctttatctgaaaaatggggatgataatactactaacctggaagattgacaggaggattagatgagattctgcatggacataacagtccttggcatgatgtctagcagtgaagaaacataaatatgagaataataacttccttcttcctccgctgtctattccttctcttattctagtcctgtctgctgttgggttttgtctgttgttttgggtaaatagctaacctctctgcctctttttgtctgtagaaatgctactggttctgaatgggtacttcgcgccccctataggacatcgtgggaatgtgtgtgggtgatctggatgtcacagtgacccagacgaggcttttactgggggaagaggggaaggcaggggtgctagatataatgcttggggaacaaaagattgcccaacatctgcatagctgcctaatgctcagtgcattcttgtgggcaaaaccctgcttaaaattatctgggcctagagtctgactccaattaacacataaacacaaataatttttgcatgtttttaatatatactgaattttctgcgaacacagctaccaagtatataagatttacctatttgttatgaataggtgcaagcatttcatatatctttcatgatgttttctggtgtagcggtgccccaatacttacatattgatttacatgttgtcttatttttaactatatttcctttcttctttgtattacagttagggcattatattgattatttttggaattataagtgttgtaaggttatattacttacagatttcaagagagctaaagacatatttaaaatatttttattgcatttttgacaatatgaaagagcaagagagagagagtgtgtgtgcgtgcatgcatgcacatgcttacaaattagctagaaaaatcctaagacagactttaaatgaaaagaaatggtttcatagctcctagaaatgtccttttacataaggatatgtagtagaagtccaaatttttaactgcattcattgtcagagaaatgaggtgttttgatgtttcccctgtcccttttagaaagtatatgatcctaaaagagcctgaaacagtttccattgtcatattttttcatttttgcaatctctatttttttcactcctcccacctgtgcatatatatatttaaaagcgtccccatatagacttttaaagaaagaaaagccagccaggctccccactctttactaagtttgttttgattgttttgtggcctctgcctgcacctcggcctgagtcagactgactctgggagctgtgggcaggtccaagggaaagtcaaggaggtaatgaggcttctcgtgggggcaacttgtaggccaagttgggtgggttgaagtcagtctaccagaagcttcctgcctcaagcctgggcctctacctgtcctgaaacctgagggctctccagttggaccacgagggtctgacatccaggaggatccccaggagagagcaaccgtcactagggaatatgctgcccagcactgactgtactgagcagcagtgttgtgtgcctgttgggttgatgccatggatagccaggcgttcagaactgaacacgacacctaaaaggcaaacacgaactgtgaatgtgccagtgtcagatgctgccttggtggtcatgtgtgggctggcagtaagcttttggtcccttaacactcgctgttggaaatttcccaaggctttcatctagggtagctggtgtgtgatttccctgtcctttgttactcctatctggaaactagttgaaatcttttctatgatattgatatagttacagaaaatctgaatacttactactaagttttatagttctgcttagttcaaagtaacacaacctcataagagaaagtttgaaacaggtagagaaattgaaagatgaaaatcactacccattatctcagcccacaaagatagctactatcagcattttggtttgtttcctttcagtcctttctgtgtttatgaaattttattatataaataattcatgtccaatatagaaaaagatggaaaattgagaaattataacgttaaaacaaaactgacccatctcaccagttggagatgtcttaatattctggtgaatttttttttgtcttttttctatagacacataagaagactgggaaatattgtgtatatacgtttgtaccctttttcaccaatgtatatcaatgtatatcagttcactaatgaatactaattaaatgaaaatttattaaatgtatatctatttatatctattgatatattaacagatgccagtgcatatctattaaaagagtactatgtaagagatgatgttcttaaacataaaatttaatttaggcatgaaattactttgtcaaaagatatatcagtttatattcagatatacagtgtactgacctgcccatttaccacatcttcactaatactggtattatctttaaatagaatctttgctaatatgagcagtgaaagtggcatattatctattaaattttgacggttatgagattgagcatgtttttgtatacttactggtctttgtgtttcatcttttggggtttcctattcatagtctctgcttagttttccactgaggtatttgcctttttattgatttataagagattttgttttgttttaactcagaaaaggtagtattgcttcagttgtcacagagctttggagtcagacagagctgggtttgaaccctggctttcctacttgtgagctgagggatttcaggcaatttatctgacccctctcacaattaattagttcttctttgagaactaaacgaaacaacactgactagcatgaaaaaaaagcctggtgtgtggtttctgccaatagtttttgtgttgttatttttgttgtgattcctgcactgagtattttctcagaaaaatgaccttgagctgtacgactcatgcctgttcagacccacagacacatgatactcactatatccaaagctcagaaaaatgaaactgaaatcactgaagtttgtgggttttttttttaaattcttcttgccagaaggagacaaatgaaggaaaaaaaacaagccgatttcattttcattaagaggaatttgtagagttatttctggggtcaggcaggatacattcagacgaacattttagatctagggctgggaagatcccgagactcgttatagattacatcatcttcctccaagtgcacttgccaggcaaatggacaagtgcattttagaaaggttttcagttgttcacgtttaaacagaaaggatcacctggctaacttttagttaacccattgaacagatgtgccattcccccagcccattggttattcatgtccttgttactggtttttgatatccttgccccgtaggtgggaggagggatgggtatgagcctgccctgccctctttctcctacttgggacagagctgttgcttttatttgctgagtcactgaagcaatagagcatgtgcagagtcccagcctggaggtgggcatatctgggttccagtccctgctctagcccttctcagctgtgtgatcttggacaagttgccatacctctctgagcctcagtgtcatcttctatgtgatgtcgatgcctcccccaaaaggtcgttacgaggaccaaaggagacacgtcagggcaggaaccatcctaggcacgtgtttgatgctcagtaaacgggacgtggtcagtgttcagagttgtgggggtggcaggtgactgctctgtttcacctccactcacagcaacagggcctgtggtgtcacctagacatctcataggcatcccacactgaacatgtcccaaaccagcagctcctccctggatgggtggatggtgtacagggacctcttcctccagctgtcacatggggcatgtacctggcaagtggctttgcagccctagctgcccccttggctgggggcctttgtgcagttcatggactgggagtcacccccatgtctagaccgtcaggaaacccattggcttttcctttagagcataccaagaatcaacttctcagaacatagcaagagttgactttttgtcaccctgccgtggccactcagactgactcctcttacacctcacatcccattgatcagcacagcccctggaaatatgtctagaatccagctgcttctcatcacccccacacctaatacagagggctgagtcatagcatctcttccccggactgttgtagccgtctcctaactcagcttcctgccctgcttttacacacacacacacacacacacacacatggtatcttctcaccactgcagccagacttaaaacctaagagggatcatgtcactccccattttactcagagtcaaggccaagatccttactggggtctgcaggcccccacacctggccctctgactgcacccctaccttccttagctgtctcctctccctagcatgccccaggtcgctggtcccctagcactgggcagctccctgcggccctgttcactagctgtcctctgcctggaacacatctgtcacctctcacctcctcctgtccagcctccttggggcctttctaactgcctccctcctgtggtctgcctcctccccatctctgactttcctcccgagcacttactgccatccagcacccgacataacttacttgtttcgtttgcttgccttcctcaccaggaggtgtgccagatgaggacaaggatttttatatccctacccccatctgcagcactgccatggagaacagtgcctggcacttggatgccctcagtaaatatttgttgagagactaataagtgatcgtgggccagcatgccaacagtgtcttcgttattacaaaattgtcccgaattgaaatttggctactacaagcagtttgtggtggaaatttactcaaattaccaattctttcactgaagaaattacctggcatatgtgggttctcaataaactgtgttggattgcctcaaggctttggggcagtggtagccgtctgaggcctccttgccagtcaaccaaaccctgtgctgggtgggacataagagatgcccccagcatccttagctgatgctactatgtcaccccagaatccctggggcagcccacccctcagcagcagctgtcaccctgctgggttccgcttttcctcctgtgggcttcgtctccctaaggaaatcattgtccttgctttctacatcttatctccctgagcagctccaaaattctgttattcatatcccactgacctttctcattgtcctagtccaagcttctcacaggaggagttgtctctctgttttatattaaaacaaagcggttggactcttaaaactctattcacttttcagattctttggagtcctcaatgcttcctgctatgaaatgctgcgctctggaatgccttccagacccacccccaggatacctgtagccttccctgcagccactctcctcaactccctcctcgttcccaggggtcaatgtcctggatctctccagctttaagttccttcatgtcctcttgccacccctgctctcaccatctctgagttcttgtatccccaggatttcaacctgagtttgcatctcctgacatcacttttcccagccttctcccttttcaaccagcacaaggccatccacttccatggccatagtggacgccactgagcatgctaggtgttttcttctattcaactcatgtggtctgcacaacaacccagtgcggggaatccacccctttcacagatgaggcatctctagctcctggaagtcacctaacttgcctaggacatgcagctagtaagtggcagggctgggattggaacccaagaggccccgccctgaccaccatcctgccctgcctctcctcgggcacccagaatcccctcactctattgtcaaaacccaccttgtcctgcctgtctggtacctaggggagaaccctcagcctcttcttctgctgccacttgcttcctcttctgccaggaaggtcccacgcctggccagcctgctctggagacacgcccactgcctggccttgccaggaggctctgatgctctgcaggcttcctgtcccacggatcccttcctgcctgtcctggggtcccaccaccccactttgtagttggccttgctctttattgtggtgaaaggtgcaggccattccatccaagatcctataatattccttttctctgctgttgaatgttcttcccattccccccacattctcaaagaaggcatgtggctttcttcactgcgtctcggcctgccctgagtccagcccctgctgcctggcccagcctgtcttgttggcatcccctaagccctagccagaaacacaagcacctttcaggtgctccatcctaactccaccctccctcacactggcctctctccctttgccaccagataacagcagtgcattcttttgtttcctttagaacaagatgcagatgttttccagaattttcttcaacttcaggcagtaagttttttggtgaaaggagtattactccctgagtctgtagaaccaggctctctcctcttattctgtagcaattaaagacaaagacaggcaagaaaacaatgaaaagaaacaggagccaggctgatgcaccttcatttagctggtccttgagcatgactcattgatccttcttgcttccatcagggattgcaccctgtgccctctttgaatgcaggggcatgtcaaggccaagggtcaggaagagagctttggcctcgccagcctggtccccagagtggaagtggcagggcaggaggggtgtggcagacagagcacatatcgcccccagccttgcccccagatgttgagtgctgggtgccggagtgcagaggggaacaaggcctggaccctgcctggggagaggcagcacctgggagatctttgtggcttcagatcccatgtggtcctccaggtaaagcagagcatctctggggtctaggctgggggaaaactcttgcaaaaaattcctggttctgggacagaatgcatggggtctgcgtgaggggcagaggacagtgccaggccagtgagcacgcactgggcaaaggaagtggccagagaccactcataagaaaaagtgggacatgaacctcagagcctgggctgctttcagaggagccaagagcctgggaaataagcatcttctggtgaggaaatcagcagggggaggggagggtcatacaggaggggacttttaatcctgaatggccttgcagggcatggttcccctagtgtgccccatggaacccttggctgttagatgtgaggtgataaatggtgtgtggatgcatacacttgggactcagactctgctgcccttagactttcaccctccacagggctgcgtttaaaggtccaagaagccctgcagaagaaaaacctaactattgaaccagcattccctatacgtatttggcccctgattttttcccccgaataacatcattacaatcctatgggattagtgttccatggcagaactttgggaagtgttttttgaagaatttgtaaatccctgcaccctctggactgtgcccatttcttagattgcatggaggctgtgctgtacagtggaaggagtatgggctttagatgggactggcctgtgtttaaatctgctttcccattatacaaaatctctgatcttgatcaagttacttactctctcaaacttagtttccttatctgtaagacaggggatgaaacattagctagttgtcttatgaggctgttgtgatggttaatgggaagataataatgacacttacagagggcttgttatgctccagacaccattctgagcactttatatatctcacttacttttcaccacaactgtgaggcaggtaatgttatccttatcctacaggtcaggtcaggagaccaatgacacatacaggctaaatgttgtgcccaacatcacacggctggtaaatgtgggacctaagatttgaaccctaggcactcatacatgatggggtcaggatttgaaacttgaccgtcatctcccatcagagaacatgctctgaatcagtatgttctaaagggtctagagcagtaaaagcactaattggtatcagttcccttttcagatggttcgtggatatgttagggggattgatggttcctgggactccaagtcattctgcagtcattaaaatcagccctgttgaaagagtaatctcctcgatctgcttgcccactcagatgctcccattgtgaccattttgtttgctctgctgcctcatcctgggccacttcaatttgggtggctgctcagcgttcaggtggagtcgggccactttccacagccatctcatctgtggcctgtgcctccacttccaggaccaagagtccccccaggatgcccagtgagttggtagcttgttctctttctacacctcagtgatggacttgacaaagggttaagaagacatcccttttatcattcagcaaactgagtgcctttactgagctagatgcatgccctgggggaactagcactgtttggtgacttagttagacctctgaatccctctaccaaccctcagtagctgtctgggagactgggattctgtggactctcctctatcaacgatattgggggtcttttccacaaagaccagcctggttttgattgacaaagtgcctcagatttacaaatcttaccccttgcaggatcctctcaactgatcaagccccatagctccaaatgccgtctccttgattgatgtttaatttggggatccacaagcatctagagctaccagttgaatttgggtacccaagggccacaaatgggcccccctcacaccctgacccctgacaaccagcacctttgagactgaagtaccactgcatatagtgctgtcctctgctcagggcattctccctaccagccaggccacccggcaaacccctgcaacacctcataagacctcttcgctggtctcatctccttttattaacacctcctcagcacccctccacacacacccaagcccacaagcaaatcattttttcatctgttttgctcttgtaccttacctatgctccactaatacaaaaaaagcacgccttcctcaagacacttgactgccacctgctggagagttgtcatcatggctcaacaaatatctgccacttctaaacccccaggcacctctggagtagggcagtgcattgcttgtacagctgtaaacatggcctgcctgttgaattggtcatgctgtcatgtacttattaaaacactcgtctttctaactggactgaggacatcttgaacgtaaggactgccgatttctgtcttcgtccccattgtggcttctgctaggggctagagaaatgcttattgaatgatccttgtgcaaacacctgttaccttaggttcagggcatctgctgtcattcagtgaaggtcttctaaatctgtctgttgcaaagcaaggctcgccacaggctgtcagagtaaccatggaggtcggacaggacttgcagtggggacagggccccatcagcctctcacctctgctcagaggcaccaccctctgaacagatcagagcataaacaggtcagagcaattcagcattcattccctctacagacatcagggcaggcaccatgtagtggagagtggggccaggggccatctgccatggctgtttgggctggggaaggagagcagtacttctggagcatgtgctgtgctcagggccagctccctgtaggtaggttgtgggaatgcagaggtggcaactcaagcacccctgctggggattcagagttttgtggagaagtagatcagtaagcacatggataccagatagggttgtcaaggatgttgattcactgttgtccctattttcctaagctcgccacatcatggaaggctgctacccaagtgacattcttgggcttcaccaagtgttttaacagagctccacccagctgtcacactaggggtaacacagtgggccagaaggagaggcaggccttccctggggtcccattttaaaaagggggaagtcctctgttcttttacaacacttgtttaccccaagccattcagcatagtattacttaggtcccatacagagaaccttccaacagatagctctccttgctcaggcctgtcctgatgaactccctgatattcttccaggtcttaaaagagtgagagctgagcatttccctctctgccctggctgccaggaagctcagagataacttgtttgctcagttcctgtagctttcctgacccaggacttctttttcttataaattctccttgttccttttccaggaatgcttgctttttatgttttgtttgtttatgttgcttttgtctctgtattatactttggggggtggtttttggaggcaggattggcagcagccatggtagttagaagcaccagcagtaaagctggacacacctgggtttcatccccacttgctagctgtgtcattttaagtaagataagttgcctcttcagttctcggttcctcaccttgaaaattgggataatgatcataatgaatggataggttattgtgaaaattaaacttgtttattgtaaatgcattgtttcctgttcctgctcttggatcaggcttgatctgtggctgtagaatcctagtcttaatttccttcttcctgcctgtgtctgtcagcatatgatgagttgtacaatagtagtgactaggggaccaaccatcccggtttgtctgggacggaggggtttcctgggatgcaggactttcagtgctgaatgggaaggtcccaggcaaatggatgagtcggtcaccctggtaataaacaacctcaacatctcagtggcttactgtagcaaaggtttatttcttcgttgtgctactgtccatccagggccttggctaaaggaggagcctctatcccaggaaattgacagtcatgggcacagacagaggaacacatgttaaaggtcctttagaaagttgtggctgtcacttctgccctcattcactggttggggccagtcacatggccaggcctgccaccaggctgtgcagaaccttcccactgggtgggacagctcagcctggaacactgatccactctgccaggctcacctttctcttcttttgcattttagggtgctggagcagggaccagggaaaggagagagtcacttggtctgaactgggggtcttggatgtgatcatcttcctgtagatggtcggtatgggtttcttaaggggcagggttcagcttcaccctgctctgctcagaggagcagctgtgtctcctttggacgccttctagtggttgatgccctcacctttctcagctgccaaggcctctctcgacagggcaggctgggctgtgacttctcttccaccctccttgctccttcctgtggagcccctgagatcctttccccatgctcctgggtggaatggagggtgccctctcacattcttccaaggcatcttgcgcaagtccctccatgccctgctttctctggcggtccagcatgcctccatctcacctttgggactctctagcttggaagtgggcacacctgcagcccctgactccaggaccacaggctaggctctccccaaagcatcctcatcacacaccatgtggatggccaggtcagggcggccgtcagagcccaccctcggcaaggataccctctcaaaggcacctctgttggctcaaatcccttttggaagtagcccagaaagaggctttcttttttcttatcttttgttgttttatttattgttcttgcatctaagaacaccttcttggtcagaaaacagttttccagaaataatgttaagtaagtgtcacaactggtttagctccctaacctggtctaagcatataagagaggcttttgaggctgggcgtggtggctcatgcccataatcccaatactttgggaggccgagatggagggattgcttgagtccaggagtctgggcagcatagtgagaccttgtctcttctaaaaataaaaaattagctacgtatggtggcacatgcctgtagtcccagctacttgggaggctgaggtgggaagatcacttgaggccaggagttctaggttgcagtgagctatgatcacaccactgcaccctaacctgggcaacagagtgagaccctgtctcaaaaaaaataaaaaaggctttttgatttttgttttgcagaagtaccaaaatctatattagcatttattatttttatttctataaagtaaatttgagtattgggaaaattgatcaaaatgagaaatttcatatggagtttagtacttgaaatttggatccttcatctaaatttcagggaagtcagggctgggcatggtggctcacacctgtaatctcagcattttgagaggccgagatgggcggattgcttgagcccaggactttgagaccagcctgggcaacaatgcaaagcctcctctctacaaaaaatataaaaacaagccagacatggtagtggtgcatacctgtagtcccagctacatgacaaactgaggcaggaggatagtttgagcccaggagatggagattgcagtgagccgagatcatgccattgcactccagcctgggcgacagagcaagactgtctcaaaaaataattaaataagtaagtaaatttcagggaactcagagaacgagaaaggacatgaaattgttcatttatttagcatttgttgagtaccacctggagtgaggcacgagatcaggcacaggagacgcctataaataaggccctacctgcctgaagcttatgggaggtggaggagacacgcctacaagcagagaatggtcacagggcgtgaaggagcctgggcaggagctgctgcaggagagccagggagagaggatacagctctgaaggcttctccaggaggtgtgcccacgggcacaggaaaggaaagcaggagtttatcaggtgactgggtggttgaaaggagccacacctgcaagaaacgtgggcccagcagaggcagggtggttttgggaactcttgtcttttagtctgtcggggggctttgggtagcagatgggagggttgggctgaagactaagcagtgtttcctgctgggtgggtttgaactttgtttggaagacttagggggaacagtgaagctattgcagtggtctgagcaagggggtatcccgcctctgaccacagtggagaggggatggggctggagacgacagcagactgaacagaggcagtgacaaggatctggagggaagtggctgggcccatcccttagagggctgtgtgggggctgtggggtgtgggaggaagagaggaaggaagcccagggtaggttctgggttgctaatttgggggctgggaggatagcgtgtgacctaaacagagaatcagatttagatggaattacctatattaagcctggggatttcatatctatttgctgctgctttaccagttgaggctcaagaatgagaagcacaaaatttctggtcacattatttgcatgtgcccagactggggttaacagaatcggacagtgagcgttcctgaatcagactgcaatggggaatgaatgccttgggaggctggaagcagttgtattcgcagatattcatttggagatctctatagcgatcgaggcaaagataccccaaagactgcaagaattagccagtggaatttgaaatgccaaaattttttttcagaaaggtcaggaaagccccgtttaaaatctaaattttgccatctcaaggcagtgcagggatggattaggaggatgtggggtgacccttttcttcctttcagagccagtttctgccagacacaggaatcctccacatgagtcatagggtggagaggagacccctcagtcctttcagtaaggtgggagggcagtaccgcccggtggctaccatgaaccctgtttcagaatttctttcttaacttcgtgtgtgcccaggtgcacttgagattcactgatgttttctttagaccgaggagctcgcttcagcagttagtttcaggtgttggctctgctggcattatgcttcggcttaatgttttctgaagacttgttttctgttgtttttcattgttcttgttgtctggcttcaggccactaccttcaacctagcaagagctgagtggtgccttcagcagtgaggtagcttctgaaggccaccactctcttgctgtgtgactttggctagtttctccacctctctgtgcctcagtctcttctgtaaaacggagaacacaggagtatctccctcatagagttactttcaggtttcaatgagttaatctacataaaacaataaggatagagcctgacacaaaatcacactcaacaagttttcacaattatgattacttgacccagtaggagaaataaaaaacacaactaacttccttctaaggacatgcccaagaatccagttttagtaactttgaaggcattgtttttcaccgaaaatatctcctgccagattttttcatgtgtttgcagcttagctttaacaaggagctgaaggacggccaggcagcaaggggtggtgagtgccggtagagtgtgacgagctcgcccagccttcctccctgtaattaggagtcatgaaccatctacaccatctcccttagctaataagagatttttacatttacttacctcaaagtgacctgtctgggttttcttttcttgtggcccccactgtaggtttttggaagaagctgaccgcctgaaaagaaattataaaacatgaaaatcgctttgaggtgaccaagtccagaggcccctaactcctcccaagctggatctggggtgtaagaactgtgacttcaggtaacaaagtagtatcccctccctgccccctgtgaactcatgattcttggtagcttgcatggcagttcttcctttaggaagtgtagtttcttccaggaactctgaaacttggggtattctacctcatgcggttgtttggctggtcaaaaaagggagtgggggattctggaggtacttcatgtctgctgcatggcccaagggggccagggctccataaatcaccaagaccctgagggcagggctctgtactcattcctggccctgcttctgtaaatgttaatgacaaaataacaatgtcacccacccaacagggtctttaatatgattaaataatcatgaaatacttcttgaaggataaatcagagagaatagctaggaaatttccaaaaataaagagcagtaggagagtatttgttctgctagctattaaaatgtattctaaagcacagttgtaaaaacagtatagtactgtgatggaaataactagatcagaggaacagagtagagagtccagaaataggtgataaatcaataaaggtgtatttcaagttagtggcaatgggatgcatggactagcaaatggtgttagaaaaaatctcctatccattagagggaaataagaaattcctaagcttaggtagtatatcaaaataatttccaaatagcattaaattaaaaaaatcattaaaatcttagaaaaaagaatatttatattattttgggtaagaaaagacttaaaacatgtcacttttggtcccacatacaaatatcgtaaacaaagttaaaaagcaaaagggtgggaaaagtgtttacaacatcaatgatgaacaaagaattaatattcttagtatacaaatttattcgttcattcaatatttattgagcacttagtatgtactagaaagtattctgggcactaagggcacaagcagtaaataatgttcctgttctcctggtacttagaccctgatggagaggactgccagtgactatggtagattattgtaggtcacattttgataagggctaaggacaaaacattacgtaggtggctgggctagggaggcttggcagggtttgcattatgtggatattcaagggggcttcactgatggaatgacatgtgaagaaaaagggaaagtcattgaatgtcgagctgatagcacatttgctgtttttggaatgtcgagctcataggatttgctgatggattgaatgcgggttgtgaaagaaaggagtcagggtggcttctaggtttggggcctggcaaccagaaggattgacataggaatgactgagaggcttggcttggagatagagttttggttatggatgtttcagtttaacatctctcttgtatattcaagtgaggacgtcagggaggtggtcggccataaatatctgtaattcagggtgacatctaggctggagatataaatttgggaattgttgcagtgttgatagtatttgaaagaatgacactagctagagcccctggagagtgtgtgtagatacagaagagggcccaggacatccatgggaccctcccttagagttgagggagatggagccagctaaagagagcaaaaaggagtgaccactgaaatggaaggagtcccgtgagaagggggatctcccaagccaagagacagtgagaagggcgaggtcagctctcctctggatgtgctgatgggcaaggagagaactggccattggatctagcagtgaggaggtcactggtcaacccaacaagggctgttttatgggaatgatggggagagaatctgtttggagttggattattgagaataagaggaaaaaaactggagacagagaaatgggacaatagctggaggaggatggtattcaagtaagtttatttttcccaagatgggagttacataactcttgttttcacccaagtggaaatgattcagtagcgtggggagagtggatggtgcaggattgggctggggtgagggttctgaaatggtggtctcgaggaggtgggagaggtagaatccaggcatgagctggggaagggatcctaagtaggagcatctaaggaggtggtaggtgtgcacctgcctcttttctcagttcactaagaagcagagtcctcagcggagaatggagactaaggagacgatggaagtttgaggagagagggcaaagtatgaagtccttcatagcagaatgagaaaataaatggccaggggaatgaaggattgctgggcggcatgcaggcctctaaggggtatgtttctccagccatgtcctgttacacaggtgaacacggggtaggaggccattgtggtagaaaaacaggacatgagcagacacaacgtaagacagagaaacgcctgtaaagagaaaaagcaacatcagtaatagctgaagaatacaagtaaaaacaatgaggttttctttttttctctttagactggcaagagctcttgttggggatagaaattattgtcgcttttctggagcacagtgttacagtatgttccagaatacaacgtgtgtcccgttttgacctgtcagtcccacctttagaaatttattctaagaaataattgctcaaatgcaaggaaatatatgcacaaagatgttcaccccagcagtgcttatcaaagtgaaaaaatggcagtcatctaaacaggaggcagctggttcacttatctgtcggcctaacagtgatagtgggaaacagtagctcacactcaccctcctgttttgcagatgagggaagttgggtccagagaggggtagtgacagctccagtcctactccacggagctcagaccccctggctgtaggcaggcaccctgcccaacctcttcaactgggcttggagtcagagtcccttgcaaggcacttgtcaagcccttttcaagggccggtttgcttaatgcttttaaaatacgagttctcaaaatgttttgcaaatttgtttacaatgtcttcatttcatctcatggctttccttgcaaaggatgctgacagtggggggaaaacaggccgactgcctggccgtgatagaggggaccatattttcctgattcccaagtaagacttacagtggaagaaaggatattttctgctttcttacagtgtttacaaaagtcataacaggatgtgaggactatctggctgcaacatctgtcaccccattggtcgccagagttgattgggctgatctggctggttaggcaggtgtcccattcctccctcaccactccatgtgcgtccctcccaaagctgtatgctcagaaaggatgaccatccccgatagaggaggactggtctttggtcaagggtatatgagtagctgcaatcttctgctagggacccccaaacaagctctcaaaagtcataacaggagtacaaagataataaggaacttgcatttatttgtttccttgatcatatgtttattgattagaagaaaataaaattagcagccagccgtggtggctcacacttgaaatctcagcactttgggaggctgagacgggcagatctcttgaggtccagagttcaagaccagcctggccaacatggtgaaaccccatctctactaaaaatacaaatattagccaggtgtggtggtgtatgcctttagtcccagcttcccagcgttttggatggctgaggcacgagagtcacttgaacctgggaggtggaggtggtagtgagctgagattgcaccactgcactccagcctgggtgacagagtgagactttgtctcaaaacaaataaaaaataaaaataaaataaaattagctttgtgtgtggagaaaagggaggaaaaataattagcattgtcagagaacatctgggttatttggtcccctccgtgggaactgccctgggttttcacttctagagtttctggttctggtttaatttttccacgccacagcacagggaccgagaagctgctcagcttctctaggcttttatgtcttcaccagaaaaatgagcgggtgggcttaaatttcctacaaaaactcttaaaataaatatgatgctctttccattctatcacatgcctgttctgggtccgggggtgtgagagatgcattagtgctgctgtaaaccagccccgggtctccccccccggccccccaccaccaaacccccaagcaccaacctgggttctccaccacttttgagagctcatcgaaataaacacacctttgtgcctcttgtaacaattccagatcatccaatggcagaccagagaatggacatttcttcaaccatcagtgatttcatgtccccgggccccaccgacctgctttccagctctcttggtaccagtggtgtggattgcaaccgcaaacggaaaggcagctccactgactaccagtaaggcctttggggcatgtcttcctcttgttaaacttggtgtcagttctcgggcatggaacatctagcagccagctactgtttcatcctggaaaaggggatgggaataaaaaacccaactctaggtggcgacacagttggtttttggctttaccttcccctagtttgtaagcaagaaggagccttcagcagtgctgaggcatttaacttccacttcctgtccccaaaatgttctacacccagagaaaaagaacagccttaaggccaagttctgtcttttacccctttcttcgtcttctttctttgctcctttgagcaagagggttaagtctatgggtgtcatctcagggggttcaaagagagctttgcctgagggcctctctgaggaagacagcaagtgtcaggtgcttaatgaatgtttatggaaggaatgagtggaggtcctctctgaaaacaatttaggaacattgatgttgtccttaaacattatttaaattagtatgaacttgttatattaaatagtatttttgtttatttttagacttgttgacttttcgtttgagtaagtaaattttcacacttacagtcatcccttctatatatgtacaaacacctagggaataaggcagtgtagaatattcaaaggcacattttgttttgccgaagcacctgcgtggaatcttacccaaatgtccatttaagaggttttcttttgtttaatgagggaaaatctccgaggaggtataccccctacagcagatgtcctttctgctgaagttcacaggtcgaatttggggagcacaatggctggaggtcagatgcccactaggagatgctatgattaatatgtaagttatcccagatgattaagacagccaacacccaggggctggagagtgggtatgagggctgtgagggcgttcttccatagcagtaactccccagcagaaagactgcgagatgttggccacaaaccctttgtcttgagcaagcgctaagggagccactgatgtgttctaaggcctctgtcatctggacctgtgggttccagcctggtcaccacccaagatttcccttgtggactctggtttgctaatcttctgtaattcatggagactcaattaattaagcaaccttaatccctttcactatcattttaatgtaactgaagtcatctgtgactgtcaggcagagctttttctcacctgagattatcacctggcctcaaggaacagatagaattctagacaaaagggagaggggagtttttgtccttccgtgcggcctgcgtgatctctgaactttagaactagctggggaaactctctgcctgtgaggaaccccagggcgtctaattgggaacactgttctagaatgcccatgatatgatccagtgctcctagaaacagctatttttgcccttgggattacattgtttgaagggccatgctctctcctttcctgtgggataaaggaaaaaggagagaggcccagctggcagtccatgccctcctgataaatgtatggattggagaaggcggtgagggggatttggaactccttcctctggggatttcagtctgttttcttctactgaaccacaggatgcaacgaaacttggttttctgaagtctgtgaaagggagggagatccttgctgtgaccccaggacttctgtggccctcagccccactacgcccctccatcccaattcctaaaatctaggggttcccacctacctgagaagcagaatatttggcagtagtgcctttgaaaagctgcctggggctctgctcagtactttgttggtactttaattccaccctcctcacttcgtcccttccctgccaaatagatatgtatgcacatttatctttgatgctcaatatgttttgcaaacagaataagcttcatttatccagaatgatggggggggagaatgagaggttatatagatatttcaatcctatggttaactaagcatttttataaacactacatattcccaattttcaaacaatcagaatatggtaaaatatatgttaacacacaaactcttttgagatgataacttttgtttgataacctgagaagctggtccaggttttatagtaagttcaagttaattttcatttgttttacccttattatacatcattaattgatactgtggctgttcgaactttatgattgtttggtttctggataaatgagagccttctgtcttatgataagaagctcttctgtatgtctttattaacatgcagtcacattctcttttgttttttcagagaaagcatggacacagacaaagatgaccctcatggaaggtaccatgaacctagtaatttgaacttcagcatccttatagccattttctttgcactgttacacattctgttacttggggcagcacccatgtcctcaactggagatgagcaaggaggccgtgagcctgtgggcgctcactgtgtccctccaacccccagtccccttgtgtgtctgcagagagatgacaggatcaggcagaagaaaacagcaatgtgtaactttgccattcatctccagagaattatgtttttatcttttgctttttcctccccccaggttagaatatacagaacaccaaggaaggataaaaaatgcaag

SEQ ID NO: 15449 - DNA, 80722 bp, Homo sapiens
ggtgcgacatttagggaaggcagaaagtaggtcagggacggaggtgcctgtttacccgcgccggactcaccgccgccgccgccgcgggatccgagtgcgggcgcgggcgcgggcgctcccggcgagccacggtgagtgtcaggccggcggcggccagcgacgcgatcccgcgcaccccgtcgggggccgttagcaccctcgcgggcgctgcgcccctgccgccgccccgggggcaacccggccgccgaagaaccctgcccgacgtgcccgctgccggccttaaagggcccgtgaccgctccctgcccccacccgggccgtggggaggctgcgccccttaaaggcgccgcgcccgtccgcccccatcctcctcgcgggggctgccgctgcgggctagggcaggcagaggtgctgcaggagcccttaaaggggccgggaaagtgttcgctggagtacccaccgcccttccgcgggcatcgctacctggcggggggagggggcagctagctgcctcttaaagggatagctctgcccttgggggcagtgactcggccgaagaggactcctagatgtgtccccgggagcttcggggatccccgaggggaccatgcctggtggctgcccctcaagggcgttgggcgaacggtgccgcgtctgcccttcctccccgcttcacttccctttcgggagcccgcgaggctgggtgggggcggggagggcgtctccgtcgggcttggggagtccaagtccgcccgccccttcggccctgtagccagggctggcgctgcacccgggaatccccggccggcacggggccgaccccagcctgcgaactttcgtggggcctgtgccgtccaggtcctgggcggccctcaaggatgccccgtgggtctgcgggcaggtgcgcgtcggcctggggatgtcgcccggagcccgggtgcgggccggccttggagtcccagagctccgcggagggcgcagcgagcctggctccagctccgggtttgacagatgtcagggaagaaaaggttcccgctcggctattgccgggcgttgacatcccagagagcttcccgtttgcttggaagaagacgaggaaggtagaggtgaacgtcgaccttgtggggcgcatgttagcctccccgaggggtcgcgagagccggcagcggggtgagctcaggtgcccgccggcaggagctggggagggaaggggagtgctggacaccggcgcctgctgtcaagttctcgccggccggtgagagacccgctgccgccgcgcaccccgcacctcctgacccctctcccctctccgcctcggccccttcccggtcacctagcgttgttttggcgctttggcgcttgcggtctcttccttcttccaccgctactcctcagcgaggaattattagccaagttttctcacccagcttccaaaaatcagattccgtatttgtgaacaagcttttcttgacactacccgtatacccgtatttccagcatcgtcgttttattaaacatccataaaagctgccccttagatgcattcatttcccacgacacctgcttgcttgtcatttgtccttctgacatctgctgttgttcacccctttaatctattattaaatgacaactattattttaattcttctggtctcattgatatccggatctgtgaatttgggttggtggagtttttaattaatgtacccgttgaatcatgagcttaaaataatcattgctgctcctgagcagttttgaataatatcatgctctctctgcttgcaagacttaaaaaaattcgctggtgttatatttgatttccatatcaatggaattcccaaatatttttgaaaatacaaaattcagtctttcagtccatgttttgttactcagatcattttactgataagtctttaacgcagcttatagaacatatttagaaggtttggaaatttcctggacaggatttgaaattgcctgtatcatctgaagctggttctgtagaagcattttggttttgattgtagatgcagccagtgaatgataacaataagttaaaactgtagttaaatttgttctttattcaaccctctgaagaacgaacagatctggtagaaaagcactaacctgggagttaggagctggacatcctggttctagtttaggcttgggctctcatggccgttccagtcggggcaagttattaaagatttctaggttgtgtttgcctctgatggaaagtaagacggttgaactaggtgatctcaaaggttcctctcttttgaagttctgtaagtctctaaatatttaatacatttgaattcaggttggtatttacctcctggcacctccagaatatctgagctgaagccctattttcataagaaagttaagcagatcaacagatggtgttttgaagaatccatttcaaatgatttataaaatgatgactacttacgagtttgtctgctatttgcagaagaggtttgcatgccacagggcaggaaaaggaagtggccatgttttcagatttatcccttcacaccaacaatctctgtggaatttatatgctaaaagatggagaagcaccatagaaagatttggctgtattaacaaaactgcatatgaaaaggtaaaaactagatagttaatatctctctttggtgtaagggttataatgtatctgagctttctttgtgatttcatcatcaactctcactgtggtaggaaaatcaatattaaataaacagtttcagccccgtgattacatgcagtgattttaggaagcatcatgataactaaagtaggtacttgcagggaagtaaaatatcctttctagaccttgaggtttcgttgggagctagggacacaggcatgttatccttctccacagtcttttttcattgtcaccttatcacaagactcagatttatcccaaatacccaccttgtcttttcttctccctctcatgaaataagacctgctctgactcaaccccctcagcatctcttacttcccacccaaaatgtcctgtctctatccccatcgtcccctcatctcctcccaattcagagaaagcaagtggacctctcctctgttccttttcttggcctctcaccatgggcaagtgcctgggctctggtggcagaagaatccatggctcaggtttgggctttgtggtcttggatgtgtgcttgactcctctgacctcaggtttctcctcttggtgtaatggcagtgcctgcctcgtggagtctgtgtgaggattaagggagatggtgcatgtaaaaggcctggcacacaggaagcctttcctttgtgccagctgccattccttctcacctctacccgggtcctatcactagaatattatttgtgctgtttgtccttagtctcccctgccccaccctgaaaaccttaggcttgacttaggagaggaaggatggaagaggcagagtcagacttgtggtgagcctgctgtgtaccaggcaatttacatgtgtctttacttggtaccctgggttcgtaagcctctctttcctccctcctgccagcctcccccactctcccatctcctgctccattcttagtacctgccctctggcttctctcgctaccacctttctttatatttcttctcaaagttttctccaaaactttgtcgtgagttcctggggcccatctgcccatccttattcctgagtggttgttcttggcccctttgcagtatttcttttatttttttaaacatggtctcagtcttgcctggttggagtgcagtggtgcaatcgtggctcactgcagcctcccaagtctcaggtaatcctcctgcctcagcctccagagtagctgagcctacagacacgtgccatcacacctggctcatttttgtatttttattagagatggagttttgccatgttgcccaggctggtctcaaactcctgggctcaagtgacccacctgcactggcctcccaaagtgctgggattacaggcgtgagtcactgtgctcagcccctttgaagcttttacctcacttgttttttgtcctttgaaatcctttcctctctcagcctttgggtcatgctggtttcttgattctcttcctgcacccctgtaaagataaatgtctgtcctagcttctgctattcacactgtccgtggcctggggtcccctctctagccctgacctgtctctcctgtgttctgctagcaggtccgttgtggacatgaatggcagcctgtaatctgcatttgtggtctcggagttacaggtttgcagactgcttgcaagcactgtcacattgagtcctcatgacacactggagcctacatcccttcattccccaggctgtcctaaaaggcagtttggttgggtagtttagcatacagactctggagccagatttcacatcctaagtattccctactggcttcgtgacttgtggtcaattttcttttgctctctatgccttggtgtcctcatctataaaactgggatcatagtagcccctacatcagagagttgaggtgtggattaaatgagttaaagcattggaaaaagtgtgccagtctattcatggcacattgcaaacactcagtgaatgttgctgtcagtcttgctgctcttcgttgccttgccggggtgccttggcctggtttgtagtggtctccacattcagcctgcctgtctgccagaccttgccatgtgcctggacactgtagtcaagctgaggggctgtccattccctgtaccagcccttggcccagtccatccctcaattttcacgtgtccaaatcctcctctgcttttaggacccagggccttggtcctgcagcactatttcttcattttgttttccttcctccccacacctggcagcaatgtccacattgatttttctccaattctcttaggttctgctgcattccatattgtgttgggctgtctctgaaaatatctcacctgctcgctcagcctgagcattctgggagaagtttatcttgctttttccaaaatgacaggcacagggagcctttaggccatggttgtccaatgcacattgatcttgtggaggaggagatgggatggggtgggcactcagggacggagcaggtggagggaacaggatgcacactgcatagaggtgggggtgcaacagggccataagtggacatggccgtaagtacttaggtctgcatggaaggagggtttgaattggggacttaacctcagggggagataagattggataaggtttagtcatctttgctgcaggggaacgttgagtactggcatgtaatggagagtggtttttaccttagtatgtgctgtccttttaaatagtgtaaactaattctttatctagcctggttaaagaaggggatggctggtctgcctaatttaatatttggctattgctctacccactgggttttgtgcatatactgaatgaagcattggcttgtatttattccttcaatcactgtttgaaatgtctgacctgggcaagttaattagcttctctgagtgcaaaataggaataataattattacgataatagcagctaacatttattgaacactttctatgtgccagcacatatgtgagtcacctttgcttattaactcatttaaaccccataacaactacatgaggcaggtactattatccttacttcacaaatgaggtggttttataaactgcccaaggtcactcagctgttatggcttggggcagaatttgtgctggtgaactccagagtctgccctgtaacaccctagtagattcctactgggaggaaacaccccgttatatcccttacctcactcagccgcaccatgccaggagcctagtaggctgacagcaattgggaaccagtcttattgttgacaaacatggtatgagcctcttttagagcggagctgcctgaaaccctccgcataagggatgcggacctggatgctacctgagcagcagctccaggggcttgtgaacattctcctcacatcctgttatgcatggctgtctctctggcctccccctgctttctctgcagcattgctctgacccaggccccctgtggctcagccagctcctccccaggcagctccttgtgtgagatgaaccttttaacataactcactaaccccacctcccaccctcatctagccatctgcagagctcctcactggggaggggaccttttcaaaggtccctcaccttcgtccttttctccctgaagaccaacgtccacaactttggtatatccacagtgttggggtgtgtgtgtgtgtgtgtgtgtgtgtgtgtgtgtatatatatgtgtgtgtgtatatatatatatatgtgtatatatatatatgtgtgtatatatatatatgtgtatatatatatatgtgtgtatatatatatgtgtatatatatatatatgtgtgtgtatatatatatatatatatatatatatatatatttttttttttaatgccagttgttccccaaatacatttagatagtaagggacacattgttttatgtcaagaacctgttacataaaaatgtgttatataatgttcaaatatatactgcacagtgaaattagataccactttttttttttcaaagaataaaaggataataaacacaggccgtcctgaatataattaacctcagatttgggaggcatggaaggacgtgccctgccctcagagctctcgtcctgagctctgcctttcttgagtgcgccgggagcaggatggatgggaagttggcctgaatctgccatggtgtggtactgtgagatgctctggaaattgtcttttttttttggcggggggtgggggatgccttcgcatcttgctcacttgtatctttctcacacctaagcagagggaagaagctctttttgccccctcgtacttagaccacccaggtcatcttttgaccagttttctgctctgctcaactcctttcaatcttcccagatgacaggccagctttgcctgctaagaacagccctggtgccagtggcatgcaggtggcacccctgtgtccagtcttccaggctctccagggtctggtcctgttcctcctccccagccctgcttccccgctcaacctccattcccagccacagccctgtgcccgaggttcagtcctccttgcctctccgctgtcctccctaggccacctcacttcacactctccctctggctagcggggtctttgcttaaattgttcccttgaggcctctcttccttgcccgtgcctgccttggatctcacttctctgtgaggtacctctgataacatttgttccctttgtgtgtgctctcccttttgctcttgattgccaaccattcattcgttcagaagcaggggtatgtcataatgagcaaattaccatatcatactgaatcaggatggccagttgtctcattttttaattgtttcatggttaattatcttacgctcacttcccactctccagtttcactcagttactccgtcagtgaagtttattggatgcctagcactgttgtgggcactgaggatacagcagtgaacaaaacaaggggcccgcaggaggggacagatgatgaatagtgaaacacgttcatgccttgttgtgagaagtgctaggagtgctaggatagcaagcaaatagagtaaagcagtagcgatgaggtatggtgggagggagggtaccttatctagatcacaggggagacctctctgaggaggtgacatttgaacttagcttcagaaagatctgggggaaagtatcccaggaagagagaacagcacatgtaaaggccctggggttgaaaggtgcttgatatttttgaggaaagtaaaggctagtgtgactcgattatgagctgcttgtgtacagatgttttctgcctcttttatactccctttaaccctgagcccagtgttaggaaggccttgtaaatacttacatacagaattatagcatttgtcattggttatatattataaaatagtaattttataaaataataatttatcataccctgcttagaaggcttttaataaaacattatattgcatataaacaaattaagggtttgaagggttttcttataaatgcactcctagcatgtttcaccaaatattactgttttaattgtgtttagtgcagaactttagacctcataattctgcttcatgtgcacaaccatcttaaaaacaggttttgttccaaaagtttatttgtaaggcactaggtggaaacttgggataaatttttctataagaaacaatgaagtaaatagtgatgtagtttctaggcgagccctcaaaagctatttagtggtgactgtagctgaaaacatactggttggtatcagcagtcgtcaagccttctgctggtagaccctcctctcagtagcattgtacctcatttgctgttagcaatcataggacccatttacctcagtcacttctcctactgtattttcagtctgttaaagttttatagaagggattttttacctttatacctttaagatttggttgcatgtgttataaatgagacagtagtgcagagagtggggaaaactctggactgggagctgggagaggcctgggctccagactgggcccagccactgactggctgagtaaatttgagtaagttatcctctttgaactttgatttctcaggttcttcttggctgtaaaatcctattgttttctcaccatagcagggaaacgtagatatacttcgttgttcaaacctgccctcaaatggctgcctctgatttcttcttgaagaagtatatggcactcagcaatgaggaactcaagcagttccccatgtgcagagctctgcagtgacattctcagtaggaaccttgattttgatctgctatctttcttgatgagttgaaagaaattttgtcccagaacttttggtccagataagatttctgtgttcttggccaacttatcttccatataattatgtaaattgttttttctttttaactcttagggataaaaatggtgactctggcttgcctgcttataaaatatagttataagtgcccttagggaatggaatgagtttgcaggagagagcagagctgaaagagtgtgggatcaaaaacaactttaaatgttaaatgcaaagctattttcagtaccctgctggaagaaaaaatttttttcaaggttttagaggatagaagaggtttttgctccaaagaagaaaggaacctaaggttttgcagtggtgaaaagtacctgatcctttaaccaactaccaccctcccttcccacctctgagttttgttttcgacatcatgaaccacatttgccatttgagaggtttgatatttaagtgacgttagtggcagagctcaactggcagtgttcaaatgacttaggtgcagagtgctgtgctgcaaacttccccagtgcattctagggtaagggatgcctcatagagagtgacagagcacttttagctctgcctctatttggtcagttgtgaatggtgtgttcctttttttccttacttgaaggcatagcgaggagttggtacaagaagttattgcttcatggacttcactttggagctagagggtggcattagacctagcctgccttcttggatgctggaataccagtggcaatgtcatctcttgttctctgctatacccctagcaatgaaaacagtgtctgtacagaaaagtctctcaataaatacttgtttattccttcaaaaagtgaattcagctttggataaatttttaatttcctccactctctagcagtataggcttatgaggttggtcttgcaaggtactttggagtttaggttgccatttctttttgacatctgtgtttttcttattcttcaggttggtcaggtatcagtgtcttttactgatgatggttgtccctgccctgctgatgttcatcttctgttatctttaattggctccaaactgcagcaaatctatagctgagccacattaactaaaagaaaacttgttgcatatttatttaggcatagtactacacatgtatttattcagtcaacaaatatctgtgagtctatatgccaagaatgttactagacccaaaggaagagcagaaattgttgttgtgaccaaggagcctgcagtttgattgccttgtggaacatctttatgagcattgtagaagggaggaggcttcatagaactggtcaggttttcacctttaaggatggtaggatttcgattcacagacaaggtgaggacaggtatttccaggaagtggctgagcggaaacagcataattaaaaacacagaagtaggaatggaccagtttgcattcatggacacagacttgtctaaaatggaaggttcttaaataatggtgggaatttaagtatggaagatcactgaaggcccaaacctgaagccattttagacacctagtgacttgcctaaagtgacagctgataagtggtagatccaggcttaaaataaggccatgggagctctcgaccactggcactggacttggctgtttcccagcagtctctagatgcaggatttgggtttgattggggattttcttttttctttctttctttctttctttttttttcttttttttttttttgtgatggacactgagattgggggttttagagtcatgagctggaaataggcaaggctctatttagcccactctttcattttgcagttggggaaactcagtgaggttaagtggcaagtcggagtttacctagtgagtcagagactgctaggcaatggataaccactggatttgttttattatgattatgattttagtgacatgaaatatttctctctaaagcatcagtccagtgttagtgttccagttggattggagcaatgaaggactaaatgcagcagagacctgacaggaggctgctagatgaatccaggaaggagagagagaagccagaactgagaattaattgtcaattatgttaatcagcatggtgttatcagtcaccctttagatttctagagtgcggtgaacatctgcctgtgtgagtggctttcaagtgtgtgaatctgcactgtactgtgaccaagataccttaatgaattctccagacagaaagtgccactatggaagtcgaatgttttaaaacaaatgcccacattttctggaaagagcaccagattaggagtcagatgacctgcattttaggctgcttctgctgcttagtcaccatatagccaaagcaaatcacttaatgtctcaaactgagcctgactccttatctgtggaacaggtataacaattcctgttgagcccttttcagtgtatgtgtgatgcttgtgtgagctaaggaaagaataggcattttgaagctgtaaagttgctttctggctgcagggagcagcagtgcagttttaatagtgaagatgtactggcccttacaggaatagcctaggagaaccagaagaaagttcccctacctccagggcatgtttagggaatctggcgctgtccaccaggtgggtgctgatgtgtactactttattggatagggccatgttttttgtttatttgtttgtttttattatactttaagttctagggtacatgtgcacaacacacaggtttgttacataggtatacatgtgccatgttggtttgctgcacccattaactcatcatttacattaggtatatctcctaatgctatccctctcccagccccccagcccctgacaggccccggagtgtgatgttccccgccccgtgtccaagtgttctcattgttcagttcccacctataagtgagaacatgcggtgtttggttttctgtccttgtgatagtttgctcagaatgatggtttctagcttcatccatgtccctgcaaagaacatgaactcatccttttttatggctgcatagtattccatggtacatgtgtgccacattttcttaatccagtctgtcattgatggacatttgggttggttccaagtctttgctattgtgaatagtgccacaataaacatacatatgcatgtgtctttatagtagcatgatttataatcctttgggtatatacccagtaatgggatcactgggtcaaatgatatttctagttctagatccttgaggaatctccacactgtattccacaatgattgaactagtttacactcccaccaacagtgtaaaagcattcctatttctccacatcctctccagcatctgttgtttcctgactttttaatgatcaccattctaactggtgtgagatggtatctcattttggttttgatttgcatttctctgatgaccagtgatgatgagcatttttttcatgtgtctgttggctgcataaatgtcttcttttgagaaatgtctgttcatatcctttgggatagggccatgttttaaagatgattacatttcacccccgtaagcctgggcatggacggaaaagttaggcatggatagccatgtgaatctattatctgtagacacctttcaggatagtgacaggcagctgtgaaccagaaaaacaagtgtcagaatctagccagctggccagtctggcattcttggatgtttcatctgtcctggggcattaggcagcgatccagaggaaccttgattagcctgggggattcatggctgagccagcatgctgtccaggtaatacctggctgcaaagcctgactggagatctgccaaatctaaatttctgccagcattacaagtgtatatattattattattattattattattattattattaatagcagtatctaaccttgactacctaccatatgccagcaactgtgctaagtgcttacatactttttctcattcagtcttcacagtattcatataaggtgggtaatgtcagttctgttttctagttagagagactgaaactcagacgagcttcagctgatacatactaagtgtaaaagccatgattcaaactcagaacagtctcagtccagtgcccagctgcataactgctatgttcttctttctctcttttcctggtacctgaaaatacttcttgtctctggttttgaggtttctgactgtgttattggttgatggatgggttgccacacagaggctcagctcagcacagctcttttttcttcatagcttatgacggacatcctcctggatactctggctggtgagcaaatgggtgccagtggtgaatgcagcagaaagactaactcttgccagctagtgcatgtgggtgaattttaaagacaacaaaagaaatttctgtaggtcagtttttcaaagagtaactggtagcttgtagtctacttaaaggccaagtttgatgttcatcaaagtcaccctgtaaaaacctttccaaatgctgtgattctgataacaataccatagaacattcctgtgtaattgacaagtagtttttacatacaatgtcttgtttagtcatcatcacaaccctatgagggtttgcaactacatatagttgcaaagaagactgggagatatctttagttgggaagccatgagtctagcaaaatctctgtttttaagggtggcgaggggagtgaatgaggggagctagcaatctgatgtgttgtggtggtgatggaagggataagtagagtttgaagctgttgtcagtagagttgggaggatgcctcctagtctatgacatctcctagtgttatgacatctcctcttgtggactgggaaattgcttagagtttaagcaactgtccagggttctacaactggtcagcggcagaggcagcacttaagtattgcttttgtgacttaattcactctctattcaagtttcatctttgctttctctattgaagttcttaaatattctgattcactgtatttagaagtcggcaggaattattaaagtgaacttctttgtggtatacactgttactgaatcagagtaaataaaaggtcacatgattggttgttgtgttaggtttaattgacgtgtactctgtatgatacagaatactcacatatcttttgtgggatatcattggtccaacagctttaaaaatcccaaggctttaatagatgataaaacacggagtttgtgtaatttcttgaaaaagttggccatcgagttcttggtcaggaacacaagcttcaattgtaacagtttccatggagacattagccttggcttgcatcatttcagctttcagtgcctttcctaggaatggagtgaactgctaaaagaagagctctggttgtggttgtcacttagagctctctcccctactgtttctgctggaggctgatttgcttttctgggtcttctcagttttttctgtgacctaagcataaattgtctttgagatcctggtaatctcatattttaaaagttttccacaaaagacaactgaatggaacacttttttttttcacccctttaaagtatttaattggccatcaacggtggctcacgcctgtaatcccagcactttgggaggtcgaggcaggcagatcacgaggtcaggagatcgagaccatcctgctagcacggtgaaaccccgtctctactaaaaatacaaaaaaaaaattacctgggcgtagtggcgggcgcctgtaatcccagctcctcgggaggctgaggcaggagaatggcgtgaacctggggggcggagcttgcagtgagccgagatcgcgccactgcactccagcctgggcgacagagcgagactccatctcaaaaaaaaaaaaataaaataaaatgaaaaataaagtatttaattggtggcaaggggctttgctagaagaatggacacctggtctcactcaagcttcttgtattagttgggataccaggtgagtccctctgttaaagagacccacaggcacaatggctgaaaccaggtagaagttttctctctcatgtactagtccctagtagatagtggtccaggcctagtatttttaacacatggcttccatttgatggttgaaggtaaaaacttaccatctcccagaggaaacacccaagggggcacacatccagtcatttttaagggaaagacccggaagcagcacattctctttttccagtagccggaatttgcaactacatatagttgcaaagaagactgggagatatctttagttgggaagcaatgagtctagcaaaatctctgtttttaagggtggcaaggggactgaatgaggaaagctagcggtctgctgtgttgtggtggcgatggaagggataagtagagtttgaagctgttgtcagtagagttgggaagatgcctgagtcaagggtgagaatctaagcaggcacacagaaaccagggcatgtgcagccatctagaggtcagggaagctcttggctctgaaactaagcagtggggggcacccaggcatggaagggaatgtgaattactcagaagacattaggttgtcagtaaaaggaaattcaccagtgtgactgaatcagtagaaagagcacttagactaggagtcagaagacctaggtttgagtccagcccttttacttcataacctggggcaaaaaactcccataaatatttgctttattatttagataatggcaataacagtgatggcctttcctgcctcccaggcttagtgtgagaccaaagggtgaggaagtactgtgtagactgcagccccatggagatgtgcacagtgtctgcccagcccagggcctgccatgggtgtatttgttgaatgaagtgtgaactattaaaagagttgggaaaaatgcattatactaaggagatcttaatcctggacagtcttctctaccaggcagaaaggttctgctctccactggtcaaggccttgggcctatgtgtaaaactgggtacctaacaaacacatgggcagacgcctgcagctccttactgggtagcacatgacacatagtatgtccttggcaaggccatttgctcattcctctgtgtaggtaaccaagtgcaacagaagtggaggtatagcccatgaatgtgaactaatcatttttaaatgatttggtccatgggcaggttagaagatgaaaccttcccaaggccaccaaaacttgatttcttgcttgaaaatgataagatgcagttataaaatgcttctgttgatttggaaaaaatgtgtgacttgttcaaaacaatatgtattaatagaaaatgtaacataaataagaggatacaaaaaagagcttaatgtttctatcttctgggcctagcaatagtgatttttttttccttttggtaggaaaatgggggctcagtggaataatcagttttatttctttttcttttaacttcatgaagggtttgtattgttcattttgttatttaatttgttcatttgctaaggaaagaacttctttcttggaactctgcggagtgtttttagatggactttactggaaaaaaacaggaattgaaattatattcacagtgcgctctaaactcttttaaaatctcatgcatggatggaggaaaatgcactgaaatatcaatagtggttctcacctcatggaattagaggtgacttttattctcatctccttctctgtggtttcctatttttcaacgagtgtgaattacttttatcatcatgaaagaccagttaaaaattaatctcacaaattaacactctcaagccaaaccacgaatttttgtttttcacaacctggcttggactataaactgtcacactatctcagacctatgcagattcttttctgagtgaggcattgaggaacttgttataaagatgatgctttccttctggaaatcaagaaacaagccaagggcttataatgtgttaggaaagatgtcctgagtaactttcctcctggaatctgactagcctttattacagctacttaaggaaatgagttttgtgggttccctgttcactgtgtcaccatttttttctttatcctgtactcatatgtacctcagggtccccagattttcttatcctgggattgcatgaccttgtccttggctctctcgggcccctgccgtttccagtgttctctgttcatgttcacaatattgttgatttggctgtggcttcttcccgcagtgttcttgtagactgaagagagcacattgctgcccttgtccctgtgcagcttcctcttcctctttatcattgctcaggtgagtggcctgagcagtgctcctgggatgaggtgaagagaagcagtcaagactgcagggaagggctaggggtgctgagctggccgagcttccctgggggaaggcactgggccatctgtccagcagcagttggcccacagctggcagggcaggctcaggagtggctcttgaagatggctgcttggtgtttgaagacagttcccagggcatgcattcatttgttgagcaccttcaatctggcagcctgtgttctagatgctggctgatgaccaaggctgacatggctttggctgtcatgggagtttcattctagtggtagagggagagagagagagacgatgtggtagagggagagagagagagacgattagcaggggaatcaatgaagaagataattacaggttgtaagaacagccccagaggaggttacaggtgcctgtttgtcgagaagtgggagggccagagttgggataggaacctatgtccctgattgcaaggtctggctccttctgtgtcctctgggctttctggtgggaagggaggaggtggaggagaccccttgcgagggccgagcttctcccattcagccagtctggaccagcctggggccttcagatggagatagcaaaagttgagggcataagctagggactggctctcttggtcactccagttgcccatctctgtacttccccaggtgaatagccatgttttttaaagaacacggagcaaatttgcatacaagagtccagatttatgcatgctgcagctttgtctgaaggcaagcttatattttctctcctattattttcaacttttaatgagttaccagcatctcagtgcccctccagcaaggatattgggctggtgttttcagggaacaattttaattaactcctccttgcctccctctcacccagccacccccagtccccttcctggtggctcagagtctggctttggcatgcaataagaatatttttgccttggtgttagcctttctgaaactcttgattaccagtgctcacaggacctttctgcagcactgtctgcttggctgtggactacccagaggagcttggtgtcaggcaaacttaggcgatttccctgagcatccttgttgagtctgcctttgtacttctttgtcaggtctagaggcttggccgtttgtcctgctcttttgtcccctccttctgggaaccctcaggaccctcactccatggagactcagcacccttcctcctgcaaacatcagtgatggggctttcccagccctttcccctatcttccttttcaaagaacaaagcctttgaagcttgtctcatacctgtctgatgcagtatgggaatctgtaagttctttgcctcctgaaggggtctggggaatcacttggctttcagagctttcctcgctcctctcccacccacagaccgattttaaccagagagtaagtcattcatgctgtgcttgaatactccttccagtcccactaggaagactctttgttactaaattctgttttcttgggaaaggggagcttattactatctcattttgttggttgttattaccctcctttaaaaatgtatctacatacacgcatgtgtgtacctacatgtttctatatttcccttgtgaatgtggccctcagagggcctggatttaaaccctgggagtggtagtgaccctttgggaaatgtatactttttgttccaaatcttctctggcttaaatttgtgaagttttgtttcagccttggtttcatagtttttcccagtttccaagataagtttggggctcactgtaatcagcatgtaaaggagaatatggccatcagctctgccccttaaattcatagtcagactcagtggggaagccgttcctgtcccatcttgcgctcgtggctctgtcagcctcaggcagctcctgcaccgtcctcctgcctgtgacagtgttgtcaggagttcttggtacctgggtgctgcttggcctcagggtgccagggctcccatgtggagtgtgcttgctgcagtctctacagcccaggtgtctctgcagccctcctcttacatagccacagcgtggtaaagtacatccagtttgcgctgtagtaagcaattttattaaaaaaataagtttaatatgtaagtggtcccttagttcgtttgaatggctcccctctctggctttggtttgaatgagctacacctggctggagccctgctgctcccctcagcatggagtcacctccctgtgctatggaggaaaggaagaagttattcttaccttggttttgagacaagacaagcctggagaaggctgtagggatgaaggagttgcccatttgtccagcatcagttgagagtctactgtgtgcctggcatcataggaagcctctggagtgctgtgagcaagaaaataatacttgatttatgtttttaagggttcttctcgctgcctgtgggccggcagtgaggaggacaagagcgcagcagggagatgggttaggaggcagttgctccggtgcagggagcagtgccagcttgagggctgctggtgggtattggtgtgagggtgggcaggctgcagataggccttcgcccattgcccttgccatgtgtccccatgtgtccccaggggaggctctgggcatcccaaactgtgagcctgccctttcccaagtgtgctaggccctgccaagctcctgcttcatggcctatgctgttcattccatctggaatgctctcttccccctgctttccatcctagctgagtgacattgggcaagtgaccagatctctcttgagcctcaatctcttattctgtgaaagagtgctcatggaacctactgcatgggaccatgaggataagactatagttgagtgtggtgattgcagtagcctccaaagctgtctcctgcttccaatttcatcccgctactgtgcattctttacacagcgatcctgtgaccgagggtcagatcagggcaggcctctgctcagaatcctctccacagtagcttcctgtcccagtcagaggaaaagccaaatcttagcatggccctcagagcttcctggtacttctgacctcatctcccaccccaaggccatggtgtatggttgatcatgctgggttctgcacagctcattgtggtgcatgtaagtggcactcacttcctccccaacttatgcattgcacaacttgtgcagctgtacatgctgctcctacctgcgcctctctagctccactccagccacagtggaatccgtgttgttcttcaaacacaccaggcatgcttcctgtttaagctctccctactgcctgctcccttggcctggaccattcttcccccagaggtgtgtatggctagttagctcaccttcttcaggtcttttttcaaatgtcaccctatttaaaattgttccatctgggtcactgccccccaaatgttccctttttcccttgctctttatttttcctcctagcacttatcaccatctaatatattatacgttttccttatttatttggtttatttttatttatttatttatttctcaacagaacataagcttgatgcaggcaggcaccagtgttaattttgttcactgctgtatccccagtgcctggattggtgcctggcagtaggggttcagtgatgcatgagtgaatgagtttggatgcacaaaggtaaagtattgggtacggtgcttagcacactggaagcacctaatacatggatgccagtattttcattgtctctgttaactctccaggccctggctcaaatgtggctttctctgagcctttctgcagtcccttctcaggctgaattaagtcaccaccacctgtgctctgtgttccccttcattttgccttctctgtctgctcggcatttatcacactgcagtagtgggcttatctcacactttttcctgttccaattgcaattcctgtggggcaaagactggcctgttcagatttgtatctcaggcggtctgcgcccccagctggcatgtggtaggagcttaggaagtgcttgctgctggtggctgtgggaggtggaaagagctttttaatccatcaggacccttacaagggggactggctccagcatcactgccgtctgatgtttgtgccccctcccaaggggtgtcaagggagagcttggcaaccacttaaatgagagtctccagtggtatatttagagcaaattttggagagaggagtctcttggataacagcatctgggtgacctgattgtttcacatataagagtttggctttttggctactcaggctttgagaggttggggtcattcaagggaggcagtgtaatacccatgtgttcagaggtggctgggacgagagggtgcaggagaaaaggcttgagctggcctgtaagggatctgagttggtgaagggagcacagcttctgggggtggcagaaggaataggagagctgcccctgccatacctggggaggggtggttaggtaggtgccttgggaggcatggttaggtaggtggtttggggccatggggggaaaactgtaatgccagggcaattactttggcctcttgtatttggcaggaggggtccacactggggattgtggtggcgtgagggagagggccctgggagagaagctctagagtcattttcttttccagaggtggagttgtcttggggacctgcacgtggcacgcagagcccatgctctcaggcacctttggggtggcagagtttcaactgaaccaacagaggacaaggggctgagaagtcggaggccttggctgaggtgcccagtttcttggttcactttctttacctgccaggttagcagcaagtgagcaaatccctcctgcctttgctcagcattagcctcagagacttgaggagagctgggccttcaggtgggagcctggtggccacactggagaggaccaagcttgacattgagtgtccgaggggctgaaagttgttcgctcatccagagatggattcgttctgcaaacatagggaaagttcccttcccattcctcatggctgtttgaggatggaattcctgcattgaccttggcctttccctgatcttggcctttcccctgcactatggcctctctactcttaacattacgccccagcccttttccatgggcccctcgtcttccctatggccatctaaaatggccgtataatattctatcaagggaatgttttcagtaagccatgagcttgatatggagcatttagattgcttctaatttttgctctttcagctaatgctacattaagccatctctgtgtattatggaatcatttcattagttggcatttgtctagctaatggcaatggcccaagatttaatagcgaatcagaatttcttttttcaagaagaatgtcatgaggatatataaaaaatttacttaaaatgctaggaatcatctatgttggggttttcatgaatgaggaagcagggaaacagtaacatgaaattagttgtaagtgaaagactgtgtgtataaaagtaactcgtgacttgtttgttcctgagtgtggaggggagccaataaatccttggaaggagcaatctacctgtgaaaatcaaagagatctgtattcctgcatctgatgaaaacataacaaacagtgatctcttcttaaggatatttttagaaatgccctaaaacaagaaaaagtaaataagatttccgagaaaaaacatgtctccttaattccaaatgagcctctctggaaatgccatttagtagtggaagcaggttgtagacttgctgaaaggatttggttctttggttattaggaaataactagaatgaaattgacaaacagacaacactgacttggtccccagtactgctttgagcctgaggtatgtgttggctttggaatgatggggaaggcttcctctgacttgctgatttgttgtagttgttgttgttattgttttgagatggagtctcgttctgtcaccaggctggagtgcagtggcgtgatcttggctcactgcaacttctgactacctgattcaagcgattctcctacctctgcctcccgagaggtgggattataggcacgtgccaccacacccagttaatttttgtattttcagtagaaatggggtttcaccatgttggccaggatggtctcaatctcctgacctcatgatctacctgcctcggcctcccaaagtgttgggattacaggcatgagccactgcgcctggtctgttgttgtttttattgtttcagtctctggtggcttattatgtagacttgggctgtaagctttgcatttcagtttaaaccagcaaatgtttacactatataaggttgcaagggctaaaactttagggagaaagaacccagtgcacccctgtttctgagaagctcatgaccagggagtgggaaggataaagcaatgttaaaaccaatggttattcaagggagattaagaagggggccctgggagagtcagctccatccttttagagaagggaggagttctacctcactgctgggcagggtggggctaaggggcaggagaatcaagaaaggttttatggaactagttgcatttgtcaacatcttgaaggacaggctgaaatggaggctggacattctcagcaaaggtaaaaggcctgagtagaggagatggagatggaaggacatggggcaatgtttgggatttggctgaagaattgcatgcctgtagtaatggtcatagtagcactttatggagagtatcaggtgccaggcatggttctaagagctttatatgtagtaactcacttaatccatgcaatgaaccaaatgaggtactgttattatccccattttacagatgaggaagctaagataaatagcaaggaattaattgcccaggatcacactgctgtggagccaagatcagaccaagttcatctggctccaggctctgtgcttacgaccatgaagctgtcctgtctctgatttggggaaagaacagtcactagaatcagacagatggacagatgccgtatgtttagaggctgggattatcaacattcaggaatgcagaggtggaaaagagaccagagatggagatgaggggcattggagaggtggggatgggaggagggtttggtgagagccgtgaagggccacaggaagacagagctttaaggagaagtttgtcagtgaggcccagagctgcagacaatcccaggaggtgagacctgaggaataggtctgggctgaggagaaagctgtgagggcctcgggagaggggcagcagggtgacccaggctggagctgctgtggtgtcctatcctggctgcagagtgctgcgtgttcctgggggatcatagctgttgatgagtatcactgtccctgtcctcttatctgtagaaagaggtgagtgtgacagagggggcaggtgagagctggcactgctaatttggcaaacctggtgacttttctgcagcctaatgatttttgaaagctgtttgctatgctgaggcacaagtgtgacttcccccatctaaatgctgtgcaatcgctattttccctggaaaattgggcccatgtgggctctgtgtgtggtttatttgagttccatttttatagccttattaccttgtccccatgatgcaagaggcctctctcttttcttgagctttgctgtgaaaattgtttcttaaaaggcacaaagtgatctctcgtcatctgggtggtgctcgctccacaagcagcacttttctcagactccgcacacacttgtcatcgcccctgcccccacttggcaggttcctctgattgttggcaatttactgagaacttttaggcagctcttgaagctcactacctatgtgtttgtcttgatttcttccggaagagtttgtgcatgtaaatatccattcagcctctttctctccgagatgttgccctgccactgaccgtgcttggggctgaaacccagtcttgtcctctggcctcgagctgattaacaatagcagtcatcatgtacagagcctgagtggttatcaggcactaagctaagggatttacgttcgtgatcttaattattcccaatttctttgaggtaggtactattacttcccccattttacagataaagaaaatgagccttcaagggatagagtaagttaccccaggttacatagctagtacatggcagagctgggcttaagcgggcctttctaaccttagactccatgtgctccattcattcattcattggcaacaaatgattgtctgcaacaggctgagaactgttgtagacccagggtgtacagcaaagggaaaaaaggccaaactcccaccttcagcttatattctaacttggggaggtagagatcatataataaatgacatatacattatgctatgtggtaatgagaactatggagaaaaatgaagcaaggaggtcagatgggaagtgggaggattttgaggagtggtcaaagaaggcctcattgagagtacaacaaattgttaggttaacaaacaaacccccaaatctcagtgtagcaacacaacaaaactgcacttctctgcagaaaaaattccaaagtggctgctcctggttagcaggcagccttccttgcagtcatccagggacctagactccttttatcctgtgtctctgccttcttcaagggccttggtttcctttgcattcaaatgctggagcgtgaggaagaagaagagagggtagtttgtgaggaaggctttatggaccagtctggaggaagcatacctccctcccacccactggccagaattcagtcacatgttcactcctgactgcaagggaggctgggaaaggaagtctggccatgtgccgcctaaaaaaaggaagtgggttctggtgaactcatggcatggtgtgttgcagcgagtgaggtgaagaagtgagctatgtgtttagctggaggaagagcattttacacaaaaggagcagcaagacaaaggctgctggaatggagtggggaggagagaaggagagtgggagaagatgagggcatggagttgtgggggccaggccactggggtcactgtaaggatttggttgccttgggaatgacaagcagagccagaacatagagttttgaaggaggaacgacaggatctgaggcacgtctcacagggctcactctggctgctgtgttgagagtggactgagggagcaagggggatgcaggggagaagcgggcgtttgcgggtgttatccaggtatgtgaccagaagggctggccctgagccggggtggtagaggtggggagaagccgttagatttgagatcagttctgaaggtgggccagcaacttttgctgtgggattggtagtggggcatgagagaaagaaaggagtcaagattattctgaggttttggctttgcctaatgagtattagtctcacttcctaccctcagaagcaagaggggaaattttttggaaaaggatatctgagtgttctctgggccctgacctgtcctccataacctctttcactctgtgatacttttttcagcacagatgggcaattcccattcatgactaggctttcagacatggagagggcacttggagtccctcctggcacacagcagaggtgaggcagcactgggaattgtctcactttggggtctttgggtcaaaccttgggacccctttagagtgacatggcagggactgagtgtgccctctaggggggtgagatatgcctactggagtccacttccaatgcctgccatctgcaaacactggtgaggccctggctgaagggtaacaacccacaaaagtgcacaaaaggaggaagttctggaatgcgagttgatgctgccagcggtccggttggctccttgccttctgttctttgtgtgttgacatcagacctctctactgcagacaggctgccctacctgagggggcacagctgccagcagcctcagtttacaatcctagcaaaggaggagagcctttctctacatctaggtatcagtttaagggaaaagcctctgtgtttgagagtgggagcggaaactgtttcccacgtacttccttggcagtcatgacctgtcaaggctgaaactggagatgggactttttaatagaccatgatctcactgggagcatatggggaagaaagttcatcttagagatggcagggcgtgagctgtgaaaacagatagtgcacacctactagatgctgggcccccgctaggtattttatttcactggagagcaaaacaatatatcatccctgccctcatggcacagatggcctcaagtggctaaaccatagaatggctagctgagagaaatgatagttctttctttttttctttactgattgcgaatggggttgtatttttaattttggtatccatgtgttcattgctagtatatagaaatccaattgatttttttgtttttatgttgtatcttgcatgtttgctaaactcactaattagtcatagaaatttttttttgtttattccccaggattttctgcatagacaattgtatcacttgcaaatagggattgtttcatttcatcttttccaatctgtatgttttttatttctttttgttgcctgattgtgtggccaggacttctagtcctatgttgaacaagagtgctgggagtgcacatccttgccttgttcctagtcttggggaaagcatcagcctgtcaccattaagtgtaaggtcagctgtggatttgttgtagatgccacttgcactttgctggcatggttgtgagtaggactgtgggttttgtgtgtttgtgtgtgtgtgtgatgtttggctgaaatacagtggttattatctacaagttttctgtcttgaaacagggagatttgttggggcattttctctttgtgctccttggcatttctgagttgctggtctcctcagttccaagtctgagctatatgcagaaaaggaaatgcaggaagctcaccactgtgttgttccttggatcctgaggtcccagctggtctgccttcttcagactgccatttggagtcttcttatagtcatctagcatagaatgcccaggggttttcattgttcttagcaggtggaatcagggaaagtgcacctgctccatcctgctgggagtggaaatggttgggggaaattggagcgtataggtcggggctagtttagatgcaagggctccgttctgtaggtgcaggagggccgtggaggctcagccctgacagcagtgggagggggatgggaagagggggagtggagagagcctaggtggctgctgcctgtgtccaggcaggaggtcctgaagtcctgaggtcctggccgtgacagtagaactgcagcagaaagaaggacaggaagttccatgaggacagtgaggaagtgcaaggagaccaggttggtctgaggtttctagctagagcagctagctggttctgagataacagagacagagggaggggtctaagcgtggcagaggggtgtattctaggcattgtagagcagatctggaagactggacttactgtgcttcccctcaggggaggcttcacagaggaagtctggctgctggggaaaaatccagggagtgtgcattctgggcagaggaattctggctgctgggtaaaaatccagggagtgtgcattctgggcagaggaaacaacgtgggaaaaggcacagatacagaaaacggcgtgatgggcctgttgggactccagctagctgaggcataagtgggtagttactggttccatgactgggaaggatgctgtaggagtgcacaaaaggaagaagttctggaatgcgagttgatgctgccagcggtccagttggctccttgccttctgttctttgtgtgttggcatcagacctctctactgcagacaggctgccctgcctgagggggcacagccaccagcagcctcagttttacaatcccagcgaagggggagagcctttctctacatctaggtatcagtttaagggaaaggctctgattggcccaggttggtgatgtgcctgcctttggacccgtcactgttgcaagggagtggagagttctaatctaggccggatcgtctgcccacccctgttggggcaaccagagtcttttaaaggagaaggcagacaaaatgcatctggggaagataaaaaagactgtttaccatggcttactgtaatagattttgaagaatatgtagtctggcagtgcaggaactcttcatggagattaaagcaggggacttgatcaaagttaggttttattaaaatcattctggacactgtatggggttgtgattggaagtgaatgacaagaggtgtcaaggcgggttcgtaggccactgctttagctccaaggagcactgatgaggcctaagctagcttagaatcctgacttactttgtttgcacttcacctgtagcgacagcatcagtgaggtggagaacagggatagagtcctagagatgttagacaggcaagacttggtggccagatggaggcaaggagaagggggtcttatggaggattccccactgccaccaagggcataaagaatgagtctctggagggctagccttatctttggaaacactattaagtgttggcagactcgatgtaccttattgcttcttcagaagtgttagtgttgttggcttcttgtggtatccagctggaaaaggaagctgattgattgcatttccctccctttaaagagcttccttttttgagaaatcagaagataggtgatacagtcaggactgccagtggagaaataggttggggagagggagacactggcttggagactctcctgcccccagcctgccccgaggcccgcgagtctgctttaggcacattcgtccttttggcatcatccttgctgggaaggcttttaagggatttaaggaaagaaatgacacaatctgattcatattgcaccagatttcctcctctgttcagaatagactatgggtggaggtagagtgactccaagagtagcagcagggaagcagggcaccaattaggagactgtcgcagcaatctaggatggggacggtggaggtggtgagaaatggtcacattctgaatacattttgaaggtaagaaccagttttagtgaggattagatgcggagtgggagagaaaggagatgaaaatgactccaaatttttggtctgggcagctggaagaacattgtcttaaactgaggcggacacaacgctgggaggagcacgtcaggggtctgtgttggacatgtttaagtttgagacacccaccatgtcttacacaaagctcccatctacttcttacttgacacaaacagttggatgtactggtcaggagttcagagcaggggtccaggcttggagagaaatctgagcattgttagcatggaggtgatatgtgtgaatccaggagactagttgagatcaccaagggagtgacagagaagagatgaaaacaaggactgaacacgctgacataagaggtggggagatgagggagaataagcaaagataagccagtgaggtgggcggaaaaccaggagagctagagggcatgattaactggtgtcaaagctgcaaggtaaggactgagactttaccaatggatgtagcaaaatgcaagacaggccaaatgcatatgctgttggacctaagcttaactttgcaaataagtcatagttccttcccagaaggagaatataattttgcaaaaagggatcatttaagatttattaaaataaatctgagaaagatgtgaagatagtaccgtaggaatccagcagaaggaaacagtgcttctggcttttgtggggaggattgagtcagattcattcataccttcattcatttgtgtgttcattcatttggcaaaaacttattgggtgccaggggttgcggggaggagggaagagagagttgttatctagtgggtatagagtttcatttttgcagatgaaaagagttctggagatggcttgtggtaatggttgaataagaatatgaatgtacttaataccattgaactgtacacttaaaaatggttaagactgcaaattttatgtgacatgtattttctcacaattaaaaatggagagagattaaataaaaaacagagcactttttggggccccatcatgaacttggtctgggatatgatgtttgaaatggatgcgccatctcagtagatggaggtaatgtggagaagagtggaggaagacgtccagctcagagggttttgggaactatcagtcctgtttgtctggatggtagggtctatcgggggaaaccatgcaagctgagactgcagccgggccagttggtgcaggcccagcatcctggctgtggatttgggcctgccttcttagattctgggagcctctgatggtttctgcccaggggagtgtcattccaaaggtgtgtatttagattaatttcattagtccttcctgttaaaccattgcctattaaaagcagtggggttgaggcattcatttttatggtgaaaattctggcctagcagaattttagatatccaagcatgtgtcaatgaagtgagtaggttatttttccatccattttacaagtatttattgaggatcatctaagtgcccgtagtgttctaggcagttgggggtatgggacggggtgaatttaacaggtctcttctcttaaaaagcctacagtctagagaaaccccctctccttcctaaacaagaagttatgccacaacgtgccatgtgttaccataggcatgccgccacagttccatgggtactgagaggagggggtgcctggcctgcctggaacactggggaggcttacagggaaaaactgtccaatggatttaaaggacaagcagggattttctaggcaaagaagcagaatgggcatcccaggagtatggtaaatcaaaacttattgggtgctatgaatttaaagctaaacttttatttcattggcttttaggtggtgctggctagagtgtatacgtttggacccaagcttaacttttccaatgtggaatcctgggccttcattggtaagtttgtttgatgccttcttaccaaattatgctatcaaggattggtatttggaatgaaaggcaaggtagttatcattggcaagttctctgtggaggttaccagccctggacctggagaagcctgtagcacaggctgaaggggtacataggaaaagtgaaatctcactgtaggtttctgtggtagatgcagagagggaggccagaggaggggaaccaaggggtgcgggggatggatgcagcgggccttatggagaggtggagctttggctctgttttgaagggcaagctagattgaaaaaagtccggggaggagtgaaagaagattttcgggacttgagaacatagaggtgaggtgtaaacaaagtgggcctagcagcagtcccataggagcaaaatcttcatcgaaaggagtcacgggcaagaactgtggtgggatctgctggcgtctgatgattctagtccatcagcaaactttttctgtagaggaccagatgctaaatatttttggcttcgtaggccatgtggtctctgtcacagctactccactctgctgtggtaacatgcaagcagccatagataatatggaaatgaatgggtgtggcagtgttccagtaaaactttatttacagaagcaggtggtgggctggatttggcctgcgggatgtagtttgccaactccttttctagaccctaaatgcccggctaaggcacatagactttatcctgaaggcagtgggaagccattgaagttattttggataaagaagtgaagtggcagaagtgatgtttacattttaggaacattcatctgatagctggacaagaggcatgggccccttttggaaggcagcagcagtcatccaggcatgaggtcttgcggtgaacagtagtgaaaatggaagcaaaggatcaatggaggagatactgcaaagggagaaccaatagcgttttcagtcttcttagacttaagaggcaggagtcaaagaggatgaaagtttaagcttgcttgtttacggtggtatctttgacagaaatgtagatgttgggggtggaaaggatagctgatgcatctggttttagatatgttgaattcaagataacagtggttcatccataagaaatgtccagcagagaattggaaatgcagggctgaagcctggcctgagaagattaagtctagagatgtggaatggaagccataggattaaacacggtctccccaagatgagcagtgggctgagctgtggggaatatgcgtaactgtgggacgggaagacgatggaagagacccagaggccatggaggagagtcccgggaagggaagagaatggggcagcagagaccagggagaacggacctgaagggaggctgctgaatttgtgacaaggtctttgcagatggccttgagaaatgtaatgtcacaagaggggaagggaagaggaagccaggttacatggagttggacataaatgaaggataaagaattgagatgttacaaaaatagaccgctcatagaaggtttgggtagtaaaagaagggagacacataagatttagatacttgcttgtcagaataacctttgctttagctttgaggcaggcaaagcatgctgtgaccagttttcatttccttctttggagccaagctgtgtttgggagtttgtgtgtaccttgggcttgtgattgtgttcttatgctcccttttgaggtgtggtgttcgtaactctgccacaacttgcaccacggaatccagcccgtgtttggacccttgccatgagacaagatgtgatctgttggggaagtagttgcatttgtataagttggaggagaaagtagagtggaccaaaaattgaaataaaccttcttactacagagtctatccaagtatggggacttgaggataattcctccagtcatgatttaattatgtatcaatttgtgctctgagtattttgagtgtaccttctttggtttgaattctaagtagtttttgacttggtttgtgtgaatatagcagttagagagctggtaacaaaagcaacagttgtaactggtttagagccatgatttattgaacactcattatgtactaagtccagtgctaagtgctattgtgtatcatcccatttcatctttgcaatgacctatgtggggggaattattaatagtattcttatttcagccagaaataagtcatagatgagtaactatgcaaggttacaagggatttgaacccgggtctgtataatccctggcttatgctgcttcctactttatcttgcctgtgtctggaatttttcctcctactaatgtagaaggactagagatagatcgagtccctcaggttaaatattcagaggctgtagtgggtgtttccacttcttaggagtctattgaaagggcagaagaagtgtgggaagtctggaagagactaaggccaaacctcaaacacttactttaactgtttccccagataaaatttagttgaaggcagcagccttgggcttggaaagaaaatagcgctagaaggcatgagagtcagattccagtcctagcattatgacaattataatgtcatttttgtttaaactcttggcatttctctccaattacctccagctttgagctccaaaggcaggctcctattttgtcttgtttttcactgtatccccagcatcgtagcacagaatctggcatgtagtatgttatgtactcactaattatttattgcttcgaatgcaccaagggacttggtacaagacacttagcctctcaggcactgctcttggcatcatggttatagaggtgaaacaggacaaggtctctgctgtcgtgaagcagacgtctacatgtgtgagatgtagaatgtgacgtcaggtatgatcatgctctgaaataaaagacagtgagaccggggtggagagggaagggcctgtccaagaagtgagacagtgagctcgttgggggtaaaatccataaaattcctcttggggtgactacagattgtcagctgcgctgtcagcaccttgttttaattgttttacttggctgccattgccaatgcccagctgactgctccctgcagcgagaactcccacctcaggcctcgctttcttcagctctgctgagcgtgcctctcctgggtcggctcccggttctcctccagctgctgagattccagcctccacagcctgctctgctggttctctgttctttgtccttagcttctggtttggcttggtccctttcacgtcatccttaacgtcctccctgggtgagctcatccaccactcacctctgtcttgaagacacccggatctccatatccggtctgaacctcctcccagtccacactcctagtggtctgccccgagggcacctcaacctgtctgtcccctcctgagtgccacatgcgtctttctccctgtgctgcctgcttggtccacgcccctcagttgcttctgcttcatgagtcgtcctggccttgtcttttccctcatattcccttggttaccacatcctgaagagctcatcttctaatttgtcaactcagttcttctctgtctctccactcctgtgtttaggattcatcattttgttctatgacagcctcttaattggtcatcctgtgttcatctttttcctccctcattccactgcccacattcctatcaacgtgatctttctaacacatgtctgatcagagctttcttttgcttaaagctctccaagagctcctcattgcttagaaaataaaagctaacccccttcagcggggcctgcagtcttctcatcatctggcccttggccccctgcagcttttgctcccccacccccaccccactttgggttttcctttttccctaactcacatttctaacctcagcctagctaccaacagccatcacctcctagtgcctttgcaatgctgggccctctcctgggaatggcgtggtctctgttcaccctcttgggaactcaactccagtttcccccaaatcttcaggacaccatccttccctacccagcacctctccatgacctggaaatgaccttcctcctggctcccagaacaccctcatgtctctcttgcaaagcacttatcggtgttactgttgatttacttacctgttatgctcagcaacctgagctccttaagggtggagaccacacacacacacacacacacacacacacacacacacacacactctgtctctctctctctgttccaagtgccagcatagtttacctggctcaggaagtttttgttgtaagagtgaggagtggtctgtttgtgcagccaagcaacagattcataatgtgataaaatgtacctgaaatgggaggttcattggccattgggtttattggggtgctcttcttgtcagctttgagtgcaggacaggttgtgttgggcttgagtttgtgacgcctgttgtgtctcccagcatgctgagacctcaggaatgtctcttctctatattctttgcccctgactttttatttttttagctcttgtttttgatggaccgataatagcaattcaaaatgaaaaataatccatcaaggaattctcaggaatgaggtccacccaccttggtcctggatgaatcccaaatttcctaaataagccagaatatctattcttgcgaactactgtctgacagcctttttcccccttaatccagctgagaatgcttttcttgaagggtaaggatacctagtggcccttcatgggggtgcctgagggcctctttgtcttcattttaaaccttgtaaagtccccagtgaatactgaggagtctaacaaataggaagaagctctgaccccaggggtcccaagtcagcatctgtactttgcatgggagctagcacaatgcacctagccaatagcatataaactctcctgttttcattcagtgccttaagcttgttgcttgttgtgtcttcttcacttcctatctctgccagagacctgagaagttgtgccaagagtgcagcttttatttggggcctcacagtaatctaggaaagcttttcagaagagagccattctcagcaccgaggtgtcctgcagaccaggacactccagcaggctcttggaactgctttcctgggatggaaatgcttgtgatgctgcctccccttgtagggactttccatatgctgttccctcagcctggaatgcatttttctcctggtttgcctagctcatgcctgttcaccctttggaactcagctgattggcctgcctcctcctcagaagcctccccaacctccctgataagaaggctaggtcttgtcctcaccattcccatgccagcatctagcgcttatggactgctcaccttgtgtcaagtactgttagaatgcttcatgcgtagctactttgtattaggggcttggtagatgttggctgaggtaagtgtcatcattgtcccaaagacactgtgtgaggaaactgaggcctcgacccattgagtaggtgacagagcaggagtttatcccagatgctggactgtgggtttacgctctgacccttctatacgccaccgttccctctgctccaagtccttgcagtctgtccttttccagcacttgtcatggaggtcatgacctcggtttgtgtggttatttgattaatgaatgtttgttccctcactgggcagcccttttgagccccaggatggcaggagtacctaggactctaggcaggtgcgcagcctggagttgaccgagagcatgtgggactgcccacttgcccacagctgcttcttgccttttgcatcacaggagggtgggctaggaccataaaagagccagcccaggcctccccctttctggagctcactgagtgcgtgcatggggtttggccgtcaccctcacttccatggttctgcatcagaaccagctgtgctgaggaaacatctgtgccttgttaaggtctgttccttctgcccactccctttgcccttttctctaccttacaacccctttgttgtccttcttcaaggaaaggggccccctttgtctctcagggcagagccagctgcccttctcctggtcctcttgatctgcacacactctgaggatgactgcccatggcaggtcatgatggtccgtctgccctggactgtggtttctgtggcagagcaatactttgtacagtcagggcccatggccctacggaaggctgagggagagcctgaggtcattgccttaagagaagctgcttcatggtgcagttggtatgtgtgcatgtgtgtgtggatgtgtgcttttttcatgcatgatgtttttatttgtgttatttatccccctgctatatctccctctctcaggggtctaacatggagctttgaatagtagatacatcatagctcttggctaaatacatattttctcccccgctgatctgaaggcacctcccttttcccctacccctcactttggtaccttggtgacttcacagggttgttatgacttcccagacctcattgagattgcagtgatgtgaaaaccctacctagattccagccagctgggcaggggccttggcagcaggggaagcccagttccctagggcaactcaccaggcctccagggctctctagggccaggctggctgagcttcaactgactcatactgtttttgactgggaaaaataaaaattttaaaatggcttctgaccaaatggggaaagtggatgtgggaggaggagaagggggacgttagccacaccctaggtacatttgccagcagcaaactgagatgggcttaaagtgtggctggcctctaagacgcctgcttcaaagggcattcggcacactggtctcaggctttggaggcccacctgcttcagaacatcagctccctgtctgtctagcgttgtgacttaagacaaacccaccaagctcccttagcctccattttctcatctgtaaaatgggattgtaatcattagaataacctttataaggttcttgtgagagtggaatgaagatgtgcttagcaccgtgactggcgtgtagaaagcaccaaatatttattatctgttaacattgtttttgtttgtcaaagtattattgttaataataattataagaagactttggaacagatataaagtctaaaatgcaggctgtgatgaaagggagatggtatataagaaaagtgctttttgaattgcacattatgtccagatattattattagcacaagtatgtttattattgttttgtctttgaaaaaaatgctggagcacaattttatgatgttgagtctatgtcctttgttgttttgttttttgttttggaaaaaggtttgtcacattggcctttattggaatcttgtccagtggatgtatgacccacattggtgaccctgggtgccaaatgcctggacagcacctggcaaagaagagccattatttcaatggtcactattgtttaaaatcgttatggtaaacaatacctgacagaagttcttagaggttcattgacagtaaattgtgggcaatgcactgagttattatttactctagacctgagaaattctccctctccaagttttgtgccttgtatagctaaataaatataaacaatttccttagaatttgatacaaacagctaccattgtcttcacaagtatgttagaaatactttcttaatagcaactacttgactgttttgttttttatctccattccctgccattactctgcctcttcccatctttctgaaataaaagtgagccaaattagccatttaaaaaatacgtagatactttcaggcagaggttgaaaactgtctaccccctggctgcatctggcttgcagatgtgttttgttcagcactcatagtgttttaagatgtttaaattagtggccaacatttaaaaatgggtagatttttgaatcaaaatccagatttccagctcttcataaaaaatcaaaggtctagtgggcctgggcccgtcttccttgtggcagtgcggaagagtggtggtccctcccctgggagcttgtttctccagcctgcctccggctggcccagcctcactgtacctttccatggcctgcttggcccctgtaggaatagagtttgtagtctctgcttaatataactaataccccttagatactgtgtatcagtttagaattatttccactagcaactgtgaccataggtaggaaggatattttacttgctaagttgtcattcttatgatagcccaaatggctataatagtattttaggctcttttggatttaatagaattaccttctctcctctctgtgggatttcctcattaacaatttttaaaaagtgttcagcaaggcttatatagcaacataaaattttaaataatgcaggatataaatttctatagctgctattgaaggggggttgcaatcaagtgaactgctttaattcaacaatttatggtgttgtaaatttgaaaaataaaagacacttagttttttttttttttttttttttttttcagaataaaataattaaatagttgacctttggcagagtctttgttgaaataggcaagggttttgagcttctcagaacttgagaccattgccttctggagtctttcctcagatgagtctgtgcctccttctagctagtgcactctgagcactgtggccacatctggagggtggagaggagacttagcttccaatggtggtcactctaggggaggggggcccttgcaaataccaaaatttttttaaattattattttatgagcttttaaaaacttttttgtttttgtcatcacaaaagtaataaacacttgtgataaattcagacaacactgaagtgctttaacataagcaacaaaatcttctgtgacctcccccaaccttttccaaccattccccaaacataagcacttttgagagtttgcttcttatactcctggacttttgcatttgcttgtttctctccacccctaccctttgccctcaaccacgacatagatactttcccttttgttttctaaagatagactgtccctgtgcatggtgttctgcaactttctttttacagctgtcaattattatggttatttttccaagtccatatgtacagataaatgtacttgttacttttaaaagttgtactccatgttatggttgtatgttaagtaaatttcgttttgtattgatagacactcaggttgtttctgaccttttgccattgcagtcattgctgctgtggaaatttttgtgcacacgtgtgaacttttgcctgagattttctttggtatagatacatagaagtaggacttttggtttaaatggtttgctgtttaaaatttgaatccataatgccaaattaccctccaaaaaggctgtaccaattcatgctcttcctaggagcatcccattatggctttgctaatctagtttttgcttacacatgtgtaagaaagtaaatcttaaaagcctcacaaataatgccatcaaaattacacgtttatcttagaaaagcattcagaatatatgtctgtagatttaattatatgatttttatatcttgactttgatggtggttatcatcctgcaaggtgacaaaaagttccctaaatactgtacacaattattaaataattattaaggatatcagttgtgccaggtagcctttggaagaattacagccaaatcacagcttccttttccacagctctgccaggctggcttgtctttcccaccaagggctgagccattaatactgaggctgggtcagcatttgaaggggccctgccagggagtgccaggccttgggccccagagacctggggagtgggagatggcaagtgactgctgtgaggctgagacaaagtttttgcctacaacaccccatggctgtttcctttactgagctagatgaggaaagcaaagggaagtgatggtccaagacttctggtggtcacttttgttcatagatttctcacaggagtgctaacatttaggctcatgtttacgaaggtttgaaaccttagcatttgggaaggatctgcaaattctcagccaggggccttaactgatcacaggtagttgtgaactcttggtccaggctgtatctcaaggcttcttcttagaaggacaggtcagcttaccacctgctaactgcatgtgaaattttgaattctgccttctctagctctcctctctggctctgagctggtatctggcatttgcaaacagtttaccctttgttgacttcttagcactaacctcacttttatgagtctgagtagacttgatacccaggccatttatcctttgagggtgccctcagcttcatcagacccatgctgggcagtctggcatagtggtaagaggcacttggagccagacagacctgggttcaaatcctgacatcatcacatttactaacagtgtgaccctttggctgatgacctcacctctttgagcatcagtgtctccttctacaaagtagggacagtaattctttcccaggggtattttgaaggatatacgaattaatatttgtcaggtgcctctcagatgttcagcacaaaataaacagtgtataaatatgagtcctctcttatcttcctgctgtagagagaaagttcgttggggatgctccaagttggtggctactggctgaggatcctggagtaagaggaaggctaccatgtaaacccagagatgaatcatgaacaatgtgtattctcaggagcttagtatttgatatgggagcctaacaagcaaatagtgtgtccagtaataggaactgattaatagaggaaagattaattaaccttctaggtgggtggggtggaaaagtaggtggggtattgaaggttcaacaggagttcgacagagaagatagaccataaataataaatatacggctgtatccactagagataaagttacattgttttttatgtacatgttgacttcttttggccttgccaatgcactgatatattcaaattcagctcctctctttttctcttcccttttcccttcactctgcctttcctccagccctgccttgaaatactcagccactgaaaatttcttaaagaatttctttatactttagtaagtcctcagaggataccagttcaccctactgagattttacaagaactttggtgtagctggggttttttttgcattcctttttctacggtagatataagttcttttgggttgcccatcaatgaacaaactaccaaccatttgatgtttactgcgtgactcctgtataccaagcacatgtgccatttcacttagtccccagaatgtcagagcagctttgtgaaatgggctgcccgttctttcttatggatgaagaaactgaggcttaggtaggttaatatactgaatattatacatgtagtgagtgggaaagccacagttcacctccagggtctttttctccctctttgctgccttgcttggggtcctgctcatagtaggtggacagcagatgtttgtctgaacatatgagaacactgcctgccacgtgccggtcagtttgatttgtgctgctggttttgtaacccacatggggcaatgacagctgctcaggtactttcctacctattagtggggccccagggtcacacatcagtcataattgacaaaaaacacaatttccctttcctctcaacttttatttctaaggtacttgtaagcaggtagattagattgttaacttttcattttttgctttgtctctctcctttaaagactatgtgaaagaatacacagtgccctgagagcctggcctgggaatcagaaacttagattccagcttcggttctgctggtaactcctcagtcattatgggtaaataatattccctctccagaactactagattgtgtccttggtgcagtctggggttcgggtggtcctagggaccctgcctactgcatgaacctgttatcaccatgtgaggctggaaggatctcagcgttggtgttgggcaggcctgagtgagcatcctggctcctgtacttcccagctctgtgacctcgggctaatcacctgactccctgatgcttgttcttgtctacgaaggagggctaagaggacctgcttcccaggatcactgtccagattgaatgagaaggaacgtcggcttccttccttctgtctccaactcctgagtgcactggttttagactaactgggtgtttctgcagttgaaaccaaaacaccttcattaggtacaatgttcattatacctcgcaacaccctgagatactcaactcttagatttcttgaagctcttttttgttaagaaactcctcaaaggaagatactcttctaccccattgagctttattagtgcttcaatgacagcaccttattttttcacttttttcccccttgcagacagaagctgcagtgtgaatcagtttgcatttatataatttcttttgcatttctttgcaaagaggaaaactccattcatttagcaaatgtccgtcatgcccaggccttatgttaggtgaagggatttggagagaaatagagtcactgacctcaagaagcttacagggaggaaaggtgtaaatacataaagtgacacatgggtttgtcctgtcaccaaggtatgcagtagatgctgtgggagaagagaggatgacacaggttctctcttggaagacctcatagagaagaggtgacttgtgagcaagtctttttttttttttttttttttttttttttgagagagggtcttgctctgtcacccaggctggagtgcagtggcatgatcctagctcactgcaactttgaaatcttgggcttcaagggatcttcctgcttcagcctcccaagtagctggaactacaggtatgtgccacttgcctgtctgatttttttttttttaattttttgtagagacagcgtctagccatgttgcccaggctgatcttgaactcctggcctccagtgatcctcccaccttggcctcctaaagtgctgggattatagacatgagccactgcacccagccgttgtgagcaagtcttaaaagatgagtaggaaggagtctgtcagctgtagaagtaggaagggcccaggcagaaggagcacagggcagaggctagagccctggtaggaggtgacacactgggtgcatgtctggagctggagccaagaggtggaggacctaagtggctacatcttggcagtcacccatatattggcaagccccaaatctttgtaaccagcccagattgtcttcctgagcccccaactcccatacccactgcccattcagcagctagctgcatgttgaagtgtagtggtcttcccagacctaacataactaaacagaagtcttgatttgttccttcaaaaacaaacaaaaaactagccttgctcctcctcagtcttccccatgttatgaggtccccatcatttttacctggctacccaggcctaaaatgtgggcatcatctttgattctgcttcctcctgtgttcttcacatcatctgtttgcaattctttttttgtttgttttactggttttaaaaattatttatttattgagactgagtcttgctttgtcatccaggctggagtgcaatggtatcatcttggctcactgcaacctccgcctcccgggtttgagaaattctcgtgcctcagcctcccgagtagctgggattacagtcgtgcgctaccactcctggctaatttttgtattttcagtagagatggggtatcaccatgttggccaggctggtctcaaactcctgacctcaagtgatccacccgccttggcctcccaaagtgctgggattataggcatgagccactgcacctggccaatttatttatttttaattaacacataataattgtacatatttatggggtacatagtgatgtttcaatacatataatctgtagtaaccagatcagaataattaacatatctgtcatttcaaacattgcagttcttgacaactcttactgtatgtcctggaagccaccactgctccttattattagtttgtttctttatcaaccaagcaggccagaccactgctctaccctcgttcaaacctccactgtctttcagcaggtctcttgtcagtttgctacataggcaaagaggtcttttaaaaagcaaatttgtgtcatttccctgctctaaactctccagcggctttctggcatctttggaatggaatctaaacatctcgccttggcctgccagcccctcctgctcatcttctctggtctcatcccttggcactctctgctcactccatttcagctgccgcatcttttcttactgttccccctgttgtctcatgggctttgcacttgctgtcctccgcctgagctgctcttccccagacaccgcctgtctcaccttcactccacgctggcctctattcaagtgttctcccacctgtctgaaaaagcaccgttctgccccctctccccgctgcttcaaccattctgtcctacctcgctttggtttctctcattagcactcatcactctctgactttatatgatatgtttgtttgtcttcttatttagtgtttgtcttaccccacaagaatataaatccatgaagatgggacctggtcttatctattgcattcagcactctagggcctaaaacagagcctggcacacagtgggtgatcctgaaacacgaggtgggtggatggacaaatgactgagttaatgcatgcctgcatgcaagcgaagactttggagtttatttcataggcagtgcaaatctagtagacatctttcaggaggtgagtgacgtggtcagcacttttattttagaaagccagctggtggcagtgtgggggctggactgtaggagggaggcagcagaattactttagcggctgtgaaaatcgtccaggaaattgatgctgagtgttgtgctagagctgtggggatggagaagaggggacagatgacaggacctgaagatctttgagtgtctttgatttctattgggataacttggtatagtgattcctttataagaaaagcaggaggggacgaactggtccagggagagactgttgacactctgtggtgtttttctcaccaagaaaacctaagccctgggatgcatgttctctgtagtggcattggctctctggggagtgactctgctgctccgcagcctcccctgttccattttttaataagagaatagtcaagatggtggtgtcagtgagtgggagtcttcttcatgcagatggatccattgatctttgcatactccaagccacactaagtcattggttcttttctcgcagtgggtacatttcaccttatttgattctgatctgacaaatgctgctttttttcttttctttttttttctttttttttgtttaaagaatacctagactgtgctcaagttccaggtggggtttacagataactggggttccagcatctcccttcttacaaacacgaacaggagcctttgccgtccttgggtctcagggaggcagaccggcagcaggcacacattcctggcccaggcgtagccatgctgtctggtgctgccttttgagaccttttgtgtgtgtgtgtgtgtgtgtgtgtgtgtgtgtgtgtgggcttgaatgattccttctttcaaaaattcaaccctctccaaattttgatgaaaaccttttcatctctgagtaagcacattatttcccatcttgatgaggtgtgtcccctctgtgtccctgagagtatgtcatcccagccttttaaattttattgtatttttttattttttattttttcatactagtcaagtgcagtagtgagaagcggggaaagagtagaacaaggggccgggggcggtggctcacatctgtaatcccagcactgtgggaggctgaggtgggtggatcatgaggtcaggagattgataccatcctggccaacatgatgaaaccctgtgtctactaaaaatacaaaaattagctgggtgtggtggcacacgcctgtagtcccagctactcgggaggctgaggcaggagaattgtttgaacccgggaggcagaggttgcagttgagccgatatcatgccaccgcactccagcctggcaacagagcaagactctgtctaaaaaaaaaaaaaagagtagaacaaggagtttgatctgttacagactgaactatcaatggagataactcactaccttcggaccagcctcatcccagtcttttaagcctggtccagaattcctaatcctgcttgtcaggcccttcaaagtgaaatgctgtaccatctgtatagctggattctcacctcctacctctcctctcccttccaaaggttccgatgtcataggaatctacgctagagggcttcctgtgtgccgggcactgtggtaagcacttcacatgcattctctctaatccttaccacttcggggatgtaaggattataatcttctttttacagatgaggaagctgaagcttgccactgcttagtagttaagagtatgggcttacagccaaacagaccctggattgattctcaactagctggggaccttgggcatgctacttaatttttttaacctttttcacatttagaagataaagataatatatagagagataatatagaagattatataggtattatatatatatatatcttctatattatgaagataatacagagttgtgataaaaattaaatgaaatgaccagacatagtggctcactgttgttttgttttgttttgtttttttgagacagagtctcgctctgtcgcccaggctggagtgcagtggtgcgatctcggctcactgcaagctctgcttcccgggttcacgccagtctcctgcctcagcctcccgagtagctgggactacaggcgcccgccaccacgcccggctaattttgttgtatttttagtagagacggggtttcaccgtgttagccaggatggtctcgatctcctgacctcgtgatccacccccctcagcctcccaaagtgctgggattacaggtgtgagccactgcgcccagcccatagcggttcactcatgtaatcccagcactttgagaggctgaggtgggaggtcacttgaggccaggaattcaaggccagcctgggcaacatagcaagaccacttctcttttatgaaaaaaaaaaattaagaaaaataaaaattaaatgaaataacatgtaatttcctaagtacattaagtacgtgcctactatgcgccggacattgtgctgtcagcaaataatagctcatcgcagatgctgttatcatcatcatcatcccaaagccacagattgagtctgtaggtgaggccctgcctggctccaaagattgtgtttttttctcctgttgctcccaagttcacctgtcccaaactttctagcccctaagtttgcttccttgcgcttttctggttgtgccatttgtccctgtctgggcagtgggctcaagctaaggcacagcagttttccagtccctttgagctactgacctcttttctgtcattgactgaacagtttccggtggctgaatcgtctgtgtaagagcttggacaattttttctgattgttaccatcatcgtgtttactgtgaaagggcttcctgtatagttgtttgtgttagcagcattgtctaaatgaaacaagagtggcaacagaaagggttggtgagcagtcctagtcttttggggtcacagatcactttgtgagtctgaagaaatttatagactctctcaaaaaaataaacgacaagacaaatacaagcccagcatttttcatgagacgttttccctgaagttgatctggaaggctatgtgctcttttgtcattgtgctactccacattcacagccatgaagggtgtcatgtttctgcagggtgtttgtatttaagggttgttgggcaatttggcaacactatacctgtttcattgatactatgtgctatttgcatttatttcccatatctgagatacgtattcacacatgagaactggcctggccattttgatgagatgtacctgctgatttgcacataaacacaagccatggcctgcatctagaggatcgactggagaggcttttttttggcccaaaacatcagactagtaggaattttattatgagttatagactaaaaggggggataaacttagcttcagcagggtttaatattctcaattcaggtaagtgtaaatctctacttttcattttaaacatttttgaaatttcagtctttaaaaaaatgcttgttttttttccttccaagttttaaggtatgggtttgggagaaggcagattccaaacactttaactcttcgacctcagacttgcttatgagcctctctttggaacatttccagtgaaccgtggagcaagcctgccacatccagcagccgtaggcatgatgatcactggtgccgatggcccctccactccctgcctggcttttgaggccccgcagaaagaaaggaacagaatcctttcataaggaaggccccagaatcctttctcctgctgtagctatgctgccagtgtcctctgtagatggaaatggaacttggattttgggtgccagaactgaattcatcacagataagattagttgatataaagctgtttctgatgagcagtttttcctccagagttttcatttttgctttttctaaattatacaaaataatagacactcattacaaagggaggatcataatgctccatacctggttttgaattccacttctatcacttattagatgcagccctgggcaaaacacacgccctctctgagccttgatttttctcattgaatgggagatctaattattttacctcataatactgctgtagggattgaaggagattggtataaataatggttttctgagagtctggtgtgtatttgctttttttcagttaatatgaattgagtacctactaagagctggtcactgttctagttgatatggaaccagtcaagagcaagacagagagggtctccgctctcatggtgctcacattctaatcagaggaggcacaagaacacaagatcacttcagttattaagaaattagaacccaggggtagcatgagagtcacaggaaggacccctttacgtcggatggccagcagaaccctccctgaagagctcaatgctttgtgacccccccggtcccaagttttccaggactcctacttttaaaaacactgcccctccaagtatataggtctcaattttgagtttggaaaatctgaccacatattagttctcttgttcattaatgggcttcccatttagagagtgagttcctggggcaggagccatgtcacaggaccttttgaaggtctcagggccaatatggacgacacttctcttgaacactcacccagttgggctgacatgaaaacctcatggtgggaggtggggggtgattagtttccagccagagcccattttgctccattgctgctttgaacattctggtttctaaggagctggaagtagtttctctcagcgagaatgtggcacactgtcatctcctgattctctgcatgcagttcttcaatggcttgttgaggctgcgtggaagcccagaggtcggggcagttccaactcacacactggcatttgaacggcagagcagtaagccctacacctgacataactgcattgccttcttggggtacggtacggatttttaaatgaccatttcagcctgctgggctgggcaacggtgatccaaactgatgagtcaggaagccactgaacagaaaggcaggctgcatctgactcacctgtcatgtcgatagttgacctccttttgtttgaccttgatttgctcagtgcaattaaagatgctgttgtgagtgcacttctgctacctgatttaaataaagtctaacatgtgacagctcagggtcttaaatgcacacacgacttaggcagacggacagatgggtgagtggttagcctttcacttacctctgaattgtaattctatcacaaggaaagggcttaatttcaggaacacggagtaattatttgagactagatacaatgccaaagcagcaggccttgattccttgctacagggcagcttaatcaggaaatggcctagatggccgcctttcaagtaggtccttgcagtagcttggcaacaggcacagggtcataattggaagaatttggctgtgagtgtctgtgggtgtttacagtgcactatagggcagggcttctcttatttatagaatattttgagcaacaagcagcagaaggctgaaaagccactaaaatctcgatttatttttaacaaattccatttttctcctcatcccagaaggagaactgagttattaaaaaacagttaaaaaatacatcattgcagagcatgccatatctaattatggggttgccagcatcggcctgcagccacatttcaagggcttcgtaaatcaaccatccattcaatctgtgaacttatatgactcctgttctccatttagatgtagagcgaaattattggcaagtgggtgctgatcagaaaaagttcttccctgtctaaattaggagatgggagggataaatatagaatagtatacttatgttctcaaaaggagataaaatcattcttcattgtccattatacttagctgcacaaacatccatcccattgcactaaatagccactttagagttttcacacattgcaatggcagttctgtgccactcaaaggcgcagtattgtgatatctcgctgagcctaaacctgagtgattattgctcacgtagtcatgaagagacataaacccagtgcttttttgcctgtgttgtcgtagtgtactagagctacaaggtgggccttcagagagacactagttttaagtatatctcattgtaggtggggaagcagaggcctaggcaagggagtgacttgcctagggtcccattaagagtcatggcagaggtgggctggggcggcagtctctgtgcttctcttgacagtgccctgctgtgctcactggagctactgtattaaacagatacccttcaggggttcacagtcttagaagacacaggcacgaagatggccaaacaatcagcccatgcataagcagaccaagatatgtgtatataacagattagttgagtggtagagaaaatgagagtggggaattttggaatctatttggatagcaaagcaaaggtaacatcagttgctctctgacccacttgggaaaagcttatagagatgctatgaagttttctaatggaaaaaggtgcagtacatttgccatgtgttagtgggaaggtaagtatgatgcagtggtgggtggtaggaggcagtgaagataagtattgcaactttggaggagccctgggaatggattgttgaggtgatttcataggaatacgaaagggagcataggaccagggcacaggccagagacaggcaatcccaagttccctggagtaccctgcccttttctgggaaagcaagtgggtggcatgagtgctatgttcccaatgctctggccccacccctggtagaagaataataactgatcatggtgggttttttctgagcctctgtatctttgagtagcattctggtagccaatatcagtggactggtgccagcctgtgtggtgaacctctatctctttcttgccctgggctgcatgtcaggcacagtgcctaagccggagtgggctttggggagttacttctctttctgaggctggaaggggcagagggacgtagggaaaactttgctagggagggcaaactgtgaaagcctctggagaagtcacctgttgggataccaaaggccagcggttttagaggatgcgaagaggccgggcggggttggtctgggcctaaactaaggctgtagcggctagcatggagaggaacaagcgacggggagtgattacggatgaggaagacgtactaggatttggctacagacagacaaccaaccagagagtaaaagacagtgacatgctaggatgtgaaccacctactacagagaaggtcagaggtggggagggaggaatcagggctgtgggcagatccagcagctgggatccaaagctgaagcccttgggttattgaatccattctttctgagaagagatggttgatcttcctgcccagggagttcctagccagactggacagtggttctcaaacatggtgccaggtgttgtcagatagcaaacaattagtttgtacacagaatgtccccaaggtcacctacacatatttgtttttcctaatctttgatacctacagccacttacctgctttcgagttctcagagttgagaacatataaatttgcagtaacaagtgcacaggaaatacttggaaaatggctgatgagctttagtttggaaatttcatttttttcttggatctggattataatttcagtacaagctagcaatttttcttgttggtaaaatagtttctagttttaaaattatttctgtagttaataaagttaacactatttcatgatggaggctgccccagctctgaaccaattttcaaaaggcagattctcctctttctctctcttatttcttgctcttgaacatttcactgtgttctagcaacttttcctgtgtgtgactcggccaggagactgacttgagtaagatccaggtcaaggggttgtgtgggtgggtcggtggtaaggaggtgctgaagaacactaaaacctttgcctgagaggagtctgggaagtagcctgcgaactggaatgaccccaggcttcctgtcacggtcatagcccatggagttggcagacttgatcactctatattgtgtgcccccaggtaatggcattagtcatcgatactgtcttttttttttttttttctttgagagagagagtctcagtctgtcgcccaggctggagtgcagtggcgtgatctcagctcattgcagcctctgcctgctgggttcaagtgattctcctgcctcagtctcccaagtagctgggattacaggtacatgccaccacacccagctaatttttggatttttagtagagacggggttttgccatgttggccaggctggtctcgaactcctgacctcgggtgatctgctcacctcggcctcccaaagtgctgggattacaggcgtgatccactgcgcccggccaatactgtctttaaatcgtccagagtaagaaaatgttgatagcttgttgtcacagccctgtcattttacacattccctgaattattgtctggcaccagcaggtgttccagaaacacttttggttctttgagccattactggtcattcctgtcaccactgccaccaccagatgtggttctgagagcattaagtaaaagttttgaaggttgtgtatgttaagactggtgcaaagtccatcctccttccttcgggctgatcagccacaccctggctatcagcacttatttactcattttcaaagtgacagaatggtccagtgggcaggggcataaggggtcacttcctctaaccacccgccagtgcaggaggatcccatctgcgcagtggctgcccatgacaggcagttccctagccccagtcggacatctccgcaccaggcatcctgctcctgctttatggacatctttggctcttaaaaatcctcctttattctgaccgcagatctgccttttggcagtgtttccttagtgacctagttctgctttttgtggcaacacagaacaaaggtcggtaggcatggcacaattccagcttagaagtttgaaggtagtgctcatggacccacatcctttccctctccacccactctatctccctccacaaggtttatgttctccagtgccttcagccattctttctatggcatggcagtcagtattaatcccagtaaaggtaacatgtatccagagagtgcttgccatgggccaggcactgttctaagctccgtacgtgaattgtcttatttatgactcaaaatcaccatatgaggtgagccctgtcatcatcctcattttaccaatgaggcaactaaggaacgagggctcacatcttgtcccgagccatgcagtcaagcagcagagcagagatttggggctaggcagtgtgactccagagcccgtgctcttagttgtggtgcaagactatcttacagcctttcctgcatagtgccaaaaataagcccatggtgcactagacttgggctggccctgctttaacttattttgcaagaaatcattagacaggagccttagttgaaccattttctgtgaaaccttcagagtttgttttgacagaacagactgcagggcagaggcatctgcactgtccccaacaaatgggttcatcctgtagctctgccaggccccacagggttcataaaatggtagctttagatcaaggtgacaaatacagggctcttgatgttttttttttttttcctgaacatggtgcctgagcaataggtttcttgtttaaagtgcttagtcatggttttatggccagaaagtagaaggagagaggtacctaagaattgcaaaactgggtcatctcttcaagtgcctaatccaatattcagtctcagagaacaactccagcagttacgggggtggaaggatgtgatgaccacctaccatccaaaactgggatgtaggtgccaaatacacattctcctgaaatgatccctggtgcctctagccaggctcttccaggagtctagagaaagatggcccatgacttcatccagagtctttgcttcctgtgctctgggatgcctgggcttttctggccacagccatacactgacagggccagaagggctgagatgctgggattgaaccatctttctctttgtgagttgctttccagatagcacgcattccggtcactattttccagagatttaagcagcaaagtgagggaccctcgggcatcgactcagagacctggaggggagcagcttgaagcaatgtaaaaagcactggataaaatctggttctaccaaaaatagggctatgagagttacctcacctccctgaaaggtaatatctttatctgaaaaatggggatgataatactactaacctggaagattgacaggaggattagatgagattctgcatggacataacagtccttggcatgatgtctagcagtgaagaaacataaatatgagaataataacttccttcttcctccgctgtctattccttctcttattctagtcctgtctgctgttgggttttgtctgttgttttgggtaaatagctaacctctctgcctctttttgtctgtagaaatgctactggttctgaatgggtacttcgcgccccctataggacatcgtgggaatgtgtgtgggtgatctggatgtcacagtgacccagacgaggcttttactgggggaagaggggaaggcaggggtgctagatataatgcttggggaacaaaagattgcccaacatctgcatagctgcctaatgctcagtgcattcttgtgggcaaaaccctgcttaaaattatctgggcctagagtctgactccaattaacacataaacacaaataatttttgcatgtttttaatatatactgaattttctgcgaacacagctaccaagtatataagatttacctatttgttatgaataggtgcaagcatttcatatatctttcatgatgttttctggtgtagcggtgccccaatacttacatattgatttacatgttgtcttatttttaactatatttcctttcttctttgtattacagttagggcattatattgattatttttggaattataagtgttgtaaggttatattacttacagatttcaagagagctaaagacatatttaaaatatttttattgcatttttgacaatatgaaagagcaagagagagagagtgtgtgtgcgtgcatgcatgcacatgcttacaaattagctagaaaaatcctaagacagactttaaatgaaaagaaatggtttcatagctcctagaaatgtccttttacataaggatatgtagtagaagtccaaatttttaactgcattcattgtcagagaaatgaggtgttttgatgtttcccctgtcccttttagaaagtatatgatcctaaaagagcctgaaacagtttccattgtcatattttttcatttttgcaatctctatttttttcactcctcccacctgtgcatatatatatttaaaagcgtccccatatagacttttaaagaaagaaaagccagccaggctccccactctttactaagtttgttttgattgttttgtggcctctgcctgcacctcggcctgagtcagactgactctgggagctgtgggcaggtccaagggaaagtcaaggaggtaatgaggcttctcgtgggggcaacttgtaggccaagttgggtgggttgaagtcagtctaccagaagcttcctgcctcaagcctgggcctctacctgtcctgaaacctgagggctctccagttggaccacgagggtctgacatccaggaggatccccaggagagagcaaccgtcactagggaatatgctgcccagcactgactgtactgagcagcagtgttgtgtgcctgttgggttgatgccatggatagccaggcgttcagaactgaacacgacacctaaaaggcaaacacgaactgtgaatgtgccagtgtcagatgctgccttggtggtcatgtgtgggctggcagtaagcttttggtcccttaacactcgctgttggaaatttcccaaggctttcatctagggtagctggtgtgtgatttccctgtcctttgttactcctatctggaaactagttgaaatcttttctatgatattgatatagttacagaaaatctgaatacttactactaagttttatagttctgcttagttcaaagtaacacaacctcataagagaaagtttgaaacaggtagagaaattgaaagatgaaaatcactacccattatctcagcccacaaagatagctactatcagcattttggtttgtttcctttcagtcctttctgtgtttatgaaattttattatataaataattcatgtccaatatagaaaaagatggaaaattgagaaattataacgttaaaacaaaactgacccatctcaccagttggagatgtcttaatattctggtgaatttttttttgtcttttttctatagacacataagaagactgggaaatattgtgtatatacgtttgtaccctttttcaccaatgtatatcaatgtatatcagttcactaatgaatactaattaaatgaaaatttattaaatgtatatctatttatatctattgatatattaacagatgccagtgcatatctattaaaagagtactatgtaagagatgatgttcttaaacataaaatttaatttaggcatgaaattactttgtcaaaagatatatcagtttatattcagatatacagtgtactgacctgcccatttaccacatcttcactaatactggtattatctttaaatagaatctttgctaatatgagcagtgaaagtggcatattatctattaaattttgacggttatgagattgagcatgtttttgtatacttactggtctttgtgtttcatcttttggggtttcctattcatagtctctgcttagttttccactgaggtatttgcctttttattgatttataagagattttgttttgttttaactcagaaaaggtagtattgcttcagttgtcacagagctttggagtcagacagagctgggtttgaaccctggctttcctacttgtgagctgagggatttcaggcaatttatctgacccctctcacaattaattagttcttctttgagaactaaacgaaacaacactgactagcatgaaaaaaaagcctggtgtgtggtttctgccaatagtttttgtgttgttatttttgttgtgattcctgcactgagtattttctcagaaaaatgaccttgagctgtacgactcatgcctgttcagacccacagacacatgatactcactatatccaaagctcagaaaaatgaaactgaaatcactgaagtttgtgggttttttttttaaattcttcttgccagaaggagacaaatgaaggaaaaaaaacaagccgatttcattttcattaagaggaatttgtagagttatttctggggtcaggcaggatacattcagacgaacattttagatctagggctgggaagatcccgagactcgttatagattacatcatcttcctccaagtgcacttgccaggcaaatggacaagtgcattttagaaaggttttcagttgttcacgtttaaacagaaaggatcacctggctaacttttagttaacccattgaacagatgtgccattcccccagcccattggttattcatgtccttgttactggtttttgatatccttgccccgtaggtgggaggagggatgggtatgagcctgccctgccctctttctcctacttgggacagagctgttgcttttatttgctgagtcactgaagcaatagagcatgtgcagagtcccagcctggaggtgggcatatctgggttccagtccctgctctagcccttctcagctgtgtgatcttggacaagttgccatacctctctgagcctcagtgtcatcttctatgtgatgtcgatgcctcccccaaaaggtcgttacgaggaccaaaggagacacgtcagggcaggaaccatcctaggcacgtgtttgatgctcagtaaacgggacgtggtcagtgttcagagttgtgggggtggcaggtgactgctctgtttcacctccactcacagcaacagggcctgtggtgtcacctagacatctcataggcatcccacactgaacatgtcccaaaccagcagctcctccctggatgggtggatggtgtacagggacctcttcctccagctgtcacatggggcatgtacctggcaagtggctttgcagccctagctgcccccttggctgggggcctttgtgcagttcatggactgggagtcacccccatgtctagaccgtcaggaaacccattggcttttcctttagagcataccaagaatcaacttctcagaacatagcaagagttgactttttgtcaccctgccgtggccactcagactgactcctcttacacctcacatcccattgatcagcacagcccctggaaatatgtctagaatccagctgcttctcatcacccccacacctaatacagagggctgagtcatagcatctcttccccggactgttgtagccgtctcctaactcagcttcctgccctgcttttacacacacacacacacacacacacacatggtatcttctcaccactgcagccagacttaaaacctaagagggatcatgtcactccccattttactcagagtcaaggccaagatccttactggggtctgcaggcccccacacctggccctctgactgcacccctaccttccttagctgtctcctctccctagcatgccccaggtcgctggtcccctagcactgggcagctccctgcggccctgttcactagctgtcctctgcctggaacacatctgtcacctctcacctcctcctgtccagcctccttggggcctttctaactgcctccctcctgtggtctgcctcctccccatctctgactttcctcccgagcacttactgccatccagcacccgacataacttacttgtttcgtttgcttgccttcctcaccaggaggtgtgccagatgaggacaaggatttttatatccctacccccatctgcagcactgccatggagaacagtgcctggcacttggatgccctcagtaaatatttgttgagagactaataagtgatcgtgggccagcatgccaacagtgtcttcgttattacaaaattgtcccgaattgaaatttggctactacaagcagtttgtggtggaaatttactcaaattaccaattctttcactgaagaaattacctggcatatgtgggttctcaataaactgtgttggattgcctcaaggctttggggcagtggtagccgtctgaggcctccttgccagtcaaccaaaccctgtgctgggtgggacataagagatgcccccagcatccttagctgatgctactatgtcaccccagaatccctggggcagcccacccctcagcagcagctgtcaccctgctgggttccgcttttcctcctgtgggcttcgtctccctaaggaaatcattgtccttgctttctacatcttatctccctgagcagctccaaaattctgttattcatatcccactgacctttctcattgtcctagtccaagcttctcacaggaggagttgtctctctgttttatattaaaacaaagcggttggactcttaaaactctattcacttttcagattctttggagtcctcaatgcttcctgctatgaaatgctgcgctctggaatgccttccagacccacccccaggatacctgtagccttccctgcagccactctcctcaactccctcctcgttcccaggggtcaatgtcctggatctctccagctttaagttccttcatgtcctcttgccacccctgctctcaccatctctgagttcttgtatccccaggatttcaacctgagtttgcatctcctgacatcacttttcccagccttctcccttttcaaccagcacaaggccatccacttccatggccatagtggacgccactgagcatgctaggtgttttcttctattcaactcatgtggtctgcacaacaacccagtgcggggaatccacccctttcacagatgaggcatctctagctcctggaagtcacctaacttgcctaggacatgcagctagtaagtggcagggctgggattggaacccaagaggccccgccctgaccaccatcctgccctgcctctcctcgggcacccagaatcccctcactctattgtcaaaacccaccttgtcctgcctgtctggtacctaggggagaaccctcagcctcttcttctgctgccacttgcttcctcttctgccaggaaggtcccacgcctggccagcctgctctggagacacgcccactgcctggccttgccaggaggctctgatgctctgcaggcttcctgtcccacggatcccttcctgcctgtcctggggtcccaccaccccactttgtagttggccttgctctttattgtggtgaaaggtgcaggccattccatccaagatcctataatattccttttctctgctgttgaatgttcttcccattccccccacattctcaaagaaggcatgtggctttcttcactgcgtctcggcctgccctgagtccagcccctgctgcctggcccagcctgtcttgttggcatcccctaagccctagccagaaacacaagcacctttcaggtgctccatcctaactccaccctccctcacactggcctctctccctttgccaccagataacagcagtgcattcttttgtttcctttagaacaagatgcagatgttttccagaattttcttcaacttcaggcagtaagttttttggtgaaaggagtattactccctgagtctgtagaaccaggctctctcctcttattctgtagcaattaaagacaaagacaggcaagaaaacaatgaaaagaaacaggagccaggctgatgcaccttcatttagctggtccttgagcatgactcattgatccttcttgcttccatcagggattgcaccctgtgccctctttgaatgcaggggcatgtcaaggccaagggtcaggaagagagctttggcctcgccagcctggtccccagagtggaagtggcagggcaggaggggtgtggcagacagagcacatatcgcccccagccttgcccccagatgttgagtgctgggtgccggagtgcagaggggaacaaggcctggaccctgcctggggagaggcagcacctgggagatctttgtggcttcagatcccatgtggtcctccaggtaaagcagagcatctctggggtctaggctgggggaaaactcttgcaaaaaattcctggttctgggacagaatgcatggggtctgcgtgaggggcagaggacagtgccaggccagtgagcacgcactgggcaaaggaagtggccagagaccactcataagaaaaagtgggacatgaacctcagagcctgggctgctttcagaggagccaagagcctgggaaataagcatcttctggtgaggaaatcagcagggggaggggagggtcatacaggaggggacttttaatcctgaatggccttgcagggcatggttcccctagtgtgccccatggaacccttggctgttagatgtgaggtgataaatggtgtgtggatgcatacacttgggactcagactctgctgcccttagactttcaccctccacagggctgcgtttaaaggtccaagaagccctgcagaagaaaaacctaactattgaaccagcattccctatacgtatttggcccctgattttttcccccgaataacatcattacaatcctatgggattagtgttccatggcagaactttgggaagtgttttttgaagaatttgtaaatccctgcaccctctggactgtgcccatttcttagattgcatggaggctgtgctgtacagtggaaggagtatgggctttagatgggactggcctgtgtttaaatctgctttcccattatacaaaatctctgatcttgatcaagttacttactctctcaaacttagtttccttatctgtaagacaggggatgaaacattagctagttgtcttatgaggctgttgtgatggttaatgggaagataataatgacacttacagagggcttgttatgctccagacaccattctgagcactttatatatctcacttacttttcaccacaactgtgaggcaggtaatgttatccttatcctacaggtcaggtcaggagaccaatgacacatacaggctaaatgttgtgcccaacatcacacggctggtaaatgtgggacctaagatttgaaccctaggcactcatacatgatggggtcaggatttgaaacttgaccgtcatctcccatcagagaacatgctctgaatcagtatgttctaaagggtctagagcagtaaaagcactaattggtatcagttcccttttcagatggttcgtggatatgttagggggattgatggttcctgggactccaagtcattctgcagtcattaaaatcagccctgttgaaagagtaatctcctcgatctgcttgcccactcagatgctcccattgtgaccattttgtttgctctgctgcctcatcctgggccacttcaatttgggtggctgctcagcgttcaggtggagtcgggccactttccacagccatctcatctgtggcctgtgcctccacttccaggaccaagagtccccccaggatgcccagtgagttggtagcttgttctctttctacacctcagtgatggacttgacaaagggttaagaagacatcccttttatcattcagcaaactgagtgcctttactgagctagatgcatgccctgggggaactagcactgtttggtgacttagttagacctctgaatccctctaccaaccctcagtagctgtctgggagactgggattctgtggactctcctctatcaacgatattgggggtcttttccacaaagaccagcctggttttgattgacaaagtgcctcagatttacaaatcttaccccttgcaggatcctctcaactgatcaagccccatagctccaaatgccgtctccttgattgatgtttaatttggggatccacaagcatctagagctaccagttgaatttgggtacccaagggccacaaatgggcccccctcacaccctgacccctgacaaccagcacctttgagactgaagtaccactgcatatagtgctgtcctctgctcagggcattctccctaccagccaggccacccggcaaacccctgcaacacctcataagacctcttcgctggtctcatctccttttattaacacctcctcagcacccctccacacacacccaagcccacaagcaaatcattttttcatctgttttgctcttgtaccttacctatgctccactaatacaaaaaaagcacgccttcctcaagacacttgactgccacctgctggagagttgtcatcatggctcaacaaatatctgccacttctaaacccccaggcacctctggagtagggcagtgcattgcttgtacagctgtaaacatggcctgcctgttgaattggtcatgctgtcatgtacttattaaaacactcgtctttctaactggactgaggacatcttgaacgtaaggactgccgatttctgtcttcgtccccattgtggcttctgctaggggctagagaaatgcttattgaatgatccttgtgcaaacacctgttaccttaggttcagggcatctgctgtcattcagtgaaggtcttctaaatctgtctgttgcaaagcaaggctcgccacaggctgtcagagtaaccatggaggtcggacaggacttgcagtggggacagggccccatcagcctctcacctctgctcagaggcaccaccctctgaacagatcagagcataaacaggtcagagcaattcagcattcattccctctacagacatcagggcaggcaccatgtagtggagagtggggccaggggccatctgccatggctgtttgggctggggaaggagagcagtacttctggagcatgtgctgtgctcagggccagctccctgtaggtaggttgtgggaatgcagaggtggcaactcaagcacccctgctggggattcagagttttgtggagaagtagatcagtaagcacatggataccagatagggttgtcaaggatgttgattcactgttgtccctattttcctaagctcgccacatcatggaaggctgctacccaagtgacattcttgggcttcaccaagtgttttaacagagctccacccagctgtcacactaggggtaacacagtgggccagaaggagaggcaggccttccctggggtcccattttaaaaagggggaagtcctctgttcttttacaacacttgtttaccccaagccattcagcatagtattacttaggtcccatacagagaaccttccaacagatagctctccttgctcaggcctgtcctgatgaactccctgatattcttccaggtcttaaaagagtgagagctgagcatttccctctctgccctggctgccaggaagctcagagataacttgtttgctcagttcctgtagctttcctgacccaggacttctttttcttataaattctccttgttccttttccaggaatgcttgctttttatgttttgtttgtttatgttgcttttgtctctgtattatactttggggggtggtttttggaggcaggattggcagcagccatggtagttagaagcaccagcagtaaagctggacacacctgggtttcatccccacttgctagctgtgtcattttaagtaagataagttgcctcttcagttctcggttcctcaccttgaaaattgggataatgatcataatgaatggataggttattgtgaaaattaaacttgtttattgtaaatgcattgtttcctgttcctgctcttggatcaggcttgatctgtggctgtagaatcctagtcttaatttccttcttcctgcctgtgtctgtcagcatatgatgagttgtacaatagtagtgactaggggaccaaccatcccggtttgtctgggacggaggggtttcctgggatgcaggactttcagtgctgaatgggaaggtcccaggcaaatggatgagtcggtcaccctggtaataaacaacctcaacatctcagtggcttactgtagcaaaggtttatttcttcgttgtgctactgtccatccagggccttggctaaaggaggagcctctatcccaggaaattgacagtcatgggcacagacagaggaacacatgttaaaggtcctttagaaagttgtggctgtcacttctgccctcattcactggttggggccagtcacatggccaggcctgccaccaggctgtgcagaaccttcccactgggtgggacagctcagcctggaacactgatccactctgccaggctcacctttctcttcttttgcattttagggtgctggagcagggaccagggaaaggagagagtcacttggtctgaactgggggtcttggatgtgatcatcttcctgtagatggtcggtatgggtttcttaaggggcagggttcagcttcaccctgctctgctcagaggagcagctgtgtctcctttggacgccttctagtggttgatgccctcacctttctcagctgccaaggcctctctcgacagggcaggctgggctgtgacttctcttccaccctccttgctccttcctgtggagcccctgagatcctttccccatgctcctgggtggaatggagggtgccctctcacattcttccaaggcatcttgcgcaagtccctccatgccctgctttctctggcggtccagcatgcctccatctcacctttgggactctctagcttggaagtgggcacacctgcagcccctgactccaggaccacaggctaggctctccccaaagcatcctcatcacacaccatgtggatggccaggtcagggcggccgtcagagcccaccctcggcaaggataccctctcaaaggcacctctgttggctcaaatcccttttggaagtagcccagaaagaggctttcttttttcttatcttttgttgttttatttattgttcttgcatctaagaacaccttcttggtcagaaaacagttttccagaaataatgttaagtaagtgtcacaactggtttagctccctaacctggtctaagcatataagagaggcttttgaggctgggcgtggtggctcatgcccataatcccaatactttgggaggccgagatggagggattgcttgagtccaggagtctgggcagcatagtgagaccttgtctcttctaaaaataaaaaattagctacgtatggtggcacatgcctgtagtcccagctacttgggaggctgaggtgggaagatcacttgaggccaggagttctaggttgcagtgagctatgatcacaccactgcaccctaacctgggcaacagagtgagaccctgtctcaaaaaaaataaaaaaggctttttgatttttgttttgcagaagtaccaaaatctatattagcatttattatttttatttctataaagtaaatttgagtattgggaaaattgatcaaaatgagaaatttcatatggagtttagtacttgaaatttggatccttcatctaaatttcagggaagtcagggctgggcatggtggctcacacctgtaatctcagcattttgagaggccgagatgggcggattgcttgagcccaggactttgagaccagcctgggcaacaatgcaaagcctcctctctacaaaaaatataaaaacaagccagacatggtagtggtgcatacctgtagtcccagctacatgacaaactgaggcaggaggatagtttgagcccaggagatggagattgcagtgagccgagatcatgccattgcactccagcctgggcgacagagcaagactgtctcaaaaaataattaaataagtaagtaaatttcagggaactcagagaacgagaaaggacatgaaattgttcatttatttagcatttgttgagtaccacctggagtgaggcacgagatcaggcacaggagacgcctataaataaggccctacctgcctgaagcttatgggaggtggaggagacacgcctacaagcagagaatggtcacagggcgtgaaggagcctgggcaggagctgctgcaggagagccagggagagaggatacagctctgaaggcttctccaggaggtgtgcccacgggcacaggaaaggaaagcaggagtttatcaggtgactgggtggttgaaaggagccacacctgcaagaaacgtgggcccagcagaggcagggtggttttgggaactcttgtcttttagtctgtcggggggctttgggtagcagatgggagggttgggctgaagactaagcagtgtttcctgctgggtgggtttgaactttgtttggaagacttagggggaacagtgaagctattgcagtggtctgagcaagggggtatcccgcctctgaccacagtggagaggggatggggctggagacgacagcagactgaacagaggcagtgacaaggatctggagggaagtggctgggcccatcccttagagggctgtgtgggggctgtggggtgtgggaggaagagaggaaggaagcccagggtaggttctgggttgctaatttgggggctgggaggatagcgtgtgacctaaacagagaatcagatttagatggaattacctatattaagcctggggatttcatatctatttgctgctgctttaccagttgaggctcaagaatgagaagcacaaaatttctggtcacattatttgcatgtgcccagactggggttaacagaatcggacagtgagcgttcctgaatcagactgcaatggggaatgaatgccttgggaggctggaagcagttgtattcgcagatattcatttggagatctctatagcgatcgaggcaaagataccccaaagactgcaagaattagccagtggaatttgaaatgccaaaattttttttcagaaaggtcaggaaagccccgtttaaaatctaaattttgccatctcaaggcagtgcagggatggattaggaggatgtggggtgacccttttcttcctttcagagccagtttctgccagacacaggaatcctccacatgagtcatagggtggagaggagacccctcagtcctttcagtaaggtgggagggcagtaccgcccggtggctaccatgaaccctgtttcagaatttctttcttaacttcgtgtgtgcccaggtgcacttgagattcactgatgttttctttagaccgaggagctcgcttcagcagttagtttcaggtgttggctctgctggcattatgcttcggcttaatgttttctgaagacttgttttctgttgtttttcattgttcttgttgtctggcttcaggccactaccttcaacctagcaagagctgagtggtgccttcagcagtgaggtagcttctgaaggccaccactctcttgctgtgtgactttggctagtttctccacctctctgtgcctcagtctcttctgtaaaacggagaacacaggagtatctccctcatagagttactttcaggtttcaatgagttaatctacataaaacaataaggatagagcctgacacaaaatcacactcaacaagttttcacaattatgattacttgacccagtaggagaaataaaaaacacaactaacttccttctaaggacatgcccaagaatccagttttagtaactttgaaggcattgtttttcaccgaaaatatctcctgccagattttttcatgtgtttgcagcttagctttaacaaggagctgaaggacggccaggcagcaaggggtggtgagtgccggtagagtgtgacgagctcgcccagccttcctccctgtaattaggagtcatgaaccatctacaccatctcccttagctaataagagatttttacatttacttacctcaaagtgacctgtctgggttttcttttcttgtggcccccactgtaggtttttggaagaagctgaccgcctgaaaagaaattataaaacatgaaaatcgctttgaggtgaccaagtccagaggcccctaactcctcccaagctggatctggggtgtaagaactgtgacttcaggtaacaaagtagtatcccctccctgccccctgtgaactcatgattcttggtagcttgcatggcagttcttcctttaggaagtgtagtttcttccaggaactctgaaacttggggtattctacctcatgcggttgtttggctggtcaaaaaagggagtgggggattctggaggtacttcatgtctgctgcatggcccaagggggccagggctccataaatcaccaagaccctgagggcagggctctgtactcattcctggccctgcttctgtaaatgttaatgacaaaataacaatgtcacccacccaacagggtctttaatatgattaaataatcatgaaatacttcttgaaggataaatcagagagaatagctaggaaatttccaaaaataaagagcagtaggagagtatttgttctgctagctattaaaatgtattctaaagcacagttgtaaaaacagtatagtactgtgatggaaataactagatcagaggaacagagtagagagtccagaaataggtgataaatcaataaaggtgtatttcaagttagtggcaatgggatgcatggactagcaaatggtgttagaaaaaatctcctatccattagagggaaataagaaattcctaagcttaggtagtatatcaaaataatttccaaatagcattaaattaaaaaaatcattaaaatcttagaaaaaagaatatttatattattttgggtaagaaaagacttaaaacatgtcacttttggtcccacatacaaatatcgtaaacaaagttaaaaagcaaaagggtgggaaaagtgtttacaacatcaatgatgaacaaagaattaatattcttagtatacaaatttattcgttcattcaatatttattgagcacttagtatgtactagaaagtattctgggcactaagggcacaagcagtaaataatgttcctgttctcctggtacttagaccctgatggagaggactgccagtgactatggtagattattgtaggtcacattttgataagggctaaggacaaaacattacgtaggtggctgggctagggaggcttggcagggtttgcattatgtggatattcaagggggcttcactgatggaatgacatgtgaagaaaaagggaaagtcattgaatgtcgagctgatagcacatttgctgtttttggaatgtcgagctcataggatttgctgatggattgaatgcgggttgtgaaagaaaggagtcagggtggcttctaggtttggggcctggcaaccagaaggattgacataggaatgactgagaggcttggcttggagatagagttttggttatggatgtttcagtttaacatctctcttgtatattcaagtgaggacgtcagggaggtggtcggccataaatatctgtaattcagggtgacatctaggctggagatataaatttgggaattgttgcagtgttgatagtatttgaaagaatgacactagctagagcccctggagagtgtgtgtagatacagaagagggcccaggacatccatgggaccctcccttagagttgagggagatggagccagctaaagagagcaaaaaggagtgaccactgaaatggaaggagtcccgtgagaagggggatctcccaagccaagagacagtgagaagggcgaggtcagctctcctctggatgtgctgatgggcaaggagagaactggccattggatctagcagtgaggaggtcactggtcaacccaacaagggctgttttatgggaatgatggggagagaatctgtttggagttggattattgagaataagaggaaaaaaactggagacagagaaatgggacaatagctggaggaggatggtattcaagtaagtttatttttcccaagatgggagttacataactcttgttttcacccaagtggaaatgattcagtagcgtggggagagtggatggtgcaggattgggctggggtgagggttctgaaatggtggtctcgaggaggtgggagaggtagaatccaggcatgagctggggaagggatcctaagtaggagcatctaaggaggtggtaggtgtgcacctgcctcttttctcagttcactaagaagcagagtcctcagcggagaatggagactaaggagacgatggaagtttgaggagagagggcaaagtatgaagtccttcatagcagaatgagaaaataaatggccaggggaatgaaggattgctgggcggcatgcaggcctctaaggggtatgtttctccagccatgtcctgttacacaggtgaacacggggtaggaggccattgtggtagaaaaacaggacatgagcagacacaacgtaagacagagaaacgcctgtaaagagaaaaagcaacatcagtaatagctgaagaatacaagtaaaaacaatgaggttttctttttttctctttagactggcaagagctcttgttggggatagaaattattgtcgcttttctggagcacagtgttacagtatgttccagaatacaacgtgtgtcccgttttgacctgtcagtcccacctttagaaatttattctaagaaataattgctcaaatgcaaggaaatatatgcacaaagatgttcaccccagcagtgcttatcaaagtgaaaaaatggcagtcatctaaacaggaggcagctggttcacttatctgtcggcctaacagtgatagtgggaaacagtagctcacactcaccctcctgttttgcagatgagggaagttgggtccagagaggggtagtgacagctccagtcctactccacggagctcagaccccctggctgtaggcaggcaccctgcccaacctcttcaactgggcttggagtcagagtcccttgcaaggcacttgtcaagcccttttcaagggccggtttgcttaatgcttttaaaatacgagttctcaaaatgttttgcaaatttgtttacaatgtcttcatttcatctcatggctttccttgcaaaggatgctgacagtggggggaaaacaggccgactgcctggccgtgatagaggggaccatattttcctgattcccaagtaagacttacagtggaagaaaggatattttctgctttcttacagtgtttacaaaagtcataacaggatgtgaggactatctggctgcaacatctgtcaccccattggtcgccagagttgattgggctgatctggctggttaggcaggtgtcccattcctccctcaccactccatgtgcgtccctcccaaagctgtatgctcagaaaggatgaccatccccgatagaggaggactggtctttggtcaagggtatatgagtagctgcaatcttctgctagggacccccaaacaagctctcaaaagtcataacaggagtacaaagataataaggaacttgcatttatttgtttccttgatcatatgtttattgattagaagaaaataaaattagcagccagccgtggtggctcacacttgaaatctcagcactttgggaggctgagacgggcagatctcttgaggtccagagttcaagaccagcctggccaacatggtgaaaccccatctctactaaaaatacaaatattagccaggtgtggtggtgtatgcctttagtcccagcttcccagcgttttggatggctgaggcacgagagtcacttgaacctgggaggtggaggtggtagtgagctgagattgcaccactgcactccagcctgggtgacagagtgagactttgtctcaaaacaaataaaaaataaaaataaaataaaattagctttgtgtgtggagaaaagggaggaaaaataattagcattgtcagagaacatctgggttatttggtcccctccgtgggaactgccctgggttttcacttctagagtttctggttctggtttaatttttccacgccacagcacagggaccgagaagctgctcagcttctctaggcttttatgtcttcaccagaaaaatgagcgggtgggcttaaatttcctacaaaaactcttaaaataaatatgatgctctttccattctatcacatgcctgttctgggtccgggggtgtgagagatgcattagtgctgctgtaaaccagccccgggtctccccccccggccccccaccaccaaacccccaagcaccaacctgggttctccaccacttttgagagctcatcgaaataaacacacctttgtgcctcttgtaacaattccagatcatccaatggcagaccagagaatggacatttcttcaaccatcagtgatttcatgtccccgggccccaccgacctgctttccagctctcttggtaccagtggtgtggattgcaaccgcaaacggaaaggcagctccactgactaccagtaaggcctttggggcatgtcttcctcttgttaaacttggtgtcagttctcgggcatggaacatctagcagccagctactgtttcatcctggaaaaggggatgggaataaaaaacccaactctaggtggcgacacagttggtttttggctttaccttcccctagtttgtaagcaagaaggagccttcagcagtgctgaggcatttaacttccacttcctgtccccaaaatgttctacacccagagaaaaagaacagccttaaggccaagttctgtcttttacccctttcttcgtcttctttctttgctcctttgagcaagagggttaagtctatgggtgtcatctcagggggttcaaagagagctttgcctgagggcctctctgaggaagacagcaagtgtcaggtgcttaatgaatgtttatggaaggaatgagtggaggtcctctctgaaaacaatttaggaacattgatgttgtccttaaacattatttaaattagtatgaacttgttatattaaatagtatttttgtttatttttagacttgttgacttttcgtttgagtaagtaaattttcacacttacagtcatcccttctatatatgtacaaacacctagggaataaggcagtgtagaatattcaaaggcacattttgttttgccgaagcacctgcgtggaatcttacccaaatgtccatttaagaggttttcttttgtttaatgagggaaaatctccgaggaggtataccccctacagcagatgtcctttctgctgaagttcacaggtcgaatttggggagcacaatggctggaggtcagatgcccactaggagatgctatgattaatatgtaagttatcccagatgattaagacagccaacacccaggggctggagagtgggtatgagggctgtgagggcgttcttccatagcagtaactccccagcagaaagactgcgagatgttggccacaaaccctttgtcttgagcaagcgctaagggagccactgatgtgttctaaggcctctgtcatctggacctgtgggttccagcctggtcaccacccaagatttcccttgtggactctggtttgctaatcttctgtaattcatggagactcaattaattaagcaaccttaatccctttcactatcattttaatgtaactgaagtcatctgtgactgtcaggcagagctttttctcacctgagattatcacctggcctcaaggaacagatagaattctagacaaaagggagaggggagtttttgtccttccgtgcggcctgcgtgatctctgaactttagaactagctggggaaactctctgcctgtgaggaaccccagggcgtctaattgggaacactgttctagaatgcccatgatatgatccagtgctcctagaaacagctatttttgcccttgggattacattgtttgaagggccatgctctctcctttcctgtgggataaaggaaaaaggagagaggcccagctggcagtccatgccctcctgataaatgtatggattggagaaggcggtgagggggatttggaactccttcctctggggatttcagtctgttttcttctactgaaccacaggatgcaacgaaacttggttttctgaagtctgtgaaagggagggagatccttgctgtgaccccaggacttctgtggccctcagccccactacgcccctccatcccaattcctaaaatctaggggttcccacctacctgagaagcagaatatttggcagtagtgcctttgaaaagctgcctggggctctgctcagtactttgttggtactttaattccaccctcctcacttcgtcccttccctgccaaatagatatgtatgcacatttatctttgatgctcaatatgttttgcaaacagaataagcttcatttatccagaatgatggggggggagaatgagaggttatatagatatttcaatcctatggttaactaagcatttttataaacactacatattcccaattttcaaacaatcagaatatggtaaaatatatgttaacacacaaactcttttgagatgataacttttgtttgataacctgagaagctggtccaggttttatagtaagttcaagttaattttcatttgttttacccttattatacatcattaattgatactgtggctgttcgaactttatgattgtttggtttctggataaatgagagccttctgtcttatgataagaagctcttctgtatgtctttattaacatgcagtcacattctcttttgttttttcagagaaagcatggacacagacaaagatgaccctcatggaaggtaccatgaacctagtaatttgaacttcagcatccttatagccattttctttgcactgttacacattctgttacttggggcagcacccatgtcctcaactggagatgagcaaggaggccgtgagcctgtgggcgctcactgtgtccctccaacccccagtccccttgtgtgtctgcagagagatgacaggatcaggcagaagaaaacagcaatgtgtaactttgccattcatctccagagaattatgtttttatcttttgctttttcctccccccaggttagaatatacagaacaccaaggaaggataaaaaatgcaaggtaagcttggaccttattttgtctacaaagcatcctagttctggttgcttagagagcagctgaggaggctctgcatgtttggtcctgtctaagagttctgttgggcactgtcacctccttagggaataggcaggtagtgggccttggccgaggtggccttctgccctccatgctctccatactggctggcctttactctttgctgtctaagcacctttaacctgaagtggatttgaaggtagcagaaatcaatcaaggctcaagtttttccccagtcttcagcagagaacgtcttcctgactggagcgccctccgcaggagacatggctcagtgatttggttcctgggctgggacttgcctctgtcaggggcccctattgcactgcgagttgcaactgaatgcaccacatggggcatgctcggtgtctcgagtagattctctgcctgggtctgtcctgcctccagccacacttgctgacctcttcccattgcgtcctcagttcttctgccgttagtaccaggctgtgttctgaggctgcgtcatgacagactgatacagggggctgcagaaattggctgccctaaggcttcaagctcttccctcggaggccagccttagcaggagctcccatggctctgtatctgcggcagctgcagcaaactacatttccatcgttgctgcacctccttaggaggaccatcaccaatggcaggtgcacatcagtcagtgtcaccctgcctcagcgggaggagtgtgacattcctcagaggaggctcctggggacagatgtagcatctgctgcacctaggtggggacctagttttgatccaaggatgacggcgttggttactgggtgccctagtcagtgaggctgtgactggaaagaattggtgccctgcccaggtcacatggccacacagcgggctcctcacagacctcagggacagcccacggggctctggatgctctgtgctatgaagccaccacctcccttctctttcctttcacccccatttcaaaatccaatttgacaaaggctgagaggaaaagaaacgaggagaaatgaacaattcagtttactctgaagagacaatttttgtagcttttctcctgaattctaaagatgaggtaaacataaaaaaattaatactgacctggcagtgagaccattttcttggagactttagttgaaaagtctaattttaaacattctgcaaattctaaatttgccttgtcagatgaacattgaaaacagttacaactcatttatttttgtcatcttttcttgatgcttggttacattttataagaaatcgtttttcatattgttgttcagggaagctcacagtcagattgaaaagcggcgtcgggataaaatgaacagttttatagatgaattggcttctttggtaccaac

SEQ ID NO: 15450 - DNA, 80126 bp, Homo sapiens
accctaccccagcaggcgctaaaggagagctgacatgatggataacgaaaaagaagacgctgtccttctattcagggagtttaacatctggaagagccgggagttctttgtgctaaaggccctctacaaagtgcctgagatgcaaaaataagtcactttctctgtcctctcagcaaccgagtcgcatgtcgttatcaaatttttattttctgtaactgtttccttccgtcttgctccgtagacagctttttgcagcagagagcgctgccgcggggctggtgtctactcttcagtaagtggtcaaaacctggctactggaaggaaatgcaatggaatcgctccgcgctcgagtattctctttggaactacgggaatgacagctccagtgggacacttggaggtcatgatgaacgcaaagaacgtgagaacacttgcagtcctcggggtggaaatgccttctagaaatactaagtatccgttctctcgttgagactttggcaaaccagggattttaggaagggtctggcactcaacgttcctaaaattggtttcctagatggagccggagggagagagggagtcaggaactgctgcttttcgtcggaatgcccggaggggagaagaagaaggaggaggggtgagggcgggcggccaaacgccagccggcaggggacccagagaagagggacatcccgggcgaccccgaggagcgcggcttgggcaccgcagtggccgcggctagtgggagacctgaggggaaagggagagggcaggggcgaggaacccagggagcgcgcgcggattggtcctctcctcggggcgtgcgctcctgtgcgccaaatgattggtggcaggaaagtagcaggtaaaccggctcccgccgcctcgccattggtcagcggcctctctagccgccacacaactggccagcgggctgccgagccgcgcgcggattggctgggggcggccgccgggaccggctcccttcgggcgttcggattggctggcgggaagaggcaggtatccgggcgctgcggctcctccattggtgggcggggaaggggggttgggcacagcgattggtgggcggggggccgggcctgggccggcggggagcggattggtcggaaagtaggttagtggtgcgacatttagggaaggcagaaagtaggtcagggacggaggtgcctgtttacccgcgccggactcaccgccgccgccgccgcgggatccgagtgcgggcgcgggcgcgggcgctcccggcgagccacggtgagtgtcaggccggcggcggccagcgacgcgatcccgcgcaccccgtcgggggccgttagcaccctcgcgggcgctgcgcccctgccgccgccccgggggcaacccggccgccgaagaaccctgcccgacgtgcccgctgccggccttaaagggcccgtgaccgctccctgcccccacccgggccgtggggaggctgcgccccttaaaggcgccgcgcccgtccgcccccatcctcctcgcgggggctgccgctgcgggctagggcaggcagaggtgctgcaggagcccttaaaggggccgggaaagtgttcgctggagtacccaccgcccttccgcgggcatcgctacctggcggggggagggggcagctagctgcctcttaaagggatagctctgcccttgggggcagtgactcggccgaagaggactcctagatgtgtccccgggagcttcggggatccccgaggggaccatgcctggtggctgcccctcaagggcgttgggcgaacggtgccgcgtctgcccttcctccccgcttcacttccctttcgggagcccgcgaggctgggtgggggcggggagggcgtctccgtcgggcttggggagtccaagtccgcccgccccttcggccctgtagccagggctggcgctgcacccgggaatccccggccggcacggggccgaccccagcctgcgaactttcgtggggcctgtgccgtccaggtcctgggcggccctcaaggatgccccgtgggtctgcgggcaggtgcgcgtcggcctggggatgtcgcccggagcccgggtgcgggccggccttggagtcccagagctccgcggagggcgcagcgagcctggctccagctccgggtttgacagatgtcagggaagaaaaggttcccgctcggctattgccgggcgttgacatcccagagagcttcccgtttgcttggaagaagacgaggaaggtagaggtgaacgtcgaccttgtggggcgcatgttagcctccccgaggggtcgcgagagccggcagcggggtgagctcaggtgcccgccggcaggagctggggagggaaggggagtgctggacaccggcgcctgctgtcaagttctcgccggccggtgagagacccgctgccgccgcgcaccccgcacctcctgacccctctcccctctccgcctcggccccttcccggtcacctagcgttgttttggcgctttggcgcttgcggtctcttccttcttccaccgctactcctcagcgaggaattattagccaagttttctcacccagcttccaaaaatcagattccgtatttgtgaacaagcttttcttgacactacccgtatacccgtatttccagcatcgtcgttttattaaacatccataaaagctgccccttagatgcattcatttcccacgacacctgcttgcttgtcatttgtccttctgacatctgctgttgttcacccctttaatctattattaaatgacaactattattttaattcttctggtctcattgatatccggatctgtgaatttgggttggtggagtttttaattaatgtacccgttgaatcatgagcttaaaataatcattgctgctcctgagcagttttgaataatatcatgctctctctgcttgcaagacttaaaaaaattcgctggtgttatatttgatttccatatcaatggaattcccaaatatttttgaaaatacaaaattcagtctttcagtccatgttttgttactcagatcattttactgataagtctttaacgcagcttatagaacatatttagaaggtttggaaatttcctggacaggatttgaaattgcctgtatcatctgaagctggttctgtagaagcattttggttttgattgtagatgcagccagtgaatgataacaataagttaaaactgtagttaaatttgttctttattcaaccctctgaagaacgaacagatctggtagaaaagcactaacctgggagttaggagctggacatcctggttctagtttaggcttgggctctcatggccgttccagtcggggcaagttattaaagatttctaggttgtgtttgcctctgatggaaagtaagacggttgaactaggtgatctcaaaggttcctctcttttgaagttctgtaagtctctaaatatttaatacatttgaattcaggttggtatttacctcctggcacctccagaatatctgagctgaagccctattttcataagaaagttaagcagatcaacagatggtgttttgaagaatccatttcaaatgatttataaaatgatgactacttacgagtttgtctgctatttgcagaagaggtttgcatgccacagggcaggaaaaggaagtggccatgttttcagatttatcccttcacaccaacaatctctgtggaatttatatgctaaaagatggagaagcaccatagaaagatttggctgtattaacaaaactgcatatgaaaaggtaaaaactagatagttaatatctctctttggtgtaagggttataatgtatctgagctttctttgtgatttcatcatcaactctcactgtggtaggaaaatcaatattaaataaacagtttcagccccgtgattacatgcagtgattttaggaagcatcatgataactaaagtaggtacttgcagggaagtaaaatatcctttctagaccttgaggtttcgttgggagctagggacacaggcatgttatccttctccacagtcttttttcattgtcaccttatcacaagactcagatttatcccaaatacccaccttgtcttttcttctccctctcatgaaataagacctgctctgactcaaccccctcagcatctcttacttcccacccaaaatgtcctgtctctatccccatcgtcccctcatctcctcccaattcagagaaagcaagtggacctctcctctgttccttttcttggcctctcaccatgggcaagtgcctgggctctggtggcagaagaatccatggctcaggtttgggctttgtggtcttggatgtgtgcttgactcctctgacctcaggtttctcctcttggtgtaatggcagtgcctgcctcgtggagtctgtgtgaggattaagggagatggtgcatgtaaaaggcctggcacacaggaagcctttcctttgtgccagctgccattccttctcacctctacccgggtcctatcactagaatattatttgtgctgtttgtccttagtctcccctgccccaccctgaaaaccttaggcttgacttaggagaggaaggatggaagaggcagagtcagacttgtggtgagcctgctgtgtaccaggcaatttacatgtgtctttacttggtaccctgggttcgtaagcctctctttcctccctcctgccagcctcccccactctcccatctcctgctccattcttagtacctgccctctggcttctctcgctaccacctttctttatatttcttctcaaagttttctccaaaactttgtcgtgagttcctggggcccatctgcccatccttattcctgagtggttgttcttggcccctttgcagtatttcttttatttttttaaacatggtctcagtcttgcctggttggagtgcagtggtgcaatcgtggctcactgcagcctcccaagtctcaggtaatcctcctgcctcagcctccagagtagctgagcctacagacacgtgccatcacacctggctcatttttgtatttttattagagatggagttttgccatgttgcccaggctggtctcaaactcctgggctcaagtgacccacctgcactggcctcccaaagtgctgggattacaggcgtgagtcactgtgctcagcccctttgaagcttttacctcacttgttttttgtcctttgaaatcctttcctctctcagcctttgggtcatgctggtttcttgattctcttcctgcacccctgtaaagataaatgtctgtcctagcttctgctattcacactgtccgtggcctggggtcccctctctagccctgacctgtctctcctgtgttctgctagcaggtccgttgtggacatgaatggcagcctgtaatctgcatttgtggtctcggagttacaggtttgcagactgcttgcaagcactgtcacattgagtcctcatgacacactggagcctacatcccttcattccccaggctgtcctaaaaggcagtttggttgggtagtttagcatacagactctggagccagatttcacatcctaagtattccctactggcttcgtgacttgtggtcaattttcttttgctctctatgccttggtgtcctcatctataaaactgggatcatagtagcccctacatcagagagttgaggtgtggattaaatgagttaaagcattggaaaaagtgtgccagtctattcatggcacattgcaaacactcagtgaatgttgctgtcagtcttgctgctcttcgttgccttgccggggtgccttggcctggtttgtagtggtctccacattcagcctgcctgtctgccagaccttgccatgtgcctggacactgtagtcaagctgaggggctgtccattccctgtaccagcccttggcccagtccatccctcaattttcacgtgtccaaatcctcctctgcttttaggacccagggccttggtcctgcagcactatttcttcattttgttttccttcctccccacacctggcagcaatgtccacattgatttttctccaattctcttaggttctgctgcattccatattgtgttgggctgtctctgaaaatatctcacctgctcgctcagcctgagcattctgggagaagtttatcttgctttttccaaaatgacaggcacagggagcctttaggccatggttgtccaatgcacattgatcttgtggaggaggagatgggatggggtgggcactcagggacggagcaggtggagggaacaggatgcacactgcatagaggtgggggtgcaacagggccataagtggacatggccgtaagtacttaggtctgcatggaaggagggtttgaattggggacttaacctcagggggagataagattggataaggtttagtcatctttgctgcaggggaacgttgagtactggcatgtaatggagagtggtttttaccttagtatgtgctgtccttttaaatagtgtaaactaattctttatctagcctggttaaagaaggggatggctggtctgcctaatttaatatttggctattgctctacccactgggttttgtgcatatactgaatgaagcattggcttgtatttattccttcaatcactgtttgaaatgtctgacctgggcaagttaattagcttctctgagtgcaaaataggaataataattattacgataatagcagctaacatttattgaacactttctatgtgccagcacatatgtgagtcacctttgcttattaactcatttaaaccccataacaactacatgaggcaggtactattatccttacttcacaaatgaggtggttttataaactgcccaaggtcactcagctgttatggcttggggcagaatttgtgctggtgaactccagagtctgccctgtaacaccctagtagattcctactgggaggaaacaccccgttatatcccttacctcactcagccgcaccatgccaggagcctagtaggctgacagcaattgggaaccagtcttattgttgacaaacatggtatgagcctcttttagagcggagctgcctgaaaccctccgcataagggatgcggacctggatgctacctgagcagcagctccaggggcttgtgaacattctcctcacatcctgttatgcatggctgtctctctggcctccccctgctttctctgcagcattgctctgacccaggccccctgtggctcagccagctcctccccaggcagctccttgtgtgagatgaaccttttaacataactcactaaccccacctcccaccctcatctagccatctgcagagctcctcactggggaggggaccttttcaaaggtccctcaccttcgtccttttctccctgaagaccaacgtccacaactttggtatatccacagtgttggggtgtgtgtgtgtgtgtgtgtgtgtgtgtgtgtgtatatatatgtgtgtgtgtatatatatatatatgtgtatatatatatatgtgtgtatatatatatatgtgtatatatatatatgtgtgtatatatatatgtgtatatatatatatatgtgtgtgtatatatatatatatatatatatatatatatatttttttttttaatgccagttgttccccaaatacatttagatagtaagggacacattgttttatgtcaagaacctgttacataaaaatgtgttatataatgttcaaatatatactgcacagtgaaattagataccactttttttttttcaaagaataaaaggataataaacacaggccgtcctgaatataattaacctcagatttgggaggcatggaaggacgtgccctgccctcagagctctcgtcctgagctctgcctttcttgagtgcgccgggagcaggatggatgggaagttggcctgaatctgccatggtgtggtactgtgagatgctctggaaattgtcttttttttttggcggggggtgggggatgccttcgcatcttgctcacttgtatctttctcacacctaagcagagggaagaagctctttttgccccctcgtacttagaccacccaggtcatcttttgaccagttttctgctctgctcaactcctttcaatcttcccagatgacaggccagctttgcctgctaagaacagccctggtgccagtggcatgcaggtggcacccctgtgtccagtcttccaggctctccagggtctggtcctgttcctcctccccagccctgcttccccgctcaacctccattcccagccacagccctgtgcccgaggttcagtcctccttgcctctccgctgtcctccctaggccacctcacttcacactctccctctggctagcggggtctttgcttaaattgttcccttgaggcctctcttccttgcccgtgcctgccttggatctcacttctctgtgaggtacctctgataacatttgttccctttgtgtgtgctctcccttttgctcttgattgccaaccattcattcgttcagaagcaggggtatgtcataatgagcaaattaccatatcatactgaatcaggatggccagttgtctcattttttaattgtttcatggttaattatcttacgctcacttcccactctccagtttcactcagttactccgtcagtgaagtttattggatgcctagcactgttgtgggcactgaggatacagcagtgaacaaaacaaggggcccgcaggaggggacagatgatgaatagtgaaacacgttcatgccttgttgtgagaagtgctaggagtgctaggatagcaagcaaatagagtaaagcagtagcgatgaggtatggtgggagggagggtaccttatctagatcacaggggagacctctctgaggaggtgacatttgaacttagcttcagaaagatctgggggaaagtatcccaggaagagagaacagcacatgtaaaggccctggggttgaaaggtgcttgatatttttgaggaaagtaaaggctagtgtgactcgattatgagctgcttgtgtacagatgttttctgcctcttttatactccctttaaccctgagcccagtgttaggaaggccttgtaaatacttacatacagaattatagcatttgtcattggttatatattataaaatagtaattttataaaataataatttatcataccctgcttagaaggcttttaataaaacattatattgcatataaacaaattaagggtttgaagggttttcttataaatgcactcctagcatgtttcaccaaatattactgttttaattgtgtttagtgcagaactttagacctcataattctgcttcatgtgcacaaccatcttaaaaacaggttttgttccaaaagtttatttgtaaggcactaggtggaaacttgggataaatttttctataagaaacaatgaagtaaatagtgatgtagtttctaggcgagccctcaaaagctatttagtggtgactgtagctgaaaacatactggttggtatcagcagtcgtcaagccttctgctggtagaccctcctctcagtagcattgtacctcatttgctgttagcaatcataggacccatttacctcagtcacttctcctactgtattttcagtctgttaaagttttatagaagggattttttacctttatacctttaagatttggttgcatgtgttataaatgagacagtagtgcagagagtggggaaaactctggactgggagctgggagaggcctgggctccagactgggcccagccactgactggctgagtaaatttgagtaagttatcctctttgaactttgatttctcaggttcttcttggctgtaaaatcctattgttttctcaccatagcagggaaacgtagatatacttcgttgttcaaacctgccctcaaatggctgcctctgatttcttcttgaagaagtatatggcactcagcaatgaggaactcaagcagttccccatgtgcagagctctgcagtgacattctcagtaggaaccttgattttgatctgctatctttcttgatgagttgaaagaaattttgtcccagaacttttggtccagataagatttctgtgttcttggccaacttatcttccatataattatgtaaattgttttttctttttaactcttagggataaaaatggtgactctggcttgcctgcttataaaatatagttataagtgcccttagggaatggaatgagtttgcaggagagagcagagctgaaagagtgtgggatcaaaaacaactttaaatgttaaatgcaaagctattttcagtaccctgctggaagaaaaaatttttttcaaggttttagaggatagaagaggtttttgctccaaagaagaaaggaacctaaggttttgcagtggtgaaaagtacctgatcctttaaccaactaccaccctcccttcccacctctgagttttgttttcgacatcatgaaccacatttgccatttgagaggtttgatatttaagtgacgttagtggcagagctcaactggcagtgttcaaatgacttaggtgcagagtgctgtgctgcaaacttccccagtgcattctagggtaagggatgcctcatagagagtgacagagcacttttagctctgcctctatttggtcagttgtgaatggtgtgttcctttttttccttacttgaaggcatagcgaggagttggtacaagaagttattgcttcatggacttcactttggagctagagggtggcattagacctagcctgccttcttggatgctggaataccagtggcaatgtcatctcttgttctctgctatacccctagcaatgaaaacagtgtctgtacagaaaagtctctcaataaatacttgtttattccttcaaaaagtgaattcagctttggataaatttttaatttcctccactctctagcagtataggcttatgaggttggtcttgcaaggtactttggagtttaggttgccatttctttttgacatctgtgtttttcttattcttcaggttggtcaggtatcagtgtcttttactgatgatggttgtccctgccctgctgatgttcatcttctgttatctttaattggctccaaactgcagcaaatctatagctgagccacattaactaaaagaaaacttgttgcatatttatttaggcatagtactacacatgtatttattcagtcaacaaatatctgtgagtctatatgccaagaatgttactagacccaaaggaagagcagaaattgttgttgtgaccaaggagcctgcagtttgattgccttgtggaacatctttatgagcattgtagaagggaggaggcttcatagaactggtcaggttttcacctttaaggatggtaggatttcgattcacagacaaggtgaggacaggtatttccaggaagtggctgagcggaaacagcataattaaaaacacagaagtaggaatggaccagtttgcattcatggacacagacttgtctaaaatggaaggttcttaaataatggtgggaatttaagtatggaagatcactgaaggcccaaacctgaagccattttagacacctagtgacttgcctaaagtgacagctgataagtggtagatccaggcttaaaataaggccatgggagctctcgaccactggcactggacttggctgtttcccagcagtctctagatgcaggatttgggtttgattggggattttcttttttctttctttctttctttctttttttttcttttttttttttttgtgatggacactgagattgggggttttagagtcatgagctggaaataggcaaggctctatttagcccactctttcattttgcagttggggaaactcagtgaggttaagtggcaagtcggagtttacctagtgagtcagagactgctaggcaatggataaccactggatttgttttattatgattatgattttagtgacatgaaatatttctctctaaagcatcagtccagtgttagtgttccagttggattggagcaatgaaggactaaatgcagcagagacctgacaggaggctgctagatgaatccaggaaggagagagagaagccagaactgagaattaattgtcaattatgttaatcagcatggtgttatcagtcaccctttagatttctagagtgcggtgaacatctgcctgtgtgagtggctttcaagtgtgtgaatctgcactgtactgtgaccaagataccttaatgaattctccagacagaaagtgccactatggaagtcgaatgttttaaaacaaatgcccacattttctggaaagagcaccagattaggagtcagatgacctgcattttaggctgcttctgctgcttagtcaccatatagccaaagcaaatcacttaatgtctcaaactgagcctgactccttatctgtggaacaggtataacaattcctgttgagcccttttcagtgtatgtgtgatgcttgtgtgagctaaggaaagaataggcattttgaagctgtaaagttgctttctggctgcagggagcagcagtgcagttttaatagtgaagatgtactggcccttacaggaatagcctaggagaaccagaagaaagttcccctacctccagggcatgtttagggaatctggcgctgtccaccaggtgggtgctgatgtgtactactttattggatagggccatgttttttgtttatttgtttgtttttattatactttaagttctagggtacatgtgcacaacacacaggtttgttacataggtatacatgtgccatgttggtttgctgcacccattaactcatcatttacattaggtatatctcctaatgctatccctctcccagccccccagcccctgacaggccccggagtgtgatgttccccgccccgtgtccaagtgttctcattgttcagttcccacctataagtgagaacatgcggtgtttggttttctgtccttgtgatagtttgctcagaatgatggtttctagcttcatccatgtccctgcaaagaacatgaactcatccttttttatggctgcatagtattccatggtacatgtgtgccacattttcttaatccagtctgtcattgatggacatttgggttggttccaagtctttgctattgtgaatagtgccacaataaacatacatatgcatgtgtctttatagtagcatgatttataatcctttgggtatatacccagtaatgggatcactgggtcaaatgatatttctagttctagatccttgaggaatctccacactgtattccacaatgattgaactagtttacactcccaccaacagtgtaaaagcattcctatttctccacatcctctccagcatctgttgtttcctgactttttaatgatcaccattctaactggtgtgagatggtatctcattttggttttgatttgcatttctctgatgaccagtgatgatgagcatttttttcatgtgtctgttggctgcataaatgtcttcttttgagaaatgtctgttcatatcctttgggatagggccatgttttaaagatgattacatttcacccccgtaagcctgggcatggacggaaaagttaggcatggatagccatgtgaatctattatctgtagacacctttcaggatagtgacaggcagctgtgaaccagaaaaacaagtgtcagaatctagccagctggccagtctggcattcttggatgtttcatctgtcctggggcattaggcagcgatccagaggaaccttgattagcctgggggattcatggctgagccagcatgctgtccaggtaatacctggctgcaaagcctgactggagatctgccaaatctaaatttctgccagcattacaagtgtatatattattattattattattattattattattattaatagcagtatctaaccttgactacctaccatatgccagcaactgtgctaagtgcttacatactttttctcattcagtcttcacagtattcatataaggtgggtaatgtcagttctgttttctagttagagagactgaaactcagacgagcttcagctgatacatactaagtgtaaaagccatgattcaaactcagaacagtctcagtccagtgcccagctgcataactgctatgttcttctttctctcttttcctggtacctgaaaatacttcttgtctctggttttgaggtttctgactgtgttattggttgatggatgggttgccacacagaggctcagctcagcacagctcttttttcttcatagcttatgacggacatcctcctggatactctggctggtgagcaaatgggtgccagtggtgaatgcagcagaaagactaactcttgccagctagtgcatgtgggtgaattttaaagacaacaaaagaaatttctgtaggtcagtttttcaaagagtaactggtagcttgtagtctacttaaaggccaagtttgatgttcatcaaagtcaccctgtaaaaacctttccaaatgctgtgattctgataacaataccatagaacattcctgtgtaattgacaagtagtttttacatacaatgtcttgtttagtcatcatcacaaccctatgagggtttgcaactacatatagttgcaaagaagactgggagatatctttagttgggaagccatgagtctagcaaaatctctgtttttaagggtggcgaggggagtgaatgaggggagctagcaatctgatgtgttgtggtggtgatggaagggataagtagagtttgaagctgttgtcagtagagttgggaggatgcctcctagtctatgacatctcctagtgttatgacatctcctcttgtggactgggaaattgcttagagtttaagcaactgtccagggttctacaactggtcagcggcagaggcagcacttaagtattgcttttgtgacttaattcactctctattcaagtttcatctttgctttctctattgaagttcttaaatattctgattcactgtatttagaagtcggcaggaattattaaagtgaacttctttgtggtatacactgttactgaatcagagtaaataaaaggtcacatgattggttgttgtgttaggtttaattgacgtgtactctgtatgatacagaatactcacatatcttttgtgggatatcattggtccaacagctttaaaaatcccaaggctttaatagatgataaaacacggagtttgtgtaatttcttgaaaaagttggccatcgagttcttggtcaggaacacaagcttcaattgtaacagtttccatggagacattagccttggcttgcatcatttcagctttcagtgcctttcctaggaatggagtgaactgctaaaagaagagctctggttgtggttgtcacttagagctctctcccctactgtttctgctggaggctgatttgcttttctgggtcttctcagttttttctgtgacctaagcataaattgtctttgagatcctggtaatctcatattttaaaagttttccacaaaagacaactgaatggaacacttttttttttcacccctttaaagtatttaattggccatcaacggtggctcacgcctgtaatcccagcactttgggaggtcgaggcaggcagatcacgaggtcaggagatcgagaccatcctgctagcacggtgaaaccccgtctctactaaaaatacaaaaaaaaaattacctgggcgtagtggcgggcgcctgtaatcccagctcctcgggaggctgaggcaggagaatggcgtgaacctggggggcggagcttgcagtgagccgagatcgcgccactgcactccagcctgggcgacagagcgagactccatctcaaaaaaaaaaaaataaaataaaatgaaaaataaagtatttaattggtggcaaggggctttgctagaagaatggacacctggtctcactcaagcttcttgtattagttgggataccaggtgagtccctctgttaaagagacccacaggcacaatggctgaaaccaggtagaagttttctctctcatgtactagtccctagtagatagtggtccaggcctagtatttttaacacatggcttccatttgatggttgaaggtaaaaacttaccatctcccagaggaaacacccaagggggcacacatccagtcatttttaagggaaagacccggaagcagcacattctctttttccagtagccggaatttgcaactacatatagttgcaaagaagactgggagatatctttagttgggaagcaatgagtctagcaaaatctctgtttttaagggtggcaaggggactgaatgaggaaagctagcggtctgctgtgttgtggtggcgatggaagggataagtagagtttgaagctgttgtcagtagagttgggaagatgcctgagtcaagggtgagaatctaagcaggcacacagaaaccagggcatgtgcagccatctagaggtcagggaagctcttggctctgaaactaagcagtggggggcacccaggcatggaagggaatgtgaattactcagaagacattaggttgtcagtaaaaggaaattcaccagtgtgactgaatcagtagaaagagcacttagactaggagtcagaagacctaggtttgagtccagcccttttacttcataacctggggcaaaaaactcccataaatatttgctttattatttagataatggcaataacagtgatggcctttcctgcctcccaggcttagtgtgagaccaaagggtgaggaagtactgtgtagactgcagccccatggagatgtgcacagtgtctgcccagcccagggcctgccatgggtgtatttgttgaatgaagtgtgaactattaaaagagttgggaaaaatgcattatactaaggagatcttaatcctggacagtcttctctaccaggcagaaaggttctgctctccactggtcaaggccttgggcctatgtgtaaaactgggtacctaacaaacacatgggcagacgcctgcagctccttactgggtagcacatgacacatagtatgtccttggcaaggccatttgctcattcctctgtgtaggtaaccaagtgcaacagaagtggaggtatagcccatgaatgtgaactaatcatttttaaatgatttggtccatgggcaggttagaagatgaaaccttcccaaggccaccaaaacttgatttcttgcttgaaaatgataagatgcagttataaaatgcttctgttgatttggaaaaaatgtgtgacttgttcaaaacaatatgtattaatagaaaatgtaacataaataagaggatacaaaaaagagcttaatgtttctatcttctgggcctagcaatagtgatttttttttccttttggtaggaaaatgggggctcagtggaataatcagttttatttctttttcttttaacttcatgaagggtttgtattgttcattttgttatttaatttgttcatttgctaaggaaagaacttctttcttggaactctgcggagtgtttttagatggactttactggaaaaaaacaggaattgaaattatattcacagtgcgctctaaactcttttaaaatctcatgcatggatggaggaaaatgcactgaaatatcaatagtggttctcacctcatggaattagaggtgacttttattctcatctccttctctgtggtttcctatttttcaacgagtgtgaattacttttatcatcatgaaagaccagttaaaaattaatctcacaaattaacactctcaagccaaaccacgaatttttgtttttcacaacctggcttggactataaactgtcacactatctcagacctatgcagattcttttctgagtgaggcattgaggaacttgttataaagatgatgctttccttctggaaatcaagaaacaagccaagggcttataatgtgttaggaaagatgtcctgagtaactttcctcctggaatctgactagcctttattacagctacttaaggaaatgagttttgtgggttccctgttcactgtgtcaccatttttttctttatcctgtactcatatgtacctcagggtccccagattttcttatcctgggattgcatgaccttgtccttggctctctcgggcccctgccgtttccagtgttctctgttcatgttcacaatattgttgatttggctgtggcttcttcccgcagtgttcttgtagactgaagagagcacattgctgcccttgtccctgtgcagcttcctcttcctctttatcattgctcaggtgagtggcctgagcagtgctcctgggatgaggtgaagagaagcagtcaagactgcagggaagggctaggggtgctgagctggccgagcttccctgggggaaggcactgggccatctgtccagcagcagttggcccacagctggcagggcaggctcaggagtggctcttgaagatggctgcttggtgtttgaagacagttcccagggcatgcattcatttgttgagcaccttcaatctggcagcctgtgttctagatgctggctgatgaccaaggctgacatggctttggctgtcatgggagtttcattctagtggtagagggagagagagagagacgatgtggtagagggagagagagagagacgattagcaggggaatcaatgaagaagataattacaggttgtaagaacagccccagaggaggttacaggtgcctgtttgtcgagaagtgggagggccagagttgggataggaacctatgtccctgattgcaaggtctggctccttctgtgtcctctgggctttctggtgggaagggaggaggtggaggagaccccttgcgagggccgagcttctcccattcagccagtctggaccagcctggggccttcagatggagatagcaaaagttgagggcataagctagggactggctctcttggtcactccagttgcccatctctgtacttccccaggtgaatagccatgttttttaaagaacacggagcaaatttgcatacaagagtccagatttatgcatgctgcagctttgtctgaaggcaagcttatattttctctcctattattttcaacttttaatgagttaccagcatctcagtgcccctccagcaaggatattgggctggtgttttcagggaacaattttaattaactcctccttgcctccctctcacccagccacccccagtccccttcctggtggctcagagtctggctttggcatgcaataagaatatttttgccttggtgttagcctttctgaaactcttgattaccagtgctcacaggacctttctgcagcactgtctgcttggctgtggactacccagaggagcttggtgtcaggcaaacttaggcgatttccctgagcatccttgttgagtctgcctttgtacttctttgtcaggtctagaggcttggccgtttgtcctgctcttttgtcccctccttctgggaaccctcaggaccctcactccatggagactcagcacccttcctcctgcaaacatcagtgatggggctttcccagccctttcccctatcttccttttcaaagaacaaagcctttgaagcttgtctcatacctgtctgatgcagtatgggaatctgtaagttctttgcctcctgaaggggtctggggaatcacttggctttcagagctttcctcgctcctctcccacccacagaccgattttaaccagagagtaagtcattcatgctgtgcttgaatactccttccagtcccactaggaagactctttgttactaaattctgttttcttgggaaaggggagcttattactatctcattttgttggttgttattaccctcctttaaaaatgtatctacatacacgcatgtgtgtacctacatgtttctatatttcccttgtgaatgtggccctcagagggcctggatttaaaccctgggagtggtagtgaccctttgggaaatgtatactttttgttccaaatcttctctggcttaaatttgtgaagttttgtttcagccttggtttcatagtttttcccagtttccaagataagtttggggctcactgtaatcagcatgtaaaggagaatatggccatcagctctgccccttaaattcatagtcagactcagtggggaagccgttcctgtcccatcttgcgctcgtggctctgtcagcctcaggcagctcctgcaccgtcctcctgcctgtgacagtgttgtcaggagttcttggtacctgggtgctgcttggcctcagggtgccagggctcccatgtggagtgtgcttgctgcagtctctacagcccaggtgtctctgcagccctcctcttacatagccacagcgtggtaaagtacatccagtttgcgctgtagtaagcaattttattaaaaaaataagtttaatatgtaagtggtcccttagttcgtttgaatggctcccctctctggctttggtttgaatgagctacacctggctggagccctgctgctcccctcagcatggagtcacctccctgtgctatggaggaaaggaagaagttattcttaccttggttttgagacaagacaagcctggagaaggctgtagggatgaaggagttgcccatttgtccagcatcagttgagagtctactgtgtgcctggcatcataggaagcctctggagtgctgtgagcaagaaaataatacttgatttatgtttttaagggttcttctcgctgcctgtgggccggcagtgaggaggacaagagcgcagcagggagatgggttaggaggcagttgctccggtgcagggagcagtgccagcttgagggctgctggtgggtattggtgtgagggtgggcaggctgcagataggccttcgcccattgcccttgccatgtgtccccatgtgtccccaggggaggctctgggcatcccaaactgtgagcctgccctttcccaagtgtgctaggccctgccaagctcctgcttcatggcctatgctgttcattccatctggaatgctctcttccccctgctttccatcctagctgagtgacattgggcaagtgaccagatctctcttgagcctcaatctcttattctgtgaaagagtgctcatggaacctactgcatgggaccatgaggataagactatagttgagtgtggtgattgcagtagcctccaaagctgtctcctgcttccaatttcatcccgctactgtgcattctttacacagcgatcctgtgaccgagggtcagatcagggcaggcctctgctcagaatcctctccacagtagcttcctgtcccagtcagaggaaaagccaaatcttagcatggccctcagagcttcctggtacttctgacctcatctcccaccccaaggccatggtgtatggttgatcatgctgggttctgcacagctcattgtggtgcatgtaagtggcactcacttcctccccaacttatgcattgcacaacttgtgcagctgtacatgctgctcctacctgcgcctctctagctccactccagccacagtggaatccgtgttgttcttcaaacacaccaggcatgcttcctgtttaagctctccctactgcctgctcccttggcctggaccattcttcccccagaggtgtgtatggctagttagctcaccttcttcaggtcttttttcaaatgtcaccctatttaaaattgttccatctgggtcactgccccccaaatgttccctttttcccttgctctttatttttcctcctagcacttatcaccatctaatatattatacgttttccttatttatttggtttatttttatttatttatttatttctcaacagaacataagcttgatgcaggcaggcaccagtgttaattttgttcactgctgtatccccagtgcctggattggtgcctggcagtaggggttcagtgatgcatgagtgaatgagtttggatgcacaaaggtaaagtattgggtacggtgcttagcacactggaagcacctaatacatggatgccagtattttcattgtctctgttaactctccaggccctggctcaaatgtggctttctctgagcctttctgcagtcccttctcaggctgaattaagtcaccaccacctgtgctctgtgttccccttcattttgccttctctgtctgctcggcatttatcacactgcagtagtgggcttatctcacactttttcctgttccaattgcaattcctgtggggcaaagactggcctgttcagatttgtatctcaggcggtctgcgcccccagctggcatgtggtaggagcttaggaagtgcttgctgctggtggctgtgggaggtggaaagagctttttaatccatcaggacccttacaagggggactggctccagcatcactgccgtctgatgtttgtgccccctcccaaggggtgtcaagggagagcttggcaaccacttaaatgagagtctccagtggtatatttagagcaaattttggagagaggagtctcttggataacagcatctgggtgacctgattgtttcacatataagagtttggctttttggctactcaggctttgagaggttggggtcattcaagggaggcagtgtaatacccatgtgttcagaggtggctgggacgagagggtgcaggagaaaaggcttgagctggcctgtaagggatctgagttggtgaagggagcacagcttctgggggtggcagaaggaataggagagctgcccctgccatacctggggaggggtggttaggtaggtgccttgggaggcatggttaggtaggtggtttggggccatggggggaaaactgtaatgccagggcaattactttggcctcttgtatttggcaggaggggtccacactggggattgtggtggcgtgagggagagggccctgggagagaagctctagagtcattttcttttccagaggtggagttgtcttggggacctgcacgtggcacgcagagcccatgctctcaggcacctttggggtggcagagtttcaactgaaccaacagaggacaaggggctgagaagtcggaggccttggctgaggtgcccagtttcttggttcactttctttacctgccaggttagcagcaagtgagcaaatccctcctgcctttgctcagcattagcctcagagacttgaggagagctgggccttcaggtgggagcctggtggccacactggagaggaccaagcttgacattgagtgtccgaggggctgaaagttgttcgctcatccagagatggattcgttctgcaaacatagggaaagttcccttcccattcctcatggctgtttgaggatggaattcctgcattgaccttggcctttccctgatcttggcctttcccctgcactatggcctctctactcttaacattacgccccagcccttttccatgggcccctcgtcttccctatggccatctaaaatggccgtataatattctatcaagggaatgttttcagtaagccatgagcttgatatggagcatttagattgcttctaatttttgctctttcagctaatgctacattaagccatctctgtgtattatggaatcatttcattagttggcatttgtctagctaatggcaatggcccaagatttaatagcgaatcagaatttcttttttcaagaagaatgtcatgaggatatataaaaaatttacttaaaatgctaggaatcatctatgttggggttttcatgaatgaggaagcagggaaacagtaacatgaaattagttgtaagtgaaagactgtgtgtataaaagtaactcgtgacttgtttgttcctgagtgtggaggggagccaataaatccttggaaggagcaatctacctgtgaaaatcaaagagatctgtattcctgcatctgatgaaaacataacaaacagtgatctcttcttaaggatatttttagaaatgccctaaaacaagaaaaagtaaataagatttccgagaaaaaacatgtctccttaattccaaatgagcctctctggaaatgccatttagtagtggaagcaggttgtagacttgctgaaaggatttggttctttggttattaggaaataactagaatgaaattgacaaacagacaacactgacttggtccccagtactgctttgagcctgaggtatgtgttggctttggaatgatggggaaggcttcctctgacttgctgatttgttgtagttgttgttgttattgttttgagatggagtctcgttctgtcaccaggctggagtgcagtggcgtgatcttggctcactgcaacttctgactacctgattcaagcgattctcctacctctgcctcccgagaggtgggattataggcacgtgccaccacacccagttaatttttgtattttcagtagaaatggggtttcaccatgttggccaggatggtctcaatctcctgacctcatgatctacctgcctcggcctcccaaagtgttgggattacaggcatgagccactgcgcctggtctgttgttgtttttattgtttcagtctctggtggcttattatgtagacttgggctgtaagctttgcatttcagtttaaaccagcaaatgtttacactatataaggttgcaagggctaaaactttagggagaaagaacccagtgcacccctgtttctgagaagctcatgaccagggagtgggaaggataaagcaatgttaaaaccaatggttattcaagggagattaagaagggggccctgggagagtcagctccatccttttagagaagggaggagttctacctcactgctgggcagggtggggctaaggggcaggagaatcaagaaaggttttatggaactagttgcatttgtcaacatcttgaaggacaggctgaaatggaggctggacattctcagcaaaggtaaaaggcctgagtagaggagatggagatggaaggacatggggcaatgtttgggatttggctgaagaattgcatgcctgtagtaatggtcatagtagcactttatggagagtatcaggtgccaggcatggttctaagagctttatatgtagtaactcacttaatccatgcaatgaaccaaatgaggtactgttattatccccattttacagatgaggaagctaagataaatagcaaggaattaattgcccaggatcacactgctgtggagccaagatcagaccaagttcatctggctccaggctctgtgcttacgaccatgaagctgtcctgtctctgatttggggaaagaacagtcactagaatcagacagatggacagatgccgtatgtttagaggctgggattatcaacattcaggaatgcagaggtggaaaagagaccagagatggagatgaggggcattggagaggtggggatgggaggagggtttggtgagagccgtgaagggccacaggaagacagagctttaaggagaagtttgtcagtgaggcccagagctgcagacaatcccaggaggtgagacctgaggaataggtctgggctgaggagaaagctgtgagggcctcgggagaggggcagcagggtgacccaggctggagctgctgtggtgtcctatcctggctgcagagtgctgcgtgttcctgggggatcatagctgttgatgagtatcactgtccctgtcctcttatctgtagaaagaggtgagtgtgacagagggggcaggtgagagctggcactgctaatttggcaaacctggtgacttttctgcagcctaatgatttttgaaagctgtttgctatgctgaggcacaagtgtgacttcccccatctaaatgctgtgcaatcgctattttccctggaaaattgggcccatgtgggctctgtgtgtggtttatttgagttccatttttatagccttattaccttgtccccatgatgcaagaggcctctctcttttcttgagctttgctgtgaaaattgtttcttaaaaggcacaaagtgatctctcgtcatctgggtggtgctcgctccacaagcagcacttttctcagactccgcacacacttgtcatcgcccctgcccccacttggcaggttcctctgattgttggcaatttactgagaacttttaggcagctcttgaagctcactacctatgtgtttgtcttgatttcttccggaagagtttgtgcatgtaaatatccattcagcctctttctctccgagatgttgccctgccactgaccgtgcttggggctgaaacccagtcttgtcctctggcctcgagctgattaacaatagcagtcatcatgtacagagcctgagtggttatcaggcactaagctaagggatttacgttcgtgatcttaattattcccaatttctttgaggtaggtactattacttcccccattttacagataaagaaaatgagccttcaagggatagagtaagttaccccaggttacatagctagtacatggcagagctgggcttaagcgggcctttctaaccttagactccatgtgctccattcattcattcattggcaacaaatgattgtctgcaacaggctgagaactgttgtagacccagggtgtacagcaaagggaaaaaaggccaaactcccaccttcagcttatattctaacttggggaggtagagatcatataataaatgacatatacattatgctatgtggtaatgagaactatggagaaaaatgaagcaaggaggtcagatgggaagtgggaggattttgaggagtggtcaaagaaggcctcattgagagtacaacaaattgttaggttaacaaacaaacccccaaatctcagtgtagcaacacaacaaaactgcacttctctgcagaaaaaattccaaagtggctgctcctggttagcaggcagccttccttgcagtcatccagggacctagactccttttatcctgtgtctctgccttcttcaagggccttggtttcctttgcattcaaatgctggagcgtgaggaagaagaagagagggtagtttgtgaggaaggctttatggaccagtctggaggaagcatacctccctcccacccactggccagaattcagtcacatgttcactcctgactgcaagggaggctgggaaaggaagtctggccatgtgccgcctaaaaaaaggaagtgggttctggtgaactcatggcatggtgtgttgcagcgagtgaggtgaagaagtgagctatgtgtttagctggaggaagagcattttacacaaaaggagcagcaagacaaaggctgctggaatggagtggggaggagagaaggagagtgggagaagatgagggcatggagttgtgggggccaggccactggggtcactgtaaggatttggttgccttgggaatgacaagcagagccagaacatagagttttgaaggaggaacgacaggatctgaggcacgtctcacagggctcactctggctgctgtgttgagagtggactgagggagcaagggggatgcaggggagaagcgggcgtttgcgggtgttatccaggtatgtgaccagaagggctggccctgagccggggtggtagaggtggggagaagccgttagatttgagatcagttctgaaggtgggccagcaacttttgctgtgggattggtagtggggcatgagagaaagaaaggagtcaagattattctgaggttttggctttgcctaatgagtattagtctcacttcctaccctcagaagcaagaggggaaattttttggaaaaggatatctgagtgttctctgggccctgacctgtcctccataacctctttcactctgtgatacttttttcagcacagatgggcaattcccattcatgactaggctttcagacatggagagggcacttggagtccctcctggcacacagcagaggtgaggcagcactgggaattgtctcactttggggtctttgggtcaaaccttgggacccctttagagtgacatggcagggactgagtgtgccctctaggggggtgagatatgcctactggagtccacttccaatgcctgccatctgcaaacactggtgaggccctggctgaagggtaacaacccacaaaagtgcacaaaaggaggaagttctggaatgcgagttgatgctgccagcggtccggttggctccttgccttctgttctttgtgtgttgacatcagacctctctactgcagacaggctgccctacctgagggggcacagctgccagcagcctcagtttacaatcctagcaaaggaggagagcctttctctacatctaggtatcagtttaagggaaaagcctctgtgtttgagagtgggagcggaaactgtttcccacgtacttccttggcagtcatgacctgtcaaggctgaaactggagatgggactttttaatagaccatgatctcactgggagcatatggggaagaaagttcatcttagagatggcagggcgtgagctgtgaaaacagatagtgcacacctactagatgctgggcccccgctaggtattttatttcactggagagcaaaacaatatatcatccctgccctcatggcacagatggcctcaagtggctaaaccatagaatggctagctgagagaaatgatagttctttctttttttctttactgattgcgaatggggttgtatttttaattttggtatccatgtgttcattgctagtatatagaaatccaattgatttttttgtttttatgttgtatcttgcatgtttgctaaactcactaattagtcatagaaatttttttttgtttattccccaggattttctgcatagacaattgtatcacttgcaaatagggattgtttcatttcatcttttccaatctgtatgttttttatttctttttgttgcctgattgtgtggccaggacttctagtcctatgttgaacaagagtgctgggagtgcacatccttgccttgttcctagtcttggggaaagcatcagcctgtcaccattaagtgtaaggtcagctgtggatttgttgtagatgccacttgcactttgctggcatggttgtgagtaggactgtgggttttgtgtgtttgtgtgtgtgtgtgatgtttggctgaaatacagtggttattatctacaagttttctgtcttgaaacagggagatttgttggggcattttctctttgtgctccttggcatttctgagttgctggtctcctcagttccaagtctgagctatatgcagaaaaggaaatgcaggaagctcaccactgtgttgttccttggatcctgaggtcccagctggtctgccttcttcagactgccatttggagtcttcttatagtcatctagcatagaatgcccaggggttttcattgttcttagcaggtggaatcagggaaagtgcacctgctccatcctgctgggagtggaaatggttgggggaaattggagcgtataggtcggggctagtttagatgcaagggctccgttctgtaggtgcaggagggccgtggaggctcagccctgacagcagtgggagggggatgggaagagggggagtggagagagcctaggtggctgctgcctgtgtccaggcaggaggtcctgaagtcctgaggtcctggccgtgacagtagaactgcagcagaaagaaggacaggaagttccatgaggacagtgaggaagtgcaaggagaccaggttggtctgaggtttctagctagagcagctagctggttctgagataacagagacagagggaggggtctaagcgtggcagaggggtgtattctaggcattgtagagcagatctggaagactggacttactgtgcttcccctcaggggaggcttcacagaggaagtctggctgctggggaaaaatccagggagtgtgcattctgggcagaggaattctggctgctgggtaaaaatccagggagtgtgcattctgggcagaggaaacaacgtgggaaaaggcacagatacagaaaacggcgtgatgggcctgttgggactccagctagctgaggcataagtgggtagttactggttccatgactgggaaggatgctgtaggagtgcacaaaaggaagaagttctggaatgcgagttgatgctgccagcggtccagttggctccttgccttctgttctttgtgtgttggcatcagacctctctactgcagacaggctgccctgcctgagggggcacagccaccagcagcctcagttttacaatcccagcgaagggggagagcctttctctacatctaggtatcagtttaagggaaaggctctgattggcccaggttggtgatgtgcctgcctttggacccgtcactgttgcaagggagtggagagttctaatctaggccggatcgtctgcccacccctgttggggcaaccagagtcttttaaaggagaaggcagacaaaatgcatctggggaagataaaaaagactgtttaccatggcttactgtaatagattttgaagaatatgtagtctggcagtgcaggaactcttcatggagattaaagcaggggacttgatcaaagttaggttttattaaaatcattctggacactgtatggggttgtgattggaagtgaatgacaagaggtgtcaaggcgggttcgtaggccactgctttagctccaaggagcactgatgaggcctaagctagcttagaatcctgacttactttgtttgcacttcacctgtagcgacagcatcagtgaggtggagaacagggatagagtcctagagatgttagacaggcaagacttggtggccagatggaggcaaggagaagggggtcttatggaggattccccactgccaccaagggcataaagaatgagtctctggagggctagccttatctttggaaacactattaagtgttggcagactcgatgtaccttattgcttcttcagaagtgttagtgttgttggcttcttgtggtatccagctggaaaaggaagctgattgattgcatttccctccctttaaagagcttccttttttgagaaatcagaagataggtgatacagtcaggactgccagtggagaaataggttggggagagggagacactggcttggagactctcctgcccccagcctgccccgaggcccgcgagtctgctttaggcacattcgtccttttggcatcatccttgctgggaaggcttttaagggatttaaggaaagaaatgacacaatctgattcatattgcaccagatttcctcctctgttcagaatagactatgggtggaggtagagtgactccaagagtagcagcagggaagcagggcaccaattaggagactgtcgcagcaatctaggatggggacggtggaggtggtgagaaatggtcacattctgaatacattttgaaggtaagaaccagttttagtgaggattagatgcggagtgggagagaaaggagatgaaaatgactccaaatttttggtctgggcagctggaagaacattgtcttaaactgaggcggacacaacgctgggaggagcacgtcaggggtctgtgttggacatgtttaagtttgagacacccaccatgtcttacacaaagctcccatctacttcttacttgacacaaacagttggatgtactggtcaggagttcagagcaggggtccaggcttggagagaaatctgagcattgttagcatggaggtgatatgtgtgaatccaggagactagttgagatcaccaagggagtgacagagaagagatgaaaacaaggactgaacacgctgacataagaggtggggagatgagggagaataagcaaagataagccagtgaggtgggcggaaaaccaggagagctagagggcatgattaactggtgtcaaagctgcaaggtaaggactgagactttaccaatggatgtagcaaaatgcaagacaggccaaatgcatatgctgttggacctaagcttaactttgcaaataagtcatagttccttcccagaaggagaatataattttgcaaaaagggatcatttaagatttattaaaataaatctgagaaagatgtgaagatagtaccgtaggaatccagcagaaggaaacagtgcttctggcttttgtggggaggattgagtcagattcattcataccttcattcatttgtgtgttcattcatttggcaaaaacttattgggtgccaggggttgcggggaggagggaagagagagttgttatctagtgggtatagagtttcatttttgcagatgaaaagagttctggagatggcttgtggtaatggttgaataagaatatgaatgtacttaataccattgaactgtacacttaaaaatggttaagactgcaaattttatgtgacatgtattttctcacaattaaaaatggagagagattaaataaaaaacagagcactttttggggccccatcatgaacttggtctgggatatgatgtttgaaatggatgcgccatctcagtagatggaggtaatgtggagaagagtggaggaagacgtccagctcagagggttttgggaactatcagtcctgtttgtctggatggtagggtctatcgggggaaaccatgcaagctgagactgcagccgggccagttggtgcaggcccagcatcctggctgtggatttgggcctgccttcttagattctgggagcctctgatggtttctgcccaggggagtgtcattccaaaggtgtgtatttagattaatttcattagtccttcctgttaaaccattgcctattaaaagcagtggggttgaggcattcatttttatggtgaaaattctggcctagcagaattttagatatccaagcatgtgtcaatgaagtgagtaggttatttttccatccattttacaagtatttattgaggatcatctaagtgcccgtagtgttctaggcagttgggggtatgggacggggtgaatttaacaggtctcttctcttaaaaagcctacagtctagagaaaccccctctccttcctaaacaagaagttatgccacaacgtgccatgtgttaccataggcatgccgccacagttccatgggtactgagaggagggggtgcctggcctgcctggaacactggggaggcttacagggaaaaactgtccaatggatttaaaggacaagcagggattttctaggcaaagaagcagaatgggcatcccaggagtatggtaaatcaaaacttattgggtgctatgaatttaaagctaaacttttatttcattggcttttaggtggtgctggctagagtgtatacgtttggacccaagcttaacttttccaatgtggaatcctgggccttcattggtaagtttgtttgatgccttcttaccaaattatgctatcaaggattggtatttggaatgaaaggcaaggtagttatcattggcaagttctctgtggaggttaccagccctggacctggagaagcctgtagcacaggctgaaggggtacataggaaaagtgaaatctcactgtaggtttctgtggtagatgcagagagggaggccagaggaggggaaccaaggggtgcgggggatggatgcagcgggccttatggagaggtggagctttggctctgttttgaagggcaagctagattgaaaaaagtccggggaggagtgaaagaagattttcgggacttgagaacatagaggtgaggtgtaaacaaagtgggcctagcagcagtcccataggagcaaaatcttcatcgaaaggagtcacgggcaagaactgtggtgggatctgctggcgtctgatgattctagtccatcagcaaactttttctgtagaggaccagatgctaaatatttttggcttcgtaggccatgtggtctctgtcacagctactccactctgctgtggtaacatgcaagcagccatagataatatggaaatgaatgggtgtggcagtgttccagtaaaactttatttacagaagcaggtggtgggctggatttggcctgcgggatgtagtttgccaactccttttctagaccctaaatgcccggctaaggcacatagactttatcctgaaggcagtgggaagccattgaagttattttggataaagaagtgaagtggcagaagtgatgtttacattttaggaacattcatctgatagctggacaagaggcatgggccccttttggaaggcagcagcagtcatccaggcatgaggtcttgcggtgaacagtagtgaaaatggaagcaaaggatcaatggaggagatactgcaaagggagaaccaatagcgttttcagtcttcttagacttaagaggcaggagtcaaagaggatgaaagtttaagcttgcttgtttacggtggtatctttgacagaaatgtagatgttgggggtggaaaggatagctgatgcatctggttttagatatgttgaattcaagataacagtggttcatccataagaaatgtccagcagagaattggaaatgcagggctgaagcctggcctgagaagattaagtctagagatgtggaatggaagccataggattaaacacggtctccccaagatgagcagtgggctgagctgtggggaatatgcgtaactgtgggacgggaagacgatggaagagacccagaggccatggaggagagtcccgggaagggaagagaatggggcagcagagaccagggagaacggacctgaagggaggctgctgaatttgtgacaaggtctttgcagatggccttgagaaatgtaatgtcacaagaggggaagggaagaggaagccaggttacatggagttggacataaatgaaggataaagaattgagatgttacaaaaatagaccgctcatagaaggtttgggtagtaaaagaagggagacacataagatttagatacttgcttgtcagaataacctttgctttagctttgaggcaggcaaagcatgctgtgaccagttttcatttccttctttggagccaagctgtgtttgggagtttgtgtgtaccttgggcttgtgattgtgttcttatgctcccttttgaggtgtggtgttcgtaactctgccacaacttgcaccacggaatccagcccgtgtttggacccttgccatgagacaagatgtgatctgttggggaagtagttgcatttgtataagttggaggagaaagtagagtggaccaaaaattgaaataaaccttcttactacagagtctatccaagtatggggacttgaggataattcctccagtcatgatttaattatgtatcaatttgtgctctgagtattttgagtgtaccttctttggtttgaattctaagtagtttttgacttggtttgtgtgaatatagcagttagagagctggtaacaaaagcaacagttgtaactggtttagagccatgatttattgaacactcattatgtactaagtccagtgctaagtgctattgtgtatcatcccatttcatctttgcaatgacctatgtggggggaattattaatagtattcttatttcagccagaaataagtcatagatgagtaactatgcaaggttacaagggatttgaacccgggtctgtataatccctggcttatgctgcttcctactttatcttgcctgtgtctggaatttttcctcctactaatgtagaaggactagagatagatcgagtccctcaggttaaatattcagaggctgtagtgggtgtttccacttcttaggagtctattgaaagggcagaagaagtgtgggaagtctggaagagactaaggccaaacctcaaacacttactttaactgtttccccagataaaatttagttgaaggcagcagccttgggcttggaaagaaaatagcgctagaaggcatgagagtcagattccagtcctagcattatgacaattataatgtcatttttgtttaaactcttggcatttctctccaattacctccagctttgagctccaaaggcaggctcctattttgtcttgtttttcactgtatccccagcatcgtagcacagaatctggcatgtagtatgttatgtactcactaattatttattgcttcgaatgcaccaagggacttggtacaagacacttagcctctcaggcactgctcttggcatcatggttatagaggtgaaacaggacaaggtctctgctgtcgtgaagcagacgtctacatgtgtgagatgtagaatgtgacgtcaggtatgatcatgctctgaaataaaagacagtgagaccggggtggagagggaagggcctgtccaagaagtgagacagtgagctcgttgggggtaaaatccataaaattcctcttggggtgactacagattgtcagctgcgctgtcagcaccttgttttaattgttttacttggctgccattgccaatgcccagctgactgctccctgcagcgagaactcccacctcaggcctcgctttcttcagctctgctgagcgtgcctctcctgggtcggctcccggttctcctccagctgctgagattccagcctccacagcctgctctgctggttctctgttctttgtccttagcttctggtttggcttggtccctttcacgtcatccttaacgtcctccctgggtgagctcatccaccactcacctctgtcttgaagacacccggatctccatatccggtctgaacctcctcccagtccacactcctagtggtctgccccgagggcacctcaacctgtctgtcccctcctgagtgccacatgcgtctttctccctgtgctgcctgcttggtccacgcccctcagttgcttctgcttcatgagtcgtcctggccttgtcttttccctcatattcccttggttaccacatcctgaagagctcatcttctaatttgtcaactcagttcttctctgtctctccactcctgtgtttaggattcatcattttgttctatgacagcctcttaattggtcatcctgtgttcatctttttcctccctcattccactgcccacattcctatcaacgtgatctttctaacacatgtctgatcagagctttcttttgcttaaagctctccaagagctcctcattgcttagaaaataaaagctaacccccttcagcggggcctgcagtcttctcatcatctggcccttggccccctgcagcttttgctcccccacccccaccccactttgggttttcctttttccctaactcacatttctaacctcagcctagctaccaacagccatcacctcctagtgcctttgcaatgctgggccctctcctgggaatggcgtggtctctgttcaccctcttgggaactcaactccagtttcccccaaatcttcaggacaccatccttccctacccagcacctctccatgacctggaaatgaccttcctcctggctcccagaacaccctcatgtctctcttgcaaagcacttatcggtgttactgttgatttacttacctgttatgctcagcaacctgagctccttaagggtggagaccacacacacacacacacacacacacacacacacacacacacactctgtctctctctctctgttccaagtgccagcatagtttacctggctcaggaagtttttgttgtaagagtgaggagtggtctgtttgtgcagccaagcaacagattcataatgtgataaaatgtacctgaaatgggaggttcattggccattgggtttattggggtgctcttcttgtcagctttgagtgcaggacaggttgtgttgggcttgagtttgtgacgcctgttgtgtctcccagcatgctgagacctcaggaatgtctcttctctatattctttgcccctgactttttatttttttagctcttgtttttgatggaccgataatagcaattcaaaatgaaaaataatccatcaaggaattctcaggaatgaggtccacccaccttggtcctggatgaatcccaaatttcctaaataagccagaatatctattcttgcgaactactgtctgacagcctttttcccccttaatccagctgagaatgcttttcttgaagggtaaggatacctagtggcccttcatgggggtgcctgagggcctctttgtcttcattttaaaccttgtaaagtccccagtgaatactgaggagtctaacaaataggaagaagctctgaccccaggggtcccaagtcagcatctgtactttgcatgggagctagcacaatgcacctagccaatagcatataaactctcctgttttcattcagtgccttaagcttgttgcttgttgtgtcttcttcacttcctatctctgccagagacctgagaagttgtgccaagagtgcagcttttatttggggcctcacagtaatctaggaaagcttttcagaagagagccattctcagcaccgaggtgtcctgcagaccaggacactccagcaggctcttggaactgctttcctgggatggaaatgcttgtgatgctgcctccccttgtagggactttccatatgctgttccctcagcctggaatgcatttttctcctggtttgcctagctcatgcctgttcaccctttggaactcagctgattggcctgcctcctcctcagaagcctccccaacctccctgataagaaggctaggtcttgtcctcaccattcccatgccagcatctagcgcttatggactgctcaccttgtgtcaagtactgttagaatgcttcatgcgtagctactttgtattaggggcttggtagatgttggctgaggtaagtgtcatcattgtcccaaagacactgtgtgaggaaactgaggcctcgacccattgagtaggtgacagagcaggagtttatcccagatgctggactgtgggtttacgctctgacccttctatacgccaccgttccctctgctccaagtccttgcagtctgtccttttccagcacttgtcatggaggtcatgacctcggtttgtgtggttatttgattaatgaatgtttgttccctcactgggcagcccttttgagccccaggatggcaggagtacctaggactctaggcaggtgcgcagcctggagttgaccgagagcatgtgggactgcccacttgcccacagctgcttcttgccttttgcatcacaggagggtgggctaggaccataaaagagccagcccaggcctccccctttctggagctcactgagtgcgtgcatggggtttggccgtcaccctcacttccatggttctgcatcagaaccagctgtgctgaggaaacatctgtgccttgttaaggtctgttccttctgcccactccctttgcccttttctctaccttacaacccctttgttgtccttcttcaaggaaaggggccccctttgtctctcagggcagagccagctgcccttctcctggtcctcttgatctgcacacactctgaggatgactgcccatggcaggtcatgatggtccgtctgccctggactgtggtttctgtggcagagcaatactttgtacagtcagggcccatggccctacggaaggctgagggagagcctgaggtcattgccttaagagaagctgcttcatggtgcagttggtatgtgtgcatgtgtgtgtggatgtgtgcttttttcatgcatgatgtttttatttgtgttatttatccccctgctatatctccctctctcaggggtctaacatggagctttgaatagtagatacatcatagctcttggctaaatacatattttctcccccgctgatctgaaggcacctcccttttcccctacccctcactttggtaccttggtgacttcacagggttgttatgacttcccagacctcattgagattgcagtgatgtgaaaaccctacctagattccagccagctgggcaggggccttggcagcaggggaagcccagttccctagggcaactcaccaggcctccagggctctctagggccaggctggctgagcttcaactgactcatactgtttttgactgggaaaaataaaaattttaaaatggcttctgaccaaatggggaaagtggatgtgggaggaggagaagggggacgttagccacaccctaggtacatttgccagcagcaaactgagatgggcttaaagtgtggctggcctctaagacgcctgcttcaaagggcattcggcacactggtctcaggctttggaggcccacctgcttcagaacatcagctccctgtctgtctagcgttgtgacttaagacaaacccaccaagctcccttagcctccattttctcatctgtaaaatgggattgtaatcattagaataacctttataaggttcttgtgagagtggaatgaagatgtgcttagcaccgtgactggcgtgtagaaagcaccaaatatttattatctgttaacattgtttttgtttgtcaaagtattattgttaataataattataagaagactttggaacagatataaagtctaaaatgcaggctgtgatgaaagggagatggtatataagaaaagtgctttttgaattgcacattatgtccagatattattattagcacaagtatgtttattattgttttgtctttgaaaaaaatgctggagcacaattttatgatgttgagtctatgtcctttgttgttttgttttttgttttggaaaaaggtttgtcacattggcctttattggaatcttgtccagtggatgtatgacccacattggtgaccctgggtgccaaatgcctggacagcacctggcaaagaagagccattatttcaatggtcactattgtttaaaatcgttatggtaaacaatacctgacagaagttcttagaggttcattgacagtaaattgtgggcaatgcactgagttattatttactctagacctgagaaattctccctctccaagttttgtgccttgtatagctaaataaatataaacaatttccttagaatttgatacaaacagctaccattgtcttcacaagtatgttagaaatactttcttaatagcaactacttgactgttttgttttttatctccattccctgccattactctgcctcttcccatctttctgaaataaaagtgagccaaattagccatttaaaaaatacgtagatactttcaggcagaggttgaaaactgtctaccccctggctgcatctggcttgcagatgtgttttgttcagcactcatagtgttttaagatgtttaaattagtggccaacatttaaaaatgggtagatttttgaatcaaaatccagatttccagctcttcataaaaaatcaaaggtctagtgggcctgggcccgtcttccttgtggcagtgcggaagagtggtggtccctcccctgggagcttgtttctccagcctgcctccggctggcccagcctcactgtacctttccatggcctgcttggcccctgtaggaatagagtttgtagtctctgcttaatataactaataccccttagatactgtgtatcagtttagaattatttccactagcaactgtgaccataggtaggaaggatattttacttgctaagttgtcattcttatgatagcccaaatggctataatagtattttaggctcttttggatttaatagaattaccttctctcctctctgtgggatttcctcattaacaatttttaaaaagtgttcagcaaggcttatatagcaacataaaattttaaataatgcaggatataaatttctatagctgctattgaaggggggttgcaatcaagtgaactgctttaattcaacaatttatggtgttgtaaatttgaaaaataaaagacacttagttttttttttttttttttttttttttcagaataaaataattaaatagttgacctttggcagagtctttgttgaaataggcaagggttttgagcttctcagaacttgagaccattgccttctggagtctttcctcagatgagtctgtgcctccttctagctagtgcactctgagcactgtggccacatctggagggtggagaggagacttagcttccaatggtggtcactctaggggaggggggcccttgcaaataccaaaatttttttaaattattattttatgagcttttaaaaacttttttgtttttgtcatcacaaaagtaataaacacttgtgataaattcagacaacactgaagtgctttaacataagcaacaaaatcttctgtgacctcccccaaccttttccaaccattccccaaacataagcacttttgagagtttgcttcttatactcctggacttttgcatttgcttgtttctctccacccctaccctttgccctcaaccacgacatagatactttcccttttgttttctaaagatagactgtccctgtgcatggtgttctgcaactttctttttacagctgtcaattattatggttatttttccaagtccatatgtacagataaatgtacttgttacttttaaaagttgtactccatgttatggttgtatgttaagtaaatttcgttttgtattgatagacactcaggttgtttctgaccttttgccattgcagtcattgctgctgtggaaatttttgtgcacacgtgtgaacttttgcctgagattttctttggtatagatacatagaagtaggacttttggtttaaatggtttgctgtttaaaatttgaatccataatgccaaattaccctccaaaaaggctgtaccaattcatgctcttcctaggagcatcccattatggctttgctaatctagtttttgcttacacatgtgtaagaaagtaaatcttaaaagcctcacaaataatgccatcaaaattacacgtttatcttagaaaagcattcagaatatatgtctgtagatttaattatatgatttttatatcttgactttgatggtggttatcatcctgcaaggtgacaaaaagttccctaaatactgtacacaattattaaataattattaaggatatcagttgtgccaggtagcctttggaagaattacagccaaatcacagcttccttttccacagctctgccaggctggcttgtctttcccaccaagggctgagccattaatactgaggctgggtcagcatttgaaggggccctgccagggagtgccaggccttgggccccagagacctggggagtgggagatggcaagtgactgctgtgaggctgagacaaagtttttgcctacaacaccccatggctgtttcctttactgagctagatgaggaaagcaaagggaagtgatggtccaagacttctggtggtcacttttgttcatagatttctcacaggagtgctaacatttaggctcatgtttacgaaggtttgaaaccttagcatttgggaaggatctgcaaattctcagccaggggccttaactgatcacaggtagttgtgaactcttggtccaggctgtatctcaaggcttcttcttagaaggacaggtcagcttaccacctgctaactgcatgtgaaattttgaattctgccttctctagctctcctctctggctctgagctggtatctggcatttgcaaacagtttaccctttgttgacttcttagcactaacctcacttttatgagtctgagtagacttgatacccaggccatttatcctttgagggtgccctcagcttcatcagacccatgctgggcagtctggcatagtggtaagaggcacttggagccagacagacctgggttcaaatcctgacatcatcacatttactaacagtgtgaccctttggctgatgacctcacctctttgagcatcagtgtctccttctacaaagtagggacagtaattctttcccaggggtattttgaaggatatacgaattaatatttgtcaggtgcctctcagatgttcagcacaaaataaacagtgtataaatatgagtcctctcttatcttcctgctgtagagagaaagttcgttggggatgctccaagttggtggctactggctgaggatcctggagtaagaggaaggctaccatgtaaacccagagatgaatcatgaacaatgtgtattctcaggagcttagtatttgatatgggagcctaacaagcaaatagtgtgtccagtaataggaactgattaatagaggaaagattaattaaccttctaggtgggtggggtggaaaagtaggtggggtattgaaggttcaacaggagttcgacagagaagatagaccataaataataaatatacggctgtatccactagagataaagttacattgttttttatgtacatgttgacttcttttggccttgccaatgcactgatatattcaaattcagctcctctctttttctcttcccttttcccttcactctgcctttcctccagccctgccttgaaatactcagccactgaaaatttcttaaagaatttctttatactttagtaagtcctcagaggataccagttcaccctactgagattttacaagaactttggtgtagctggggttttttttgcattcctttttctacggtagatataagttcttttgggttgcccatcaatgaacaaactaccaaccatttgatgtttactgcgtgactcctgtataccaagcacatgtgccatttcacttagtccccagaatgtcagagcagctttgtgaaatgggctgcccgttctttcttatggatgaagaaactgaggcttaggtaggttaatatactgaatattatacatgtagtgagtgggaaagccacagttcacctccagggtctttttctccctctttgctgccttgcttggggtcctgctcatagtaggtggacagcagatgtttgtctgaacatatgagaacactgcctgccacgtgccggtcagtttgatttgtgctgctggttttgtaacccacatggggcaatgacagctgctcaggtactttcctacctattagtggggccccagggtcacacatcagtcataattgacaaaaaacacaatttccctttcctctcaacttttatttctaaggtacttgtaagcaggtagattagattgttaacttttcattttttgctttgtctctctcctttaaagactatgtgaaagaatacacagtgccctgagagcctggcctgggaatcagaaacttagattccagcttcggttctgctggtaactcctcagtcattatgggtaaataatattccctctccagaactactagattgtgtccttggtgcagtctggggttcgggtggtcctagggaccctgcctactgcatgaacctgttatcaccatgtgaggctggaaggatctcagcgttggtgttgggcaggcctgagtgagcatcctggctcctgtacttcccagctctgtgacctcgggctaatcacctgactccctgatgcttgttcttgtctacgaaggagggctaagaggacctgcttcccaggatcactgtccagattgaatgagaaggaacgtcggcttccttccttctgtctccaactcctgagtgcactggttttagactaactgggtgtttctgcagttgaaaccaaaacaccttcattaggtacaatgttcattatacctcgcaacaccctgagatactcaactcttagatttcttgaagctcttttttgttaagaaactcctcaaaggaagatactcttctaccccattgagctttattagtgcttcaatgacagcaccttattttttcacttttttcccccttgcagacagaagctgcagtgtgaatcagtttgcatttatataatttcttttgcatttctttgcaaagaggaaaactccattcatttagcaaatgtccgtcatgcccaggccttatgttaggtgaagggatttggagagaaatagagtcactgacctcaagaagcttacagggaggaaaggtgtaaatacataaagtgacacatgggtttgtcctgtcaccaaggtatgcagtagatgctgtgggagaagagaggatgacacaggttctctcttggaagacctcatagagaagaggtgacttgtgagcaagtctttttttttttttttttttttttttttttgagagagggtcttgctctgtcacccaggctggagtgcagtggcatgatcctagctcactgcaactttgaaatcttgggcttcaagggatcttcctgcttcagcctcccaagtagctggaactacaggtatgtgccacttgcctgtctgatttttttttttttaattttttgtagagacagcgtctagccatgttgcccaggctgatcttgaactcctggcctccagtgatcctcccaccttggcctcctaaagtgctgggattatagacatgagccactgcacccagccgttgtgagcaagtcttaaaagatgagtaggaaggagtctgtcagctgtagaagtaggaagggcccaggcagaaggagcacagggcagaggctagagccctggtaggaggtgacacactgggtgcatgtctggagctggagccaagaggtggaggacctaagtggctacatcttggcagtcacccatatattggcaagccccaaatctttgtaaccagcccagattgtcttcctgagcccccaactcccatacccactgcccattcagcagctagctgcatgttgaagtgtagtggtcttcccagacctaacataactaaacagaagtcttgatttgttccttcaaaaacaaacaaaaaactagccttgctcctcctcagtcttccccatgttatgaggtccccatcatttttacctggctacccaggcctaaaatgtgggcatcatctttgattctgcttcctcctgtgttcttcacatcatctgtttgcaattctttttttgtttgttttactggttttaaaaattatttatttattgagactgagtcttgctttgtcatccaggctggagtgcaatggtatcatcttggctcactgcaacctccgcctcccgggtttgagaaattctcgtgcctcagcctcccgagtagctgggattacagtcgtgcgctaccactcctggctaatttttgtattttcagtagagatggggtatcaccatgttggccaggctggtctcaaactcctgacctcaagtgatccacccgccttggcctcccaaagtgctgggattataggcatgagccactgcacctggccaatttatttatttttaattaacacataataattgtacatatttatggggtacatagtgatgtttcaatacatataatctgtagtaaccagatcagaataattaacatatctgtcatttcaaacattgcagttcttgacaactcttactgtatgtcctggaagccaccactgctccttattattagtttgtttctttatcaaccaagcaggccagaccactgctctaccctcgttcaaacctccactgtctttcagcaggtctcttgtcagtttgctacataggcaaagaggtcttttaaaaagcaaatttgtgtcatttccctgctctaaactctccagcggctttctggcatctttggaatggaatctaaacatctcgccttggcctgccagcccctcctgctcatcttctctggtctcatcccttggcactctctgctcactccatttcagctgccgcatcttttcttactgttccccctgttgtctcatgggctttgcacttgctgtcctccgcctgagctgctcttccccagacaccgcctgtctcaccttcactccacgctggcctctattcaagtgttctcccacctgtctgaaaaagcaccgttctgccccctctccccgctgcttcaaccattctgtcctacctcgctttggtttctctcattagcactcatcactctctgactttatatgatatgtttgtttgtcttcttatttagtgtttgtcttaccccacaagaatataaatccatgaagatgggacctggtcttatctattgcattcagcactctagggcctaaaacagagcctggcacacagtgggtgatcctgaaacacgaggtgggtggatggacaaatgactgagttaatgcatgcctgcatgcaagcgaagactttggagtttatttcataggcagtgcaaatctagtagacatctttcaggaggtgagtgacgtggtcagcacttttattttagaaagccagctggtggcagtgtgggggctggactgtaggagggaggcagcagaattactttagcggctgtgaaaatcgtccaggaaattgatgctgagtgttgtgctagagctgtggggatggagaagaggggacagatgacaggacctgaagatctttgagtgtctttgatttctattgggataacttggtatagtgattcctttataagaaaagcaggaggggacgaactggtccagggagagactgttgacactctgtggtgtttttctcaccaagaaaacctaagccctgggatgcatgttctctgtagtggcattggctctctggggagtgactctgctgctccgcagcctcccctgttccattttttaataagagaatagtcaagatggtggtgtcagtgagtgggagtcttcttcatgcagatggatccattgatctttgcatactccaagccacactaagtcattggttcttttctcgcagtgggtacatttcaccttatttgattctgatctgacaaatgctgctttttttcttttctttttttttctttttttttgtttaaagaatacctagactgtgctcaagttccaggtggggtttacagataactggggttccagcatctcccttcttacaaacacgaacaggagcctttgccgtccttgggtctcagggaggcagaccggcagcaggcacacattcctggcccaggcgtagccatgctgtctggtgctgccttttgagaccttttgtgtgtgtgtgtgtgtgtgtgtgtgtgtgtgtgtgtgggcttgaatgattccttctttcaaaaattcaaccctctccaaattttgatgaaaaccttttcatctctgagtaagcacattatttcccatcttgatgaggtgtgtcccctctgtgtccctgagagtatgtcatcccagccttttaaattttattgtatttttttattttttattttttcatactagtcaagtgcagtagtgagaagcggggaaagagtagaacaaggggccgggggcggtggctcacatctgtaatcccagcactgtgggaggctgaggtgggtggatcatgaggtcaggagattgataccatcctggccaacatgatgaaaccctgtgtctactaaaaatacaaaaattagctgggtgtggtggcacacgcctgtagtcccagctactcgggaggctgaggcaggagaattgtttgaacccgggaggcagaggttgcagttgagccgatatcatgccaccgcactccagcctggcaacagagcaagactctgtctaaaaaaaaaaaaaagagtagaacaaggagtttgatctgttacagactgaactatcaatggagataactcactaccttcggaccagcctcatcccagtcttttaagcctggtccagaattcctaatcctgcttgtcaggcccttcaaagtgaaatgctgtaccatctgtatagctggattctcacctcctacctctcctctcccttccaaaggttccgatgtcataggaatctacgctagagggcttcctgtgtgccgggcactgtggtaagcacttcacatgcattctctctaatccttaccacttcggggatgtaaggattataatcttctttttacagatgaggaagctgaagcttgccactgcttagtagttaagagtatgggcttacagccaaacagaccctggattgattctcaactagctggggaccttgggcatgctacttaatttttttaacctttttcacatttagaagataaagataatatatagagagataatatagaagattatataggtattatatatatatatatcttctatattatgaagataatacagagttgtgataaaaattaaatgaaatgaccagacatagtggctcactgttgttttgttttgttttgtttttttgagacagagtctcgctctgtcgcccaggctggagtgcagtggtgcgatctcggctcactgcaagctctgcttcccgggttcacgccagtctcctgcctcagcctcccgagtagctgggactacaggcgcccgccaccacgcccggctaattttgttgtatttttagtagagacggggtttcaccgtgttagccaggatggtctcgatctcctgacctcgtgatccacccccctcagcctcccaaagtgctgggattacaggtgtgagccactgcgcccagcccatagcggttcactcatgtaatcccagcactttgagaggctgaggtgggaggtcacttgaggccaggaattcaaggccagcctgggcaacatagcaagaccacttctcttttatgaaaaaaaaaaattaagaaaaataaaaattaaatgaaataacatgtaatttcctaagtacattaagtacgtgcctactatgcgccggacattgtgctgtcagcaaataatagctcatcgcagatgctgttatcatcatcatcatcccaaagccacagattgagtctgtaggtgaggccctgcctggctccaaagattgtgtttttttctcctgttgctcccaagttcacctgtcccaaactttctagcccctaagtttgcttccttgcgcttttctggttgtgccatttgtccctgtctgggcagtgggctcaagctaaggcacagcagttttccagtccctttgagctactgacctcttttctgtcattgactgaacagtttccggtggctgaatcgtctgtgtaagagcttggacaattttttctgattgttaccatcatcgtgtttactgtgaaagggcttcctgtatagttgtttgtgttagcagcattgtctaaatgaaacaagagtggcaacagaaagggttggtgagcagtcctagtcttttggggtcacagatcactttgtgagtctgaagaaatttatagactctctcaaaaaaataaacgacaagacaaatacaagcccagcatttttcatgagacgttttccctgaagttgatctggaaggctatgtgctcttttgtcattgtgctactccacattcacagccatgaagggtgtcatgtttctgcagggtgtttgtatttaagggttgttgggcaatttggcaacactatacctgtttcattgatactatgtgctatttgcatttatttcccatatctgagatacgtattcacacatgagaactggcctggccattttgatgagatgtacctgctgatttgcacataaacacaagccatggcctgcatctagaggatcgactggagaggcttttttttggcccaaaacatcagactagtaggaattttattatgagttatagactaaaaggggggataaacttagcttcagcagggtttaatattctcaattcaggtaagtgtaaatctctacttttcattttaaacatttttgaaatttcagtctttaaaaaaatgcttgttttttttccttccaagttttaaggtatgggtttgggagaaggcagattccaaacactttaactcttcgacctcagacttgcttatgagcctctctttggaacatttccagtgaaccgtggagcaagcctgccacatccagcagccgtaggcatgatgatcactggtgccgatggcccctccactccctgcctggcttttgaggccccgcagaaagaaaggaacagaatcctttcataaggaaggccccagaatcctttctcctgctgtagctatgctgccagtgtcctctgtagatggaaatggaacttggattttgggtgccagaactgaattcatcacagataagattagttgatataaagctgtttctgatgagcagtttttcctccagagttttcatttttgctttttctaaattatacaaaataatagacactcattacaaagggaggatcataatgctccatacctggttttgaattccacttctatcacttattagatgcagccctgggcaaaacacacgccctctctgagccttgatttttctcattgaatgggagatctaattattttacctcataatactgctgtagggattgaaggagattggtataaataatggttttctgagagtctggtgtgtatttgctttttttcagttaatatgaattgagtacctactaagagctggtcactgttctagttgatatggaaccagtcaagagcaagacagagagggtctccgctctcatggtgctcacattctaatcagaggaggcacaagaacacaagatcacttcagttattaagaaattagaacccaggggtagcatgagagtcacaggaaggacccctttacgtcggatggccagcagaaccctccctgaagagctcaatgctttgtgacccccccggtcccaagttttccaggactcctacttttaaaaacactgcccctccaagtatataggtctcaattttgagtttggaaaatctgaccacatattagttctcttgttcattaatgggcttcccatttagagagtgagttcctggggcaggagccatgtcacaggaccttttgaaggtctcagggccaatatggacgacacttctcttgaacactcacccagttgggctgacatgaaaacctcatggtgggaggtggggggtgattagtttccagccagagcccattttgctccattgctgctttgaacattctggtttctaaggagctggaagtagtttctctcagcgagaatgtggcacactgtcatctcctgattctctgcatgcagttcttcaatggcttgttgaggctgcgtggaagcccagaggtcggggcagttccaactcacacactggcatttgaacggcagagcagtaagccctacacctgacataactgcattgccttcttggggtacggtacggatttttaaatgaccatttcagcctgctgggctgggcaacggtgatccaaactgatgagtcaggaagccactgaacagaaaggcaggctgcatctgactcacctgtcatgtcgatagttgacctccttttgtttgaccttgatttgctcagtgcaattaaagatgctgttgtgagtgcacttctgctacctgatttaaataaagtctaacatgtgacagctcagggtcttaaatgcacacacgacttaggcagacggacagatgggtgagtggttagcctttcacttacctctgaattgtaattctatcacaaggaaagggcttaatttcaggaacacggagtaattatttgagactagatacaatgccaaagcagcaggccttgattccttgctacagggcagcttaatcaggaaatggcctagatggccgcctttcaagtaggtccttgcagtagcttggcaacaggcacagggtcataattggaagaatttggctgtgagtgtctgtgggtgtttacagtgcactatagggcagggcttctcttatttatagaatattttgagcaacaagcagcagaaggctgaaaagccactaaaatctcgatttatttttaacaaattccatttttctcctcatcccagaaggagaactgagttattaaaaaacagttaaaaaatacatcattgcagagcatgccatatctaattatggggttgccagcatcggcctgcagccacatttcaagggcttcgtaaatcaaccatccattcaatctgtgaacttatatgactcctgttctccatttagatgtagagcgaaattattggcaagtgggtgctgatcagaaaaagttcttccctgtctaaattaggagatgggagggataaatatagaatagtatacttatgttctcaaaaggagataaaatcattcttcattgtccattatacttagctgcacaaacatccatcccattgcactaaatagccactttagagttttcacacattgcaatggcagttctgtgccactcaaaggcgcagtattgtgatatctcgctgagcctaaacctgagtgattattgctcacgtagtcatgaagagacataaacccagtgcttttttgcctgtgttgtcgtagtgtactagagctacaaggtgggccttcagagagacactagttttaagtatatctcattgtaggtggggaagcagaggcctaggcaagggagtgacttgcctagggtcccattaagagtcatggcagaggtgggctggggcggcagtctctgtgcttctcttgacagtgccctgctgtgctcactggagctactgtattaaacagatacccttcaggggttcacagtcttagaagacacaggcacgaagatggccaaacaatcagcccatgcataagcagaccaagatatgtgtatataacagattagttgagtggtagagaaaatgagagtggggaattttggaatctatttggatagcaaagcaaaggtaacatcagttgctctctgacccacttgggaaaagcttatagagatgctatgaagttttctaatggaaaaaggtgcagtacatttgccatgtgttagtgggaaggtaagtatgatgcagtggtgggtggtaggaggcagtgaagataagtattgcaactttggaggagccctgggaatggattgttgaggtgatttcataggaatacgaaagggagcataggaccagggcacaggccagagacaggcaatcccaagttccctggagtaccctgcccttttctgggaaagcaagtgggtggcatgagtgctatgttcccaatgctctggccccacccctggtagaagaataataactgatcatggtgggttttttctgagcctctgtatctttgagtagcattctggtagccaatatcagtggactggtgccagcctgtgtggtgaacctctatctctttcttgccctgggctgcatgtcaggcacagtgcctaagccggagtgggctttggggagttacttctctttctgaggctggaaggggcagagggacgtagggaaaactttgctagggagggcaaactgtgaaagcctctggagaagtcacctgttgggataccaaaggccagcggttttagaggatgcgaagaggccgggcggggttggtctgggcctaaactaaggctgtagcggctagcatggagaggaacaagcgacggggagtgattacggatgaggaagacgtactaggatttggctacagacagacaaccaaccagagagtaaaagacagtgacatgctaggatgtgaaccacctactacagagaaggtcagaggtggggagggaggaatcagggctgtgggcagatccagcagctgggatccaaagctgaagcccttgggttattgaatccattctttctgagaagagatggttgatcttcctgcccagggagttcctagccagactggacagtggttctcaaacatggtgccaggtgttgtcagatagcaaacaattagtttgtacacagaatgtccccaaggtcacctacacatatttgtttttcctaatctttgatacctacagccacttacctgctttcgagttctcagagttgagaacatataaatttgcagtaacaagtgcacaggaaatacttggaaaatggctgatgagctttagtttggaaatttcatttttttcttggatctggattataatttcagtacaagctagcaatttttcttgttggtaaaatagtttctagttttaaaattatttctgtagttaataaagttaacactatttcatgatggaggctgccccagctctgaaccaattttcaaaaggcagattctcctctttctctctcttatttcttgctcttgaacatttcactgtgttctagcaacttttcctgtgtgtgactcggccaggagactgacttgagtaagatccaggtcaaggggttgtgtgggtgggtcggtggtaaggaggtgctgaagaacactaaaacctttgcctgagaggagtctgggaagtagcctgcgaactggaatgaccccaggcttcctgtcacggtcatagcccatggagttggcagacttgatcactctatattgtgtgcccccaggtaatggcattagtcatcgatactgtcttttttttttttttttctttgagagagagagtctcagtctgtcgcccaggctggagtgcagtggcgtgatctcagctcattgcagcctctgcctgctgggttcaagtgattctcctgcctcagtctcccaagtagctgggattacaggtacatgccaccacacccagctaatttttggatttttagtagagacggggttttgccatgttggccaggctggtctcgaactcctgacctcgggtgatctgctcacctcggcctcccaaagtgctgggattacaggcgtgatccactgcgcccggccaatactgtctttaaatcgtccagagtaagaaaatgttgatagcttgttgtcacagccctgtcattttacacattccctgaattattgtctggcaccagcaggtgttccagaaacacttttggttctttgagccattactggtcattcctgtcaccactgccaccaccagatgtggttctgagagcattaagtaaaagttttgaaggttgtgtatgttaagactggtgcaaagtccatcctccttccttcgggctgatcagccacaccctggctatcagcacttatttactcattttcaaagtgacagaatggtccagtgggcaggggcataaggggtcacttcctctaaccacccgccagtgcaggaggatcccatctgcgcagtggctgcccatgacaggcagttccctagccccagtcggacatctccgcaccaggcatcctgctcctgctttatggacatctttggctcttaaaaatcctcctttattctgaccgcagatctgccttttggcagtgtttccttagtgacctagttctgctttttgtggcaacacagaacaaaggtcggtaggcatggcacaattccagcttagaagtttgaaggtagtgctcatggacccacatcctttccctctccacccactctatctccctccacaaggtttatgttctccagtgccttcagccattctttctatggcatggcagtcagtattaatcccagtaaaggtaacatgtatccagagagtgcttgccatgggccaggcactgttctaagctccgtacgtgaattgtcttatttatgactcaaaatcaccatatgaggtgagccctgtcatcatcctcattttaccaatgaggcaactaaggaacgagggctcacatcttgtcccgagccatgcagtcaagcagcagagcagagatttggggctaggcagtgtgactccagagcccgtgctcttagttgtggtgcaagactatcttacagcctttcctgcatagtgccaaaaataagcccatggtgcactagacttgggctggccctgctttaacttattttgcaagaaatcattagacaggagccttagttgaaccattttctgtgaaaccttcagagtttgttttgacagaacagactgcagggcagaggcatctgcactgtccccaacaaatgggttcatcctgtagctctgccaggccccacagggttcataaaatggtagctttagatcaaggtgacaaatacagggctcttgatgttttttttttttttcctgaacatggtgcctgagcaataggtttcttgtttaaagtgcttagtcatggttttatggccagaaagtagaaggagagaggtacctaagaattgcaaaactgggtcatctcttcaagtgcctaatccaatattcagtctcagagaacaactccagcagttacgggggtggaaggatgtgatgaccacctaccatccaaaactgggatgtaggtgccaaatacacattctcctgaaatgatccctggtgcctctagccaggctcttccaggagtctagagaaagatggcccatgacttcatccagagtctttgcttcctgtgctctgggatgcctgggcttttctggccacagccatacactgacagggccagaagggctgagatgctgggattgaaccatctttctctttgtgagttgctttccagatagcacgcattccggtcactattttccagagatttaagcagcaaagtgagggaccctcgggcatcgactcagagacctggaggggagcagcttgaagcaatgtaaaaagcactggataaaatctggttctaccaaaaatagggctatgagagttacctcacctccctgaaaggtaatatctttatctgaaaaatggggatgataatactactaacctggaagattgacaggaggattagatgagattctgcatggacataacagtccttggcatgatgtctagcagtgaagaaacataaatatgagaataataacttccttcttcctccgctgtctattccttctcttattctagtcctgtctgctgttgggttttgtctgttgttttgggtaaatagctaacctctctgcctctttttgtctgtagaaatgctactggttctgaatgggtacttcgcgccccctataggacatcgtgggaatgtgtgtgggtgatctggatgtcacagtgacccagacgaggcttttactgggggaagaggggaaggcaggggtgctagatataatgcttggggaacaaaagattgcccaacatctgcatagctgcctaatgctcagtgcattcttgtgggcaaaaccctgcttaaaattatctgggcctagagtctgactccaattaacacataaacacaaataatttttgcatgtttttaatatatactgaattttctgcgaacacagctaccaagtatataagatttacctatttgttatgaataggtgcaagcatttcatatatctttcatgatgttttctggtgtagcggtgccccaatacttacatattgatttacatgttgtcttatttttaactatatttcctttcttctttgtattacagttagggcattatattgattatttttggaattataagtgttgtaaggttatattacttacagatttcaagagagctaaagacatatttaaaatatttttattgcatttttgacaatatgaaagagcaagagagagagagtgtgtgtgcgtgcatgcatgcacatgcttacaaattagctagaaaaatcctaagacagactttaaatgaaaagaaatggtttcatagctcctagaaatgtccttttacataaggatatgtagtagaagtccaaatttttaactgcattcattgtcagagaaatgaggtgttttgatgtttcccctgtcccttttagaaagtatatgatcctaaaagagcctgaaacagtttccattgtcatattttttcatttttgcaatctctatttttttcactcctcccacctgtgcatatatatatttaaaagcgtccccatatagacttttaaagaaagaaaagccagccaggctccccactctttactaagtttgttttgattgttttgtggcctctgcctgcacctcggcctgagtcagactgactctgggagctgtgggcaggtccaagggaaagtcaaggaggtaatgaggcttctcgtgggggcaacttgtaggccaagttgggtgggttgaagtcagtctaccagaagcttcctgcctcaagcctgggcctctacctgtcctgaaacctgagggctctccagttggaccacgagggtctgacatccaggaggatccccaggagagagcaaccgtcactagggaatatgctgcccagcactgactgtactgagcagcagtgttgtgtgcctgttgggttgatgccatggatagccaggcgttcagaactgaacacgacacctaaaaggcaaacacgaactgtgaatgtgccagtgtcagatgctgccttggtggtcatgtgtgggctggcagtaagcttttggtcccttaacactcgctgttggaaatttcccaaggctttcatctagggtagctggtgtgtgatttccctgtcctttgttactcctatctggaaactagttgaaatcttttctatgatattgatatagttacagaaaatctgaatacttactactaagttttatagttctgcttagttcaaagtaacacaacctcataagagaaagtttgaaacaggtagagaaattgaaagatgaaaatcactacccattatctcagcccacaaagatagctactatcagcattttggtttgtttcctttcagtcctttctgtgtttatgaaattttattatataaataattcatgtccaatatagaaaaagatggaaaattgagaaattataacgttaaaacaaaactgacccatctcaccagttggagatgtcttaatattctggtgaatttttttttgtcttttttctatagacacataagaagactgggaaatattgtgtatatacgtttgtaccctttttcaccaatgtatatcaatgtatatcagttcactaatgaatactaattaaatgaaaatttattaaatgtatatctatttatatctattgatatattaacagatgccagtgcatatctattaaaagagtactatgtaagagatgatgttcttaaacataaaatttaatttaggcatgaaattactttgtcaaaagatatatcagtttatattcagatatacagtgtactgacctgcccatttaccacatcttcactaatactggtattatctttaaatagaatctttgctaatatgagcagtgaaagtggcatattatctattaaattttgacggttatgagattgagcatgtttttgtatacttactggtctttgtgtttcatcttttggggtttcctattcatagtctctgcttagttttccactgaggtatttgcctttttattgatttataagagattttgttttgttttaactcagaaaaggtagtattgcttcagttgtcacagagctttggagtcagacagagctgggtttgaaccctggctttcctacttgtgagctgagggatttcaggcaatttatctgacccctctcacaattaattagttcttctttgagaactaaacgaaacaacactgactagcatgaaaaaaaagcctggtgtgtggtttctgccaatagtttttgtgttgttatttttgttgtgattcctgcactgagtattttctcagaaaaatgaccttgagctgtacgactcatgcctgttcagacccacagacacatgatactcactatatccaaagctcagaaaaatgaaactgaaatcactgaagtttgtgggttttttttttaaattcttcttgccagaaggagacaaatgaaggaaaaaaaacaagccgatttcattttcattaagaggaatttgtagagttatttctggggtcaggcaggatacattcagacgaacattttagatctagggctgggaagatcccgagactcgttatagattacatcatcttcctccaagtgcacttgccaggcaaatggacaagtgcattttagaaaggttttcagttgttcacgtttaaacagaaaggatcacctggctaacttttagttaacccattgaacagatgtgccattcccccagcccattggttattcatgtccttgttactggtttttgatatccttgccccgtaggtgggaggagggatgggtatgagcctgccctgccctctttctcctacttgggacagagctgttgcttttatttgctgagtcactgaagcaatagagcatgtgcagagtcccagcctggaggtgggcatatctgggttccagtccctgctctagcccttctcagctgtgtgatcttggacaagttgccatacctctctgagcctcagtgtcatcttctatgtgatgtcgatgcctcccccaaaaggtcgttacgaggaccaaaggagacacgtcagggcaggaaccatcctaggcacgtgtttgatgctcagtaaacgggacgtggtcagtgttcagagttgtgggggtggcaggtgactgctctgtttcacctccactcacagcaacagggcctgtggtgtcacctagacatctcataggcatcccacactgaacatgtcccaaaccagcagctcctccctggatgggtggatggtgtacagggacctcttcctccagctgtcacatggggcatgtacctggcaagtggctttgcagccctagctgcccccttggctgggggcctttgtgcagttcatggactgggagtcacccccatgtctagaccgtcaggaaacccattggcttttcctttagagcataccaagaatcaacttctcagaacatagcaagagttgactttttgtcaccctgccgtggccactcagactgactcctcttacacctcacatcccattgatcagcacagcccctggaaatatgtctagaatccagctgcttctcatcacccccacacctaatacagagggctgagtcatagcatctcttccccggactgttgtagccgtctcctaactcagcttcctgccctgcttttacacacacacacacacacacacacacatggtatcttctcaccactgcagccagacttaaaacctaagagggatcatgtcactccccattttactcagagtcaaggccaagatccttactggggtctgcaggcccccacacctggccctctgactgcacccctaccttccttagctgtctcctctccctagcatgccccaggtcgctggtcccctagcactgggcagctccctgcggccctgttcactagctgtcctctgcctggaacacatctgtcacctctcacctcctcctgtccagcctccttggggcctttctaactgcctccctcctgtggtctgcctcctccccatctctgactttcctcccgagcacttactgccatccagcacccgacataacttacttgtttcgtttgcttgccttcctcaccaggaggtgtgccagatgaggacaaggatttttatatccctacccccatctgcagcactgccatggagaacagtgcctggcacttggatgccctcagtaaatatttgttgagagactaataagtgatcgtgggccagcatgccaacagtgtcttcgttattacaaaattgtcccgaattgaaatttggctactacaagcagtttgtggtggaaatttactcaaattaccaattctttcactgaagaaattacctggcatatgtgggttctcaataaactgtgttggattgcctcaaggctttggggcagtggtagccgtctgaggcctccttgccagtcaaccaaaccctgtgctgggtgggacataagagatgcccccagcatccttagctgatgctactatgtcaccccagaatccctggggcagcccacccctcagcagcagctgtcaccctgctgggttccgcttttcctcctgtgggcttcgtctccctaaggaaatcattgtccttgctttctacatcttatctccctgagcagctccaaaattctgttattcatatcccactgacctttctcattgtcctagtccaagcttctcacaggaggagttgtctctctgttttatattaaaacaaagcggttggactcttaaaactctattcacttttcagattctttggagtcctcaatgcttcctgctatgaaatgctgcgctctggaatgccttccagacccacccccaggatacctgtagccttccctgcagccactctcctcaactccctcctcgttcccaggggtcaatgtcctggatctctccagctttaagttccttcatgtcctcttgccacccctgctctcaccatctctgagttcttgtatccccaggatttcaacctgagtttgcatctcctgacatcacttttcccagccttctcccttttcaaccagcacaaggccatccacttccatggccatagtggacgccactgagcatgctaggtgttttcttctattcaactcatgtggtctgcacaacaacccagtgcggggaatccacccctttcacagatgaggcatctctagctcctggaagtcacctaacttgcctaggacatgcagctagtaagtggcagggctgggattggaacccaagaggccccgccctgaccaccatcctgccctgcctctcctcgggcacccagaatcccctcactctattgtcaaaacccaccttgtcctgcctgtctggtacctaggggagaaccctcagcctcttcttctgctgccacttgcttcctcttctgccaggaaggtcccacgcctggccagcctgctctggagacacgcccactgcctggccttgccaggaggctctgatgctctgcaggcttcctgtcccacggatcccttcctgcctgtcctggggtcccaccaccccactttgtagttggccttgctctttattgtggtgaaaggtgcaggccattccatccaagatcctataatattccttttctctgctgttgaatgttcttcccattccccccacattctcaaagaaggcatgtggctttcttcactgcgtctcggcctgccctgagtccagcccctgctgcctggcccagcctgtcttgttggcatcccctaagccctagccagaaacacaagcacctttcaggtgctccatcctaactccaccctccctcacactggcctctctccctttgccaccagataacagcagtgcattcttttgtttcctttagaacaagatgcagatgttttccagaattttcttcaacttcaggcagtaagttttttggtgaaaggagtattactccctgagtctgtagaaccaggctctctcctcttattctgtagcaattaaagacaaagacaggcaagaaaacaatgaaaagaaacaggagccaggctgatgcaccttcatttagctggtccttgagcatgactcattgatccttcttgcttccatcagggattgcaccctgtgccctctttgaatgcaggggcatgtcaaggccaagggtcaggaagagagctttggcctcgccagcctggtccccagagtggaagtggcagggcaggaggggtgtggcagacagagcacatatcgcccccagccttgcccccagatgttgagtgctgggtgccggagtgcagaggggaacaaggcctggaccctgcctggggagaggcagcacctgggagatctttgtggcttcagatcccatgtggtcctccaggtaaagcagagcatctctggggtctaggctgggggaaaactcttgcaaaaaattcctggttctgggacagaatgcatggggtctgcgtgaggggcagaggacagtgccaggccagtgagcacgcactgggcaaaggaagtggccagagaccactcataagaaaaagtgggacatgaacctcagagcctgggctgctttcagaggagccaagagcctgggaaataagcatcttctggtgaggaaatcagcagggggaggggagggtcatacaggaggggacttttaatcctgaatggccttgcagggcatggttcccctagtgtgccccatggaacccttggctgttagatgtgaggtgataaatggtgtgtggatgcatacacttgggactcagactctgctgcccttagactttcaccctccacagggctgcgtttaaaggtccaagaagccctgcagaagaaaaacctaactattgaaccagcattccctatacgtatttggcccctgattttttcccccgaataacatcattacaatcctatgggattagtgttccatggcagaactttgggaagtgttttttgaagaatttgtaaatccctgcaccctctggactgtgcccatttcttagattgcatggaggctgtgctgtacagtggaaggagtatgggctttagatgggactggcctgtgtttaaatctgctttcccattatacaaaatctctgatcttgatcaagttacttactctctcaaacttagtttccttatctgtaagacaggggatgaaacattagctagttgtcttatgaggctgttgtgatggttaatgggaagataataatgacacttacagagggcttgttatgctccagacaccattctgagcactttatatatctcacttacttttcaccacaactgtgaggcaggtaatgttatccttatcctacaggtcaggtcaggagaccaatgacacatacaggctaaatgttgtgcccaacatcacacggctggtaaatgtgggacctaagatttgaaccctaggcactcatacatgatggggtcaggatttgaaacttgaccgtcatctcccatcagagaacatgctctgaatcagtatgttctaaagggtctagagcagtaaaagcactaattggtatcagttcccttttcagatggttcgtggatatgttagggggattgatggttcctgggactccaagtcattctgcagtcattaaaatcagccctgttgaaagagtaatctcctcgatctgcttgcccactcagatgctcccattgtgaccattttgtttgctctgctgcctcatcctgggccacttcaatttgggtggctgctcagcgttcaggtggagtcgggccactttccacagccatctcatctgtggcctgtgcctccacttccaggaccaagagtccccccaggatgcccagtgagttggtagcttgttctctttctacacctcagtgatggacttgacaaagggttaagaagacatcccttttatcattcagcaaactgagtgcctttactgagctagatgcatgccctgggggaactagcactgtttggtgacttagttagacctctgaatccctctaccaaccctcagtagctgtctgggagactgggattctgtggactctcctctatcaacgatattgggggtcttttccacaaagaccagcctggttttgattgacaaagtgcctcagatttacaaatcttaccccttgcaggatcctctcaactgatcaagccccatagctccaaatgccgtctccttgattgatgtttaatttggggatccacaagcatctagagctaccagttgaatttgggtacccaagggccacaaatgggcccccctcacaccctgacccctgacaaccagcacctttgagactgaagtaccactgcatatagtgctgtcctctgctcagggcattctccctaccagccaggccacccggcaaacccctgcaacacctcataagacctcttcgctggtctcatctccttttattaacacctcctcagcacccctccacacacacccaagcccacaagcaaatcattttttcatctgttttgctcttgtaccttacctatgctccactaatacaaaaaaagcacgccttcctcaagacacttgactgccacctgctggagagttgtcatcatggctcaacaaatatctgccacttctaaacccccaggcacctctggagtagggcagtgcattgcttgtacagctgtaaacatggcctgcctgttgaattggtcatgctgtcatgtacttattaaaacactcgtctttctaactggactgaggacatcttgaacgtaaggactgccgatttctgtcttcgtccccattgtggcttctgctaggggctagagaaatgcttattgaatgatccttgtgcaaacacctgttaccttaggttcagggcatctgctgtcattcagtgaaggtcttctaaatctgtctgttgcaaagcaaggctcgccacaggctgtcagagtaaccatggaggtcggacaggacttgcagtggggacagggccccatcagcctctcacctctgctcagaggcaccaccctctgaacagatcagagcataaacaggtcagagcaattcagcattcattccctctacagacatcagggcaggcaccatgtagtggagagtggggccaggggccatctgccatggctgtttgggctggggaaggagagcagtacttctggagcatgtgctgtgctcagggccagctccctgtaggtaggttgtgggaatgcagaggtggcaactcaagcacccctgctggggattcagagttttgtggagaagtagatcagtaagcacatggataccagatagggttgtcaaggatgttgattcactgttgtccctattttcctaagctcgccacatcatggaaggctgctacccaagtgacattcttgggcttcaccaagtgttttaacagagctccacccagctgtcacactaggggtaacacagtgggccagaaggagaggcaggccttccctggggtcccattttaaaaagggggaagtcctctgttcttttacaacacttgtttaccccaagccattcagcatagtattacttaggtcccatacagagaaccttccaacagatagctctccttgctcaggcctgtcctgatgaactccctgatattcttccaggtcttaaaagagtgagagctgagcatttccctctctgccctggctgccaggaagctcagagataacttgtttgctcagttcctgtagctttcctgacccaggacttctttttcttataaattctccttgttccttttccaggaatgcttgctttttatgttttgtttgtttatgttgcttttgtctctgtattatactttggggggtggtttttggaggcaggattggcagcagccatggtagttagaagcaccagcagtaaagctggacacacctgggtttcatccccacttgctagctgtgtcattttaagtaagataagttgcctcttcagttctcggttcctcaccttgaaaattgggataatgatcataatgaatggataggttattgtgaaaattaaacttgtttattgtaaatgcattgtttcctgttcctgctcttggatcaggcttgatctgtggctgtagaatcctagtcttaatttccttcttcctgcctgtgtctgtcagcatatgatgagttgtacaatagtagtgactaggggaccaaccatcccggtttgtctgggacggaggggtttcctgggatgcaggactttcagtgctgaatgggaaggtcccaggcaaatggatgagtcggtcaccctggtaataaacaacctcaacatctcagtggcttactgtagcaaaggtttatttcttcgttgtgctactgtccatccagggccttggctaaaggaggagcctctatcccaggaaattgacagtcatgggcacagacagaggaacacatgttaaaggtcctttagaaagttgtggctgtcacttctgccctcattcactggttggggccagtcacatggccaggcctgccaccaggctgtgcagaaccttcccactgggtgggacagctcagcctggaacactgatccactctgccaggctcacctttctcttcttttgcattttagggtgctggagcagggaccagggaaaggagagagtcacttggtctgaactgggggtcttggatgtgatcatcttcctgtagatggtcggtatgggtttcttaaggggcagggttcagcttcaccctgctctgctcagaggagcagctgtgtctcctttggacgccttctagtggttgatgccctcacctttctcagctgccaaggcctctctcgacagggcaggctgggctgtgacttctcttccaccctccttgctccttcctgtggagcccctgagatcctttccccatgctcctgggtggaatggagggtgccctctcacattcttccaaggcatcttgcgcaagtccctccatgccctgctttctctggcggtccagcatgcctccatctcacctttgggactctctagcttggaagtgggcacacctgcagcccctgactccaggaccacaggctaggctctccccaaagcatcctcatcacacaccatgtggatggccaggtcagggcggccgtcagagcccaccctcggcaaggataccctctcaaaggcacctctgttggctcaaatcccttttggaagtagcccagaaagaggctttcttttttcttatcttttgttgttttatttattgttcttgcatctaagaacaccttcttggtcagaaaacagttttccagaaataatgttaagtaagtgtcacaactggtttagctccctaacctggtctaagcatataagagaggcttttgaggctgggcgtggtggctcatgcccataatcccaatactttgggaggccgagatggagggattgcttgagtccaggagtctgggcagcatagtgagaccttgtctcttctaaaaataaaaaattagctacgtatggtggcacatgcctgtagtcccagctacttgggaggctgaggtgggaagatcacttgaggccaggagttctaggttgcagtgagctatgatcacaccactgcaccctaacctgggcaacagagtgagaccctgtctcaaaaaaaataaaaaaggctttttgatttttgttttgcagaagtaccaaaatctatattagcatttattatttttatttctataaagtaaatttgagtattgggaaaattgatcaaaatgagaaatttcatatggagtttagtacttgaaatttggatccttcatctaaatttcagggaagtcagggctgggcatggtggctcacacctgtaatctcagcattttgagaggccgagatgggcggattgcttgagcccaggactttgagaccagcctgggcaacaatgcaaagcctcctctctacaaaaaatataaaaacaagccagacatggtagtggtgcatacctgtagtcccagctacatgacaaactgaggcaggaggatagtttgagcccaggagatggagattgcagtgagccgagatcatgccattgcactccagcctgggcgacagagcaagactgtctcaaaaaataattaaataagtaagtaaatttcagggaactcagagaacgagaaaggacatgaaattgttcatttatttagcatttgttgagtaccacctggagtgaggcacgagatcaggcacaggagacgcctataaataaggccctacctgcctgaagcttatgggaggtggaggagacacgcctacaagcagagaatggtcacagggcgtgaaggagcctgggcaggagctgctgcaggagagccagggagagaggatacagctctgaaggcttctccaggaggtgtgcccacgggcacaggaaaggaaagcaggagtttatcaggtgactgggtggttgaaaggagccacacctgcaagaaacgtgggcccagcagaggcagggtggttttgggaactcttgtcttttagtctgtcggggggctttgggtagcagatgggagggttgggctgaagactaagcagtgtttcctgctgggtgggtttgaactttgtttggaagacttagggggaacagtgaagctattgcagtggtctgagcaagggggtatcccgcctctgaccacagtggagaggggatggggctggagacgacagcagactgaacagaggcagtgacaaggatctggagggaagtggctgggcccatcccttagagggctgtgtgggggctgtggggtgtgggaggaagagaggaaggaagcccagggtaggttctgggttgctaatttgggggctgggaggatagcgtgtgacctaaacagagaatcagatttagatggaattacctatattaagcctggggatttcatatctatttgctgctgctttaccagttgaggctcaagaatgagaagcacaaaatttctggtcacattatttgcatgtgcccagactggggttaacagaatcggacagtgagcgttcctgaatcagactgcaatggggaatgaatgccttgggaggctggaagcagttgtattcgcagatattcatttggagatctctatagcgatcgaggcaaagataccccaaagactgcaagaattagccagtggaatttgaaatgccaaaattttttttcagaaaggtcaggaaagccccgtttaaaatctaaattttgccatctcaaggcagtgcagggatggattaggaggatgtggggtgacccttttcttcctttcagagccagtttctgccagacacaggaatcctccacatgagtcatagggtggagaggagacccctcagtcctttcagtaaggtgggagggcagtaccgcccggtggctaccatgaaccctgtttcagaatttctttcttaacttcgtgtgtgcccaggtgcacttgagattcactgatgttttctttagaccgaggagctcgcttcagcagttagtttcaggtgttggctctgctggcattatgcttcggcttaatgttttctgaagacttgttttctgttgtttttcattgttcttgttgtctggcttcaggccactaccttcaacctagcaagagctgagtggtgccttcagcagtgaggtagcttctgaaggccaccactctcttgctgtgtgactttggctagtttctccacctctctgtgcctcagtctcttctgtaaaacggagaacacaggagtatctccctcatagagttactttcaggtttcaatgagttaatctacataaaacaataaggatagagcctgacacaaaatcacactcaacaagttttcacaattatgattacttgacccagtaggagaaataaaaaacacaactaacttccttctaaggacatgcccaagaatccagttttagtaactttgaaggcattgtttttcaccgaaaatatctcctgccagattttttcatgtgtttgcagcttagctttaacaaggagctgaaggacggccaggcagcaaggggtggtgagtgccggtagagtgtgacgagctcgcccagccttcctccctgtaattaggagtcatgaaccatctacaccatctcccttagctaataagagatttttacatttacttacctcaaagtgacctgtctgggttttcttttcttgtggcccccactgtaggtttttggaagaagctgaccgcctgaaaagaaattataaaacatgaaaatcgctttgaggtgaccaagtccagaggcccctaactcctcccaagctggatctggggtgtaagaactgtgacttcaggtaacaaagtagtatcccctccctgccccctgtgaactcatgattcttggtagcttgcatggcagttcttcctttaggaagtgtagtttcttccaggaactctgaaacttggggtattctacctcatgcggttgtttggctggtcaaaaaagggagtgggggattctggaggtacttcatgtctgctgcatggcccaagggggccagggctccataaatcaccaagaccctgagggcagggctctgtactcattcctggccctgcttctgtaaatgttaatgacaaaataacaatgtcacccacccaacagggtctttaatatgattaaataatcatgaaatacttcttgaaggataaatcagagagaatagctaggaaatttccaaaaataaagagcagtaggagagtatttgttctgctagctattaaaatgtattctaaagcacagttgtaaaaacagtatagtactgtgatggaaataactagatcagaggaacagagtagagagtccagaaataggtgataaatcaataaaggtgtatttcaagttagtggcaatgggatgcatggactagcaaatggtgttagaaaaaatctcctatccattagagggaaataagaaattcctaagcttaggtagtatatcaaaataatttccaaatagcattaaattaaaaaaatcattaaaatcttagaaaaaagaatatttatattattttgggtaagaaaagacttaaaacatgtcacttttggtcccacatacaaatatcgtaaacaaagttaaaaagcaaaagggtgggaaaagtgtttacaacatcaatgatgaacaaagaattaatattcttagtatacaaatttattcgttcattcaatatttattgagcacttagtatgtactagaaagtattctgggcactaagggcacaagcagtaaataatgttcctgttctcctggtacttagaccctgatggagaggactgccagtgactatggtagattattgtaggtcacattttgataagggctaaggacaaaacattacgtaggtggctgggctagggaggcttggcagggtttgcattatgtggatattcaagggggcttcactgatggaatgacatgtgaagaaaaagggaaagtcattgaatgtcgagctgatagcacatttgctgtttttggaatgtcgagctcataggatttgctgatggattgaatgcgggttgtgaaagaaaggagtcagggtggcttctaggtttggggcctggcaaccagaaggattgacataggaatgactgagaggcttggcttggagatagagttttggttatggatgtttcagtttaacatctctcttgtatattcaagtgaggacgtcagggaggtggtcggccataaatatctgtaattcagggtgacatctaggctggagatataaatttgggaattgttgcagtgttgatagtatttgaaagaatgacactagctagagcccctggagagtgtgtgtagatacagaagagggcccaggacatccatgggaccctcccttagagttgagggagatggagccagctaaagagagcaaaaaggagtgaccactgaaatggaaggagtcccgtgagaagggggatctcccaagccaagagacagtgagaagggcgaggtcagctctcctctggatgtgctgatgggcaaggagagaactggccattggatctagcagtgaggaggtcactggtcaacccaacaagggctgttttatgggaatgatggggagagaatctgtttggagttggattattgagaataagaggaaaaaaactggagacagagaaatgggacaatagctggaggaggatggtattcaagtaagtttatttttcccaagatgggagttacataactcttgttttcacccaagtggaaatgattcagtagcgtggggagagtggatggtgcaggattgggctggggtgagggttctgaaatggtggtctcgaggaggtgggagaggtagaatccaggcatgagctggggaagggatcctaagtaggagcatctaaggaggtggtaggtgtgcacctgcctcttttctcagttcactaagaagcagagtcctcagcggagaatggagactaaggagacgatggaagtttgaggagagagggcaaagtatgaagtccttcatagcagaatgagaaaataaatggccaggggaatgaaggattgctgggcggcatgcaggcctctaaggggtatgtttctccagccatgtcctgttacacaggtgaacacggggtaggaggccattgtggtagaaaaacaggacatgagcagacacaacgtaagacagagaaacgcctgtaaagagaaaaagcaacatcagtaatagctgaagaatacaagtaaaaacaatgaggttttctttttttctctttagactggcaagagctcttgttggggatagaaattattgtcgcttttctggagcacagtgttacagtatgttccagaatacaacgtgtgtcccgttttgacctgtcagtcccacctttagaaatttattctaagaaataattgctcaaatgcaaggaaatatatgcacaaagatgttcaccccagcagtgcttatcaaagtgaaaaaatggcagtcatctaaacaggaggcagctggttcacttatctgtcggcctaacagtgatagtgggaaacagtagctcacactcaccctcctgttttgcagatgagggaagttgggtccagagaggggtagtgacagctccagtcctactccacggagctcagaccccctggctgtaggcaggcaccctgcccaacctcttcaactgggcttggagtcagagtcccttgcaaggcacttgtcaagcccttttcaagggccggtttgcttaatgcttttaaaatacgagttctcaaaatgttttgcaaatttgtttacaatgtcttcatttcatctcatggctttccttgcaaaggatgctgacagtggggggaaaacaggccgactgcctggccgtgatagaggggaccatattttcctgattcccaagtaagacttacagtggaagaaaggatattttctgctttcttacagtgtttacaaaagtcataacaggatgtgaggactatctggctgcaacatctgtcaccccattggtcgccagagttgattgggctgatctggctggttaggcaggtgtcccattcctccctcaccactccatgtgcgtccctcccaaagctgtatgctcagaaaggatgaccatccccgatagaggaggactggtctttggtcaagggtatatgagtagctgcaatcttctgctagggacccccaaacaagctctcaaaagtcataacaggagtacaaagataataaggaacttgcatttatttgtttccttgatcatatgtttattgattagaagaaaataaaattagcagccagccgtggtggctcacacttgaaatctcagcactttgggaggctgagacgggcagatctcttgaggtccagagttcaagaccagcctggccaacatggtgaaaccccatctctactaaaaatacaaatattagccaggtgtggtggtgtatgcctttagtcccagcttcccagcgttttggatggctgaggcacgagagtcacttgaacctgggaggtggaggtggtagtgagctgagattgcaccactgcactccagcctgggtgacagagtgagactttgtctcaaaacaaataaaaaataaaaataaaataaaattagctttgtgtgtggagaaaagggaggaaaaataattagcattgtcagagaacatctgggttatttggtcccctccgtgggaactgccctgggttttcacttctagagtttctggttctggtttaatttttccacgccacagcacagggaccgagaagctgctcagcttctctaggcttttatgtcttcaccagaaaaatgagcgggtgggcttaaatttcctacaaaaactcttaaaataaatatgatgctctttccattctatcacatgcctgttctgggtccgggggtgtgagagatgcattagtgctgctgtaaaccagccccgggtctccccccccggccccccaccaccaaacccccaagcaccaacctgggttctccaccacttttgagagctcatcgaaataaacacacctttgtgcctcttgtaacaattccagatcatccaatggcagaccagagaatggacatttcttcaaccatcagtgatttcatgtccccgggccccaccgacctgctttccagctctcttggtaccagtggtgtggattgcaaccgcaaacggaaaggcagctccactgactaccagtaaggcctttggggcatgtcttcctcttgttaaacttggtgtcagttctcgggcatggaacatctagcagccagctactgtttcatcctggaaaaggggatgggaataaaaaacccaactctaggtggcgacacagttggtttttggctttaccttcccctagtttgtaagcaagaaggagccttcagcagtgctgaggcatttaacttccacttcctgtccccaaaatgttctacacccagagaaaaagaacagccttaaggccaagttctgtcttttacccctttcttcgtcttctttctttgctcctttgagcaagagggttaagtctatgggtgtcatctcagggggttcaaagagagctttgcctgagggcctctctgaggaagacagcaagtgtcaggtgcttaatgaatgtttatggaaggaatgagtggaggtcctctctgaaaacaatttaggaacattgatgttgtccttaaacattatttaaattagtatgaacttgttatattaaatagtatttttgtttatttttagacttgttgacttttcgtttgagtaagtaaattttcacacttacagtcatcccttctatatatgtacaaacacctagggaataaggcagtgtagaatattcaaaggcacattttgttttgccgaagcacctgcgtggaatcttacccaaatgtccatttaagaggttttcttttgtttaatgagggaaaatctccgaggaggtataccccctacagcagatgtcctttctgctgaagttcacaggtcgaatttggggagcacaatggctggaggtcagatgcccactaggagatgctatgattaatatgtaagttatcccagatgattaagacagccaacacccaggggctggagagtgggtatgagggctgtgagggcgttcttccatagcagtaactccccagcagaaagactgcgagatgttggccacaaaccctttgtcttgagcaagcgctaagggagccactgatgtgttctaaggcctctgtcatctggacctgtgggttccagcctggtcaccacccaagatttcccttgtggactctggtttgctaatcttctgtaattcatggagactcaattaattaagcaaccttaatccctttcactatcattttaatgtaactgaagtcatctgtgactgtcaggcagagctttttctcacctgagattatcacctggcctcaaggaacagatagaattctagacaaaagggagaggggagtttttgtccttccgtgcggcctgcgtgatctctgaactttagaactagctggggaaactctctgcctgtgaggaaccccagggcgtctaattgggaacactgttctagaatgcccatgatatgatccagtgctcctagaaacagctatttttgcccttgggattacattgtttgaagggccatgctctctcctttcctgtgggataaaggaaaaaggagagaggcccagctggcagtccatgccctcctgataaatgtatggattggagaaggcggtgagggggatttggaactccttcctctggggatttcagtctgttttcttctactgaaccacaggatgcaacgaaacttggttttctgaagtctgtgaaagggagggagatccttgctgtgaccccaggacttctgtggccctcagccccactacgcccctccatcccaattcctaaaatctaggggttcccacctacctgagaagcagaatatttggcagtagtgcctttgaaaagctgcctggggctctgctcagtactttgttggtactttaattccaccctcctcacttcgtcccttccctgccaaatagatatgtatgcacatttatctttgatgctcaatatgttttgcaaacagaataagcttcatttatccagaatgatggggggggagaatgagaggttatatagatatttcaatcctatggttaactaagcatttttataaacactacatattcccaattttcaaacaatcagaatatggtaaaatatatgttaacacacaaactcttttgagatgataacttttgtttgataacctgagaagctggtccaggttttatagtaagttcaagttaattttcatttgttttacccttattatacatcattaattgatactgtggctgttcgaactttatgattgtttggtttctggataaatgagagccttctgtcttatgataagaagctcttctgtatgtctttattaacatgcagtcacattctcttttgttttttcagagaaagcatggacacagacaaagatgaccctcatggaag

SEQ ID NO: 15451 - DNA, 109433 bp, Homo sapiens
gacggaggtgcctgtttacccgcgccggactcaccgccgccgccgccgcgggatccgagtgcgggcgcgggcgcgggcgctcccggcgagccacggtgagtgtcaggccggcggcggccagcgacgcgatcccgcgcaccccgtcgggggccgttagcaccctcgcgggcgctgcgcccctgccgccgccccgggggcaacccggccgccgaagaaccctgcccgacgtgcccgctgccggccttaaagggcccgtgaccgctccctgcccccacccgggccgtggggaggctgcgccccttaaaggcgccgcgcccgtccgcccccatcctcctcgcgggggctgccgctgcgggctagggcaggcagaggtgctgcaggagcccttaaaggggccgggaaagtgttcgctggagtacccaccgcccttccgcgggcatcgctacctggcggggggagggggcagctagctgcctcttaaagggatagctctgcccttgggggcagtgactcggccgaagaggactcctagatgtgtccccgggagcttcggggatccccgaggggaccatgcctggtggctgcccctcaagggcgttgggcgaacggtgccgcgtctgcccttcctccccgcttcacttccctttcgggagcccgcgaggctgggtgggggcggggagggcgtctccgtcgggcttggggagtccaagtccgcccgccccttcggccctgtagccagggctggcgctgcacccgggaatccccggccggcacggggccgaccccagcctgcgaactttcgtggggcctgtgccgtccaggtcctgggcggccctcaaggatgccccgtgggtctgcgggcaggtgcgcgtcggcctggggatgtcgcccggagcccgggtgcgggccggccttggagtcccagagctccgcggagggcgcagcgagcctggctccagctccgggtttgacagatgtcagggaagaaaaggttcccgctcggctattgccgggcgttgacatcccagagagcttcccgtttgcttggaagaagacgaggaaggtagaggtgaacgtcgaccttgtggggcgcatgttagcctccccgaggggtcgcgagagccggcagcggggtgagctcaggtgcccgccggcaggagctggggagggaaggggagtgctggacaccggcgcctgctgtcaagttctcgccggccggtgagagacccgctgccgccgcgcaccccgcacctcctgacccctctcccctctccgcctcggccccttcccggtcacctagcgttgttttggcgctttggcgcttgcggtctcttccttcttccaccgctactcctcagcgaggaattattagccaagttttctcacccagcttccaaaaatcagattccgtatttgtgaacaagcttttcttgacactacccgtatacccgtatttccagcatcgtcgttttattaaacatccataaaagctgccccttagatgcattcatttcccacgacacctgcttgcttgtcatttgtccttctgacatctgctgttgttcacccctttaatctattattaaatgacaactattattttaattcttctggtctcattgatatccggatctgtgaatttgggttggtggagtttttaattaatgtacccgttgaatcatgagcttaaaataatcattgctgctcctgagcagttttgaataatatcatgctctctctgcttgcaagacttaaaaaaattcgctggtgttatatttgatttccatatcaatggaattcccaaatatttttgaaaatacaaaattcagtctttcagtccatgttttgttactcagatcattttactgataagtctttaacgcagcttatagaacatatttagaaggtttggaaatttcctggacaggatttgaaattgcctgtatcatctgaagctggttctgtagaagcattttggttttgattgtagatgcagccagtgaatgataacaataagttaaaactgtagttaaatttgttctttattcaaccctctgaagaacgaacagatctggtagaaaagcactaacctgggagttaggagctggacatcctggttctagtttaggcttgggctctcatggccgttccagtcggggcaagttattaaagatttctaggttgtgtttgcctctgatggaaagtaagacggttgaactaggtgatctcaaaggttcctctcttttgaagttctgtaagtctctaaatatttaatacatttgaattcaggttggtatttacctcctggcacctccagaatatctgagctgaagccctattttcataagaaagttaagcagatcaacagatggtgttttgaagaatccatttcaaatgatttataaaatgatgactacttacgagtttgtctgctatttgcagaagaggtttgcatgccacagggcaggaaaaggaagtggccatgttttcagatttatcccttcacaccaacaatctctgtggaatttatatgctaaaagatggagaagcaccatagaaagatttggctgtattaacaaaactgcatatgaaaaggtaaaaactagatagttaatatctctctttggtgtaagggttataatgtatctgagctttctttgtgatttcatcatcaactctcactgtggtaggaaaatcaatattaaataaacagtttcagccccgtgattacatgcagtgattttaggaagcatcatgataactaaagtaggtacttgcagggaagtaaaatatcctttctagaccttgaggtttcgttgggagctagggacacaggcatgttatccttctccacagtcttttttcattgtcaccttatcacaagactcagatttatcccaaatacccaccttgtcttttcttctccctctcatgaaataagacctgctctgactcaaccccctcagcatctcttacttcccacccaaaatgtcctgtctctatccccatcgtcccctcatctcctcccaattcagagaaagcaagtggacctctcctctgttccttttcttggcctctcaccatgggcaagtgcctgggctctggtggcagaagaatccatggctcaggtttgggctttgtggtcttggatgtgtgcttgactcctctgacctcaggtttctcctcttggtgtaatggcagtgcctgcctcgtggagtctgtgtgaggattaagggagatggtgcatgtaaaaggcctggcacacaggaagcctttcctttgtgccagctgccattccttctcacctctacccgggtcctatcactagaatattatttgtgctgtttgtccttagtctcccctgccccaccctgaaaaccttaggcttgacttaggagaggaaggatggaagaggcagagtcagacttgtggtgagcctgctgtgtaccaggcaatttacatgtgtctttacttggtaccctgggttcgtaagcctctctttcctccctcctgccagcctcccccactctcccatctcctgctccattcttagtacctgccctctggcttctctcgctaccacctttctttatatttcttctcaaagttttctccaaaactttgtcgtgagttcctggggcccatctgcccatccttattcctgagtggttgttcttggcccctttgcagtatttcttttatttttttaaacatggtctcagtcttgcctggttggagtgcagtggtgcaatcgtggctcactgcagcctcccaagtctcaggtaatcctcctgcctcagcctccagagtagctgagcctacagacacgtgccatcacacctggctcatttttgtatttttattagagatggagttttgccatgttgcccaggctggtctcaaactcctgggctcaagtgacccacctgcactggcctcccaaagtgctgggattacaggcgtgagtcactgtgctcagcccctttgaagcttttacctcacttgttttttgtcctttgaaatcctttcctctctcagcctttgggtcatgctggtttcttgattctcttcctgcacccctgtaaagataaatgtctgtcctagcttctgctattcacactgtccgtggcctggggtcccctctctagccctgacctgtctctcctgtgttctgctagcaggtccgttgtggacatgaatggcagcctgtaatctgcatttgtggtctcggagttacaggtttgcagactgcttgcaagcactgtcacattgagtcctcatgacacactggagcctacatcccttcattccccaggctgtcctaaaaggcagtttggttgggtagtttagcatacagactctggagccagatttcacatcctaagtattccctactggcttcgtgacttgtggtcaattttcttttgctctctatgccttggtgtcctcatctataaaactgggatcatagtagcccctacatcagagagttgaggtgtggattaaatgagttaaagcattggaaaaagtgtgccagtctattcatggcacattgcaaacactcagtgaatgttgctgtcagtcttgctgctcttcgttgccttgccggggtgccttggcctggtttgtagtggtctccacattcagcctgcctgtctgccagaccttgccatgtgcctggacactgtagtcaagctgaggggctgtccattccctgtaccagcccttggcccagtccatccctcaattttcacgtgtccaaatcctcctctgcttttaggacccagggccttggtcctgcagcactatttcttcattttgttttccttcctccccacacctggcagcaatgtccacattgatttttctccaattctcttaggttctgctgcattccatattgtgttgggctgtctctgaaaatatctcacctgctcgctcagcctgagcattctgggagaagtttatcttgctttttccaaaatgacaggcacagggagcctttaggccatggttgtccaatgcacattgatcttgtggaggaggagatgggatggggtgggcactcagggacggagcaggtggagggaacaggatgcacactgcatagaggtgggggtgcaacagggccataagtggacatggccgtaagtacttaggtctgcatggaaggagggtttgaattggggacttaacctcagggggagataagattggataaggtttagtcatctttgctgcaggggaacgttgagtactggcatgtaatggagagtggtttttaccttagtatgtgctgtccttttaaatagtgtaaactaattctttatctagcctggttaaagaaggggatggctggtctgcctaatttaatatttggctattgctctacccactgggttttgtgcatatactgaatgaagcattggcttgtatttattccttcaatcactgtttgaaatgtctgacctgggcaagttaattagcttctctgagtgcaaaataggaataataattattacgataatagcagctaacatttattgaacactttctatgtgccagcacatatgtgagtcacctttgcttattaactcatttaaaccccataacaactacatgaggcaggtactattatccttacttcacaaatgaggtggttttataaactgcccaaggtcactcagctgttatggcttggggcagaatttgtgctggtgaactccagagtctgccctgtaacaccctagtagattcctactgggaggaaacaccccgttatatcccttacctcactcagccgcaccatgccaggagcctagtaggctgacagcaattgggaaccagtcttattgttgacaaacatggtatgagcctcttttagagcggagctgcctgaaaccctccgcataagggatgcggacctggatgctacctgagcagcagctccaggggcttgtgaacattctcctcacatcctgttatgcatggctgtctctctggcctccccctgctttctctgcagcattgctctgacccaggccccctgtggctcagccagctcctccccaggcagctccttgtgtgagatgaaccttttaacataactcactaaccccacctcccaccctcatctagccatctgcagagctcctcactggggaggggaccttttcaaaggtccctcaccttcgtccttttctccctgaagaccaacgtccacaactttggtatatccacagtgttggggtgtgtgtgtgtgtgtgtgtgtgtgtgtgtgtgtatatatatgtgtgtgtgtatatatatatatatgtgtatatatatatatgtgtgtatatatatatatgtgtatatatatatatgtgtgtatatatatatgtgtatatatatatatatgtgtgtgtatatatatatatatatatatatatatatatatttttttttttaatgccagttgttccccaaatacatttagatagtaagggacacattgttttatgtcaagaacctgttacataaaaatgtgttatataatgttcaaatatatactgcacagtgaaattagataccactttttttttttcaaagaataaaaggataataaacacaggccgtcctgaatataattaacctcagatttgggaggcatggaaggacgtgccctgccctcagagctctcgtcctgagctctgcctttcttgagtgcgccgggagcaggatggatgggaagttggcctgaatctgccatggtgtggtactgtgagatgctctggaaattgtcttttttttttggcggggggtgggggatgccttcgcatcttgctcacttgtatctttctcacacctaagcagagggaagaagctctttttgccccctcgtacttagaccacccaggtcatcttttgaccagttttctgctctgctcaactcctttcaatcttcccagatgacaggccagctttgcctgctaagaacagccctggtgccagtggcatgcaggtggcacccctgtgtccagtcttccaggctctccagggtctggtcctgttcctcctccccagccctgcttccccgctcaacctccattcccagccacagccctgtgcccgaggttcagtcctccttgcctctccgctgtcctccctaggccacctcacttcacactctccctctggctagcggggtctttgcttaaattgttcccttgaggcctctcttccttgcccgtgcctgccttggatctcacttctctgtgaggtacctctgataacatttgttccctttgtgtgtgctctcccttttgctcttgattgccaaccattcattcgttcagaagcaggggtatgtcataatgagcaaattaccatatcatactgaatcaggatggccagttgtctcattttttaattgtttcatggttaattatcttacgctcacttcccactctccagtttcactcagttactccgtcagtgaagtttattggatgcctagcactgttgtgggcactgaggatacagcagtgaacaaaacaaggggcccgcaggaggggacagatgatgaatagtgaaacacgttcatgccttgttgtgagaagtgctaggagtgctaggatagcaagcaaatagagtaaagcagtagcgatgaggtatggtgggagggagggtaccttatctagatcacaggggagacctctctgaggaggtgacatttgaacttagcttcagaaagatctgggggaaagtatcccaggaagagagaacagcacatgtaaaggccctggggttgaaaggtgcttgatatttttgaggaaagtaaaggctagtgtgactcgattatgagctgcttgtgtacagatgttttctgcctcttttatactccctttaaccctgagcccagtgttaggaaggccttgtaaatacttacatacagaattatagcatttgtcattggttatatattataaaatagtaattttataaaataataatttatcataccctgcttagaaggcttttaataaaacattatattgcatataaacaaattaagggtttgaagggttttcttataaatgcactcctagcatgtttcaccaaatattactgttttaattgtgtttagtgcagaactttagacctcataattctgcttcatgtgcacaaccatcttaaaaacaggttttgttccaaaagtttatttgtaaggcactaggtggaaacttgggataaatttttctataagaaacaatgaagtaaatagtgatgtagtttctaggcgagccctcaaaagctatttagtggtgactgtagctgaaaacatactggttggtatcagcagtcgtcaagccttctgctggtagaccctcctctcagtagcattgtacctcatttgctgttagcaatcataggacccatttacctcagtcacttctcctactgtattttcagtctgttaaagttttatagaagggattttttacctttatacctttaagatttggttgcatgtgttataaatgagacagtagtgcagagagtggggaaaactctggactgggagctgggagaggcctgggctccagactgggcccagccactgactggctgagtaaatttgagtaagttatcctctttgaactttgatttctcaggttcttcttggctgtaaaatcctattgttttctcaccatagcagggaaacgtagatatacttcgttgttcaaacctgccctcaaatggctgcctctgatttcttcttgaagaagtatatggcactcagcaatgaggaactcaagcagttccccatgtgcagagctctgcagtgacattctcagtaggaaccttgattttgatctgctatctttcttgatgagttgaaagaaattttgtcccagaacttttggtccagataagatttctgtgttcttggccaacttatcttccatataattatgtaaattgttttttctttttaactcttagggataaaaatggtgactctggcttgcctgcttataaaatatagttataagtgcccttagggaatggaatgagtttgcaggagagagcagagctgaaagagtgtgggatcaaaaacaactttaaatgttaaatgcaaagctattttcagtaccctgctggaagaaaaaatttttttcaaggttttagaggatagaagaggtttttgctccaaagaagaaaggaacctaaggttttgcagtggtgaaaagtacctgatcctttaaccaactaccaccctcccttcccacctctgagttttgttttcgacatcatgaaccacatttgccatttgagaggtttgatatttaagtgacgttagtggcagagctcaactggcagtgttcaaatgacttaggtgcagagtgctgtgctgcaaacttccccagtgcattctagggtaagggatgcctcatagagagtgacagagcacttttagctctgcctctatttggtcagttgtgaatggtgtgttcctttttttccttacttgaaggcatagcgaggagttggtacaagaagttattgcttcatggacttcactttggagctagagggtggcattagacctagcctgccttcttggatgctggaataccagtggcaatgtcatctcttgttctctgctatacccctagcaatgaaaacagtgtctgtacagaaaagtctctcaataaatacttgtttattccttcaaaaagtgaattcagctttggataaatttttaatttcctccactctctagcagtataggcttatgaggttggtcttgcaaggtactttggagtttaggttgccatttctttttgacatctgtgtttttcttattcttcaggttggtcaggtatcagtgtcttttactgatgatggttgtccctgccctgctgatgttcatcttctgttatctttaattggctccaaactgcagcaaatctatagctgagccacattaactaaaagaaaacttgttgcatatttatttaggcatagtactacacatgtatttattcagtcaacaaatatctgtgagtctatatgccaagaatgttactagacccaaaggaagagcagaaattgttgttgtgaccaaggagcctgcagtttgattgccttgtggaacatctttatgagcattgtagaagggaggaggcttcatagaactggtcaggttttcacctttaaggatggtaggatttcgattcacagacaaggtgaggacaggtatttccaggaagtggctgagcggaaacagcataattaaaaacacagaagtaggaatggaccagtttgcattcatggacacagacttgtctaaaatggaaggttcttaaataatggtgggaatttaagtatggaagatcactgaaggcccaaacctgaagccattttagacacctagtgacttgcctaaagtgacagctgataagtggtagatccaggcttaaaataaggccatgggagctctcgaccactggcactggacttggctgtttcccagcagtctctagatgcaggatttgggtttgattggggattttcttttttctttctttctttctttctttttttttcttttttttttttttgtgatggacactgagattgggggttttagagtcatgagctggaaataggcaaggctctatttagcccactctttcattttgcagttggggaaactcagtgaggttaagtggcaagtcggagtttacctagtgagtcagagactgctaggcaatggataaccactggatttgttttattatgattatgattttagtgacatgaaatatttctctctaaagcatcagtccagtgttagtgttccagttggattggagcaatgaaggactaaatgcagcagagacctgacaggaggctgctagatgaatccaggaaggagagagagaagccagaactgagaattaattgtcaattatgttaatcagcatggtgttatcagtcaccctttagatttctagagtgcggtgaacatctgcctgtgtgagtggctttcaagtgtgtgaatctgcactgtactgtgaccaagataccttaatgaattctccagacagaaagtgccactatggaagtcgaatgttttaaaacaaatgcccacattttctggaaagagcaccagattaggagtcagatgacctgcattttaggctgcttctgctgcttagtcaccatatagccaaagcaaatcacttaatgtctcaaactgagcctgactccttatctgtggaacaggtataacaattcctgttgagcccttttcagtgtatgtgtgatgcttgtgtgagctaaggaaagaataggcattttgaagctgtaaagttgctttctggctgcagggagcagcagtgcagttttaatagtgaagatgtactggcccttacaggaatagcctaggagaaccagaagaaagttcccctacctccagggcatgtttagggaatctggcgctgtccaccaggtgggtgctgatgtgtactactttattggatagggccatgttttttgtttatttgtttgtttttattatactttaagttctagggtacatgtgcacaacacacaggtttgttacataggtatacatgtgccatgttggtttgctgcacccattaactcatcatttacattaggtatatctcctaatgctatccctctcccagccccccagcccctgacaggccccggagtgtgatgttccccgccccgtgtccaagtgttctcattgttcagttcccacctataagtgagaacatgcggtgtttggttttctgtccttgtgatagtttgctcagaatgatggtttctagcttcatccatgtccctgcaaagaacatgaactcatccttttttatggctgcatagtattccatggtacatgtgtgccacattttcttaatccagtctgtcattgatggacatttgggttggttccaagtctttgctattgtgaatagtgccacaataaacatacatatgcatgtgtctttatagtagcatgatttataatcctttgggtatatacccagtaatgggatcactgggtcaaatgatatttctagttctagatccttgaggaatctccacactgtattccacaatgattgaactagtttacactcccaccaacagtgtaaaagcattcctatttctccacatcctctccagcatctgttgtttcctgactttttaatgatcaccattctaactggtgtgagatggtatctcattttggttttgatttgcatttctctgatgaccagtgatgatgagcatttttttcatgtgtctgttggctgcataaatgtcttcttttgagaaatgtctgttcatatcctttgggatagggccatgttttaaagatgattacatttcacccccgtaagcctgggcatggacggaaaagttaggcatggatagccatgtgaatctattatctgtagacacctttcaggatagtgacaggcagctgtgaaccagaaaaacaagtgtcagaatctagccagctggccagtctggcattcttggatgtttcatctgtcctggggcattaggcagcgatccagaggaaccttgattagcctgggggattcatggctgagccagcatgctgtccaggtaatacctggctgcaaagcctgactggagatctgccaaatctaaatttctgccagcattacaagtgtatatattattattattattattattattattattattaatagcagtatctaaccttgactacctaccatatgccagcaactgtgctaagtgcttacatactttttctcattcagtcttcacagtattcatataaggtgggtaatgtcagttctgttttctagttagagagactgaaactcagacgagcttcagctgatacatactaagtgtaaaagccatgattcaaactcagaacagtctcagtccagtgcccagctgcataactgctatgttcttctttctctcttttcctggtacctgaaaatacttcttgtctctggttttgaggtttctgactgtgttattggttgatggatgggttgccacacagaggctcagctcagcacagctcttttttcttcatagcttatgacggacatcctcctggatactctggctggtgagcaaatgggtgccagtggtgaatgcagcagaaagactaactcttgccagctagtgcatgtgggtgaattttaaagacaacaaaagaaatttctgtaggtcagtttttcaaagagtaactggtagcttgtagtctacttaaaggccaagtttgatgttcatcaaagtcaccctgtaaaaacctttccaaatgctgtgattctgataacaataccatagaacattcctgtgtaattgacaagtagtttttacatacaatgtcttgtttagtcatcatcacaaccctatgagggtttgcaactacatatagttgcaaagaagactgggagatatctttagttgggaagccatgagtctagcaaaatctctgtttttaagggtggcgaggggagtgaatgaggggagctagcaatctgatgtgttgtggtggtgatggaagggataagtagagtttgaagctgttgtcagtagagttgggaggatgcctcctagtctatgacatctcctagtgttatgacatctcctcttgtggactgggaaattgcttagagtttaagcaactgtccagggttctacaactggtcagcggcagaggcagcacttaagtattgcttttgtgacttaattcactctctattcaagtttcatctttgctttctctattgaagttcttaaatattctgattcactgtatttagaagtcggcaggaattattaaagtgaacttctttgtggtatacactgttactgaatcagagtaaataaaaggtcacatgattggttgttgtgttaggtttaattgacgtgtactctgtatgatacagaatactcacatatcttttgtgggatatcattggtccaacagctttaaaaatcccaaggctttaatagatgataaaacacggagtttgtgtaatttcttgaaaaagttggccatcgagttcttggtcaggaacacaagcttcaattgtaacagtttccatggagacattagccttggcttgcatcatttcagctttcagtgcctttcctaggaatggagtgaactgctaaaagaagagctctggttgtggttgtcacttagagctctctcccctactgtttctgctggaggctgatttgcttttctgggtcttctcagttttttctgtgacctaagcataaattgtctttgagatcctggtaatctcatattttaaaagttttccacaaaagacaactgaatggaacacttttttttttcacccctttaaagtatttaattggccatcaacggtggctcacgcctgtaatcccagcactttgggaggtcgaggcaggcagatcacgaggtcaggagatcgagaccatcctgctagcacggtgaaaccccgtctctactaaaaatacaaaaaaaaaattacctgggcgtagtggcgggcgcctgtaatcccagctcctcgggaggctgaggcaggagaatggcgtgaacctggggggcggagcttgcagtgagccgagatcgcgccactgcactccagcctgggcgacagagcgagactccatctcaaaaaaaaaaaaataaaataaaatgaaaaataaagtatttaattggtggcaaggggctttgctagaagaatggacacctggtctcactcaagcttcttgtattagttgggataccaggtgagtccctctgttaaagagacccacaggcacaatggctgaaaccaggtagaagttttctctctcatgtactagtccctagtagatagtggtccaggcctagtatttttaacacatggcttccatttgatggttgaaggtaaaaacttaccatctcccagaggaaacacccaagggggcacacatccagtcatttttaagggaaagacccggaagcagcacattctctttttccagtagccggaatttgcaactacatatagttgcaaagaagactgggagatatctttagttgggaagcaatgagtctagcaaaatctctgtttttaagggtggcaaggggactgaatgaggaaagctagcggtctgctgtgttgtggtggcgatggaagggataagtagagtttgaagctgttgtcagtagagttgggaagatgcctgagtcaagggtgagaatctaagcaggcacacagaaaccagggcatgtgcagccatctagaggtcagggaagctcttggctctgaaactaagcagtggggggcacccaggcatggaagggaatgtgaattactcagaagacattaggttgtcagtaaaaggaaattcaccagtgtgactgaatcagtagaaagagcacttagactaggagtcagaagacctaggtttgagtccagcccttttacttcataacctggggcaaaaaactcccataaatatttgctttattatttagataatggcaataacagtgatggcctttcctgcctcccaggcttagtgtgagaccaaagggtgaggaagtactgtgtagactgcagccccatggagatgtgcacagtgtctgcccagcccagggcctgccatgggtgtatttgttgaatgaagtgtgaactattaaaagagttgggaaaaatgcattatactaaggagatcttaatcctggacagtcttctctaccaggcagaaaggttctgctctccactggtcaaggccttgggcctatgtgtaaaactgggtacctaacaaacacatgggcagacgcctgcagctccttactgggtagcacatgacacatagtatgtccttggcaaggccatttgctcattcctctgtgtaggtaaccaagtgcaacagaagtggaggtatagcccatgaatgtgaactaatcatttttaaatgatttggtccatgggcaggttagaagatgaaaccttcccaaggccaccaaaacttgatttcttgcttgaaaatgataagatgcagttataaaatgcttctgttgatttggaaaaaatgtgtgacttgttcaaaacaatatgtattaatagaaaatgtaacataaataagaggatacaaaaaagagcttaatgtttctatcttctgggcctagcaatagtgatttttttttccttttggtaggaaaatgggggctcagtggaataatcagttttatttctttttcttttaacttcatgaagggtttgtattgttcattttgttatttaatttgttcatttgctaaggaaagaacttctttcttggaactctgcggagtgtttttagatggactttactggaaaaaaacaggaattgaaattatattcacagtgcgctctaaactcttttaaaatctcatgcatggatggaggaaaatgcactgaaatatcaatagtggttctcacctcatggaattagaggtgacttttattctcatctccttctctgtggtttcctatttttcaacgagtgtgaattacttttatcatcatgaaagaccagttaaaaattaatctcacaaattaacactctcaagccaaaccacgaatttttgtttttcacaacctggcttggactataaactgtcacactatctcagacctatgcagattcttttctgagtgaggcattgaggaacttgttataaagatgatgctttccttctggaaatcaagaaacaagccaagggcttataatgtgttaggaaagatgtcctgagtaactttcctcctggaatctgactagcctttattacagctacttaaggaaatgagttttgtgggttccctgttcactgtgtcaccatttttttctttatcctgtactcatatgtacctcagggtccccagattttcttatcctgggattgcatgaccttgtccttggctctctcgggcccctgccgtttccagtgttctctgttcatgttcacaatattgttgatttggctgtggcttcttcccgcagtgttcttgtagactgaagagagcacattgctgcccttgtccctgtgcagcttcctcttcctctttatcattgctcaggtgagtggcctgagcagtgctcctgggatgaggtgaagagaagcagtcaagactgcagggaagggctaggggtgctgagctggccgagcttccctgggggaaggcactgggccatctgtccagcagcagttggcccacagctggcagggcaggctcaggagtggctcttgaagatggctgcttggtgtttgaagacagttcccagggcatgcattcatttgttgagcaccttcaatctggcagcctgtgttctagatgctggctgatgaccaaggctgacatggctttggctgtcatgggagtttcattctagtggtagagggagagagagagagacgatgtggtagagggagagagagagagacgattagcaggggaatcaatgaagaagataattacaggttgtaagaacagccccagaggaggttacaggtgcctgtttgtcgagaagtgggagggccagagttgggataggaacctatgtccctgattgcaaggtctggctccttctgtgtcctctgggctttctggtgggaagggaggaggtggaggagaccccttgcgagggccgagcttctcccattcagccagtctggaccagcctggggccttcagatggagatagcaaaagttgagggcataagctagggactggctctcttggtcactccagttgcccatctctgtacttccccaggtgaatagccatgttttttaaagaacacggagcaaatttgcatacaagagtccagatttatgcatgctgcagctttgtctgaaggcaagcttatattttctctcctattattttcaacttttaatgagttaccagcatctcagtgcccctccagcaaggatattgggctggtgttttcagggaacaattttaattaactcctccttgcctccctctcacccagccacccccagtccccttcctggtggctcagagtctggctttggcatgcaataagaatatttttgccttggtgttagcctttctgaaactcttgattaccagtgctcacaggacctttctgcagcactgtctgcttggctgtggactacccagaggagcttggtgtcaggcaaacttaggcgatttccctgagcatccttgttgagtctgcctttgtacttctttgtcaggtctagaggcttggccgtttgtcctgctcttttgtcccctccttctgggaaccctcaggaccctcactccatggagactcagcacccttcctcctgcaaacatcagtgatggggctttcccagccctttcccctatcttccttttcaaagaacaaagcctttgaagcttgtctcatacctgtctgatgcagtatgggaatctgtaagttctttgcctcctgaaggggtctggggaatcacttggctttcagagctttcctcgctcctctcccacccacagaccgattttaaccagagagtaagtcattcatgctgtgcttgaatactccttccagtcccactaggaagactctttgttactaaattctgttttcttgggaaaggggagcttattactatctcattttgttggttgttattaccctcctttaaaaatgtatctacatacacgcatgtgtgtacctacatgtttctatatttcccttgtgaatgtggccctcagagggcctggatttaaaccctgggagtggtagtgaccctttgggaaatgtatactttttgttccaaatcttctctggcttaaatttgtgaagttttgtttcagccttggtttcatagtttttcccagtttccaagataagtttggggctcactgtaatcagcatgtaaaggagaatatggccatcagctctgccccttaaattcatagtcagactcagtggggaagccgttcctgtcccatcttgcgctcgtggctctgtcagcctcaggcagctcctgcaccgtcctcctgcctgtgacagtgttgtcaggagttcttggtacctgggtgctgcttggcctcagggtgccagggctcccatgtggagtgtgcttgctgcagtctctacagcccaggtgtctctgcagccctcctcttacatagccacagcgtggtaaagtacatccagtttgcgctgtagtaagcaattttattaaaaaaataagtttaatatgtaagtggtcccttagttcgtttgaatggctcccctctctggctttggtttgaatgagctacacctggctggagccctgctgctcccctcagcatggagtcacctccctgtgctatggaggaaaggaagaagttattcttaccttggttttgagacaagacaagcctggagaaggctgtagggatgaaggagttgcccatttgtccagcatcagttgagagtctactgtgtgcctggcatcataggaagcctctggagtgctgtgagcaagaaaataatacttgatttatgtttttaagggttcttctcgctgcctgtgggccggcagtgaggaggacaagagcgcagcagggagatgggttaggaggcagttgctccggtgcagggagcagtgccagcttgagggctgctggtgggtattggtgtgagggtgggcaggctgcagataggccttcgcccattgcccttgccatgtgtccccatgtgtccccaggggaggctctgggcatcccaaactgtgagcctgccctttcccaagtgtgctaggccctgccaagctcctgcttcatggcctatgctgttcattccatctggaatgctctcttccccctgctttccatcctagctgagtgacattgggcaagtgaccagatctctcttgagcctcaatctcttattctgtgaaagagtgctcatggaacctactgcatgggaccatgaggataagactatagttgagtgtggtgattgcagtagcctccaaagctgtctcctgcttccaatttcatcccgctactgtgcattctttacacagcgatcctgtgaccgagggtcagatcagggcaggcctctgctcagaatcctctccacagtagcttcctgtcccagtcagaggaaaagccaaatcttagcatggccctcagagcttcctggtacttctgacctcatctcccaccccaaggccatggtgtatggttgatcatgctgggttctgcacagctcattgtggtgcatgtaagtggcactcacttcctccccaacttatgcattgcacaacttgtgcagctgtacatgctgctcctacctgcgcctctctagctccactccagccacagtggaatccgtgttgttcttcaaacacaccaggcatgcttcctgtttaagctctccctactgcctgctcccttggcctggaccattcttcccccagaggtgtgtatggctagttagctcaccttcttcaggtcttttttcaaatgtcaccctatttaaaattgttccatctgggtcactgccccccaaatgttccctttttcccttgctctttatttttcctcctagcacttatcaccatctaatatattatacgttttccttatttatttggtttatttttatttatttatttatttctcaacagaacataagcttgatgcaggcaggcaccagtgttaattttgttcactgctgtatccccagtgcctggattggtgcctggcagtaggggttcagtgatgcatgagtgaatgagtttggatgcacaaaggtaaagtattgggtacggtgcttagcacactggaagcacctaatacatggatgccagtattttcattgtctctgttaactctccaggccctggctcaaatgtggctttctctgagcctttctgcagtcccttctcaggctgaattaagtcaccaccacctgtgctctgtgttccccttcattttgccttctctgtctgctcggcatttatcacactgcagtagtgggcttatctcacactttttcctgttccaattgcaattcctgtggggcaaagactggcctgttcagatttgtatctcaggcggtctgcgcccccagctggcatgtggtaggagcttaggaagtgcttgctgctggtggctgtgggaggtggaaagagctttttaatccatcaggacccttacaagggggactggctccagcatcactgccgtctgatgtttgtgccccctcccaaggggtgtcaagggagagcttggcaaccacttaaatgagagtctccagtggtatatttagagcaaattttggagagaggagtctcttggataacagcatctgggtgacctgattgtttcacatataagagtttggctttttggctactcaggctttgagaggttggggtcattcaagggaggcagtgtaatacccatgtgttcagaggtggctgggacgagagggtgcaggagaaaaggcttgagctggcctgtaagggatctgagttggtgaagggagcacagcttctgggggtggcagaaggaataggagagctgcccctgccatacctggggaggggtggttaggtaggtgccttgggaggcatggttaggtaggtggtttggggccatggggggaaaactgtaatgccagggcaattactttggcctcttgtatttggcaggaggggtccacactggggattgtggtggcgtgagggagagggccctgggagagaagctctagagtcattttcttttccagaggtggagttgtcttggggacctgcacgtggcacgcagagcccatgctctcaggcacctttggggtggcagagtttcaactgaaccaacagaggacaaggggctgagaagtcggaggccttggctgaggtgcccagtttcttggttcactttctttacctgccaggttagcagcaagtgagcaaatccctcctgcctttgctcagcattagcctcagagacttgaggagagctgggccttcaggtgggagcctggtggccacactggagaggaccaagcttgacattgagtgtccgaggggctgaaagttgttcgctcatccagagatggattcgttctgcaaacatagggaaagttcccttcccattcctcatggctgtttgaggatggaattcctgcattgaccttggcctttccctgatcttggcctttcccctgcactatggcctctctactcttaacattacgccccagcccttttccatgggcccctcgtcttccctatggccatctaaaatggccgtataatattctatcaagggaatgttttcagtaagccatgagcttgatatggagcatttagattgcttctaatttttgctctttcagctaatgctacattaagccatctctgtgtattatggaatcatttcattagttggcatttgtctagctaatggcaatggcccaagatttaatagcgaatcagaatttcttttttcaagaagaatgtcatgaggatatataaaaaatttacttaaaatgctaggaatcatctatgttggggttttcatgaatgaggaagcagggaaacagtaacatgaaattagttgtaagtgaaagactgtgtgtataaaagtaactcgtgacttgtttgttcctgagtgtggaggggagccaataaatccttggaaggagcaatctacctgtgaaaatcaaagagatctgtattcctgcatctgatgaaaacataacaaacagtgatctcttcttaaggatatttttagaaatgccctaaaacaagaaaaagtaaataagatttccgagaaaaaacatgtctccttaattccaaatgagcctctctggaaatgccatttagtagtggaagcaggttgtagacttgctgaaaggatttggttctttggttattaggaaataactagaatgaaattgacaaacagacaacactgacttggtccccagtactgctttgagcctgaggtatgtgttggctttggaatgatggggaaggcttcctctgacttgctgatttgttgtagttgttgttgttattgttttgagatggagtctcgttctgtcaccaggctggagtgcagtggcgtgatcttggctcactgcaacttctgactacctgattcaagcgattctcctacctctgcctcccgagaggtgggattataggcacgtgccaccacacccagttaatttttgtattttcagtagaaatggggtttcaccatgttggccaggatggtctcaatctcctgacctcatgatctacctgcctcggcctcccaaagtgttgggattacaggcatgagccactgcgcctggtctgttgttgtttttattgtttcagtctctggtggcttattatgtagacttgggctgtaagctttgcatttcagtttaaaccagcaaatgtttacactatataaggttgcaagggctaaaactttagggagaaagaacccagtgcacccctgtttctgagaagctcatgaccagggagtgggaaggataaagcaatgttaaaaccaatggttattcaagggagattaagaagggggccctgggagagtcagctccatccttttagagaagggaggagttctacctcactgctgggcagggtggggctaaggggcaggagaatcaagaaaggttttatggaactagttgcatttgtcaacatcttgaaggacaggctgaaatggaggctggacattctcagcaaaggtaaaaggcctgagtagaggagatggagatggaaggacatggggcaatgtttgggatttggctgaagaattgcatgcctgtagtaatggtcatagtagcactttatggagagtatcaggtgccaggcatggttctaagagctttatatgtagtaactcacttaatccatgcaatgaaccaaatgaggtactgttattatccccattttacagatgaggaagctaagataaatagcaaggaattaattgcccaggatcacactgctgtggagccaagatcagaccaagttcatctggctccaggctctgtgcttacgaccatgaagctgtcctgtctctgatttggggaaagaacagtcactagaatcagacagatggacagatgccgtatgtttagaggctgggattatcaacattcaggaatgcagaggtggaaaagagaccagagatggagatgaggggcattggagaggtggggatgggaggagggtttggtgagagccgtgaagggccacaggaagacagagctttaaggagaagtttgtcagtgaggcccagagctgcagacaatcccaggaggtgagacctgaggaataggtctgggctgaggagaaagctgtgagggcctcgggagaggggcagcagggtgacccaggctggagctgctgtggtgtcctatcctggctgcagagtgctgcgtgttcctgggggatcatagctgttgatgagtatcactgtccctgtcctcttatctgtagaaagaggtgagtgtgacagagggggcaggtgagagctggcactgctaatttggcaaacctggtgacttttctgcagcctaatgatttttgaaagctgtttgctatgctgaggcacaagtgtgacttcccccatctaaatgctgtgcaatcgctattttccctggaaaattgggcccatgtgggctctgtgtgtggtttatttgagttccatttttatagccttattaccttgtccccatgatgcaagaggcctctctcttttcttgagctttgctgtgaaaattgtttcttaaaaggcacaaagtgatctctcgtcatctgggtggtgctcgctccacaagcagcacttttctcagactccgcacacacttgtcatcgcccctgcccccacttggcaggttcctctgattgttggcaatttactgagaacttttaggcagctcttgaagctcactacctatgtgtttgtcttgatttcttccggaagagtttgtgcatgtaaatatccattcagcctctttctctccgagatgttgccctgccactgaccgtgcttggggctgaaacccagtcttgtcctctggcctcgagctgattaacaatagcagtcatcatgtacagagcctgagtggttatcaggcactaagctaagggatttacgttcgtgatcttaattattcccaatttctttgaggtaggtactattacttcccccattttacagataaagaaaatgagccttcaagggatagagtaagttaccccaggttacatagctagtacatggcagagctgggcttaagcgggcctttctaaccttagactccatgtgctccattcattcattcattggcaacaaatgattgtctgcaacaggctgagaactgttgtagacccagggtgtacagcaaagggaaaaaaggccaaactcccaccttcagcttatattctaacttggggaggtagagatcatataataaatgacatatacattatgctatgtggtaatgagaactatggagaaaaatgaagcaaggaggtcagatgggaagtgggaggattttgaggagtggtcaaagaaggcctcattgagagtacaacaaattgttaggttaacaaacaaacccccaaatctcagtgtagcaacacaacaaaactgcacttctctgcagaaaaaattccaaagtggctgctcctggttagcaggcagccttccttgcagtcatccagggacctagactccttttatcctgtgtctctgccttcttcaagggccttggtttcctttgcattcaaatgctggagcgtgaggaagaagaagagagggtagtttgtgaggaaggctttatggaccagtctggaggaagcatacctccctcccacccactggccagaattcagtcacatgttcactcctgactgcaagggaggctgggaaaggaagtctggccatgtgccgcctaaaaaaaggaagtgggttctggtgaactcatggcatggtgtgttgcagcgagtgaggtgaagaagtgagctatgtgtttagctggaggaagagcattttacacaaaaggagcagcaagacaaaggctgctggaatggagtggggaggagagaaggagagtgggagaagatgagggcatggagttgtgggggccaggccactggggtcactgtaaggatttggttgccttgggaatgacaagcagagccagaacatagagttttgaaggaggaacgacaggatctgaggcacgtctcacagggctcactctggctgctgtgttgagagtggactgagggagcaagggggatgcaggggagaagcgggcgtttgcgggtgttatccaggtatgtgaccagaagggctggccctgagccggggtggtagaggtggggagaagccgttagatttgagatcagttctgaaggtgggccagcaacttttgctgtgggattggtagtggggcatgagagaaagaaaggagtcaagattattctgaggttttggctttgcctaatgagtattagtctcacttcctaccctcagaagcaagaggggaaattttttggaaaaggatatctgagtgttctctgggccctgacctgtcctccataacctctttcactctgtgatacttttttcagcacagatgggcaattcccattcatgactaggctttcagacatggagagggcacttggagtccctcctggcacacagcagaggtgaggcagcactgggaattgtctcactttggggtctttgggtcaaaccttgggacccctttagagtgacatggcagggactgagtgtgccctctaggggggtgagatatgcctactggagtccacttccaatgcctgccatctgcaaacactggtgaggccctggctgaagggtaacaacccacaaaagtgcacaaaaggaggaagttctggaatgcgagttgatgctgccagcggtccggttggctccttgccttctgttctttgtgtgttgacatcagacctctctactgcagacaggctgccctacctgagggggcacagctgccagcagcctcagtttacaatcctagcaaaggaggagagcctttctctacatctaggtatcagtttaagggaaaagcctctgtgtttgagagtgggagcggaaactgtttcccacgtacttccttggcagtcatgacctgtcaaggctgaaactggagatgggactttttaatagaccatgatctcactgggagcatatggggaagaaagttcatcttagagatggcagggcgtgagctgtgaaaacagatagtgcacacctactagatgctgggcccccgctaggtattttatttcactggagagcaaaacaatatatcatccctgccctcatggcacagatggcctcaagtggctaaaccatagaatggctagctgagagaaatgatagttctttctttttttctttactgattgcgaatggggttgtatttttaattttggtatccatgtgttcattgctagtatatagaaatccaattgatttttttgtttttatgttgtatcttgcatgtttgctaaactcactaattagtcatagaaatttttttttgtttattccccaggattttctgcatagacaattgtatcacttgcaaatagggattgtttcatttcatcttttccaatctgtatgttttttatttctttttgttgcctgattgtgtggccaggacttctagtcctatgttgaacaagagtgctgggagtgcacatccttgccttgttcctagtcttggggaaagcatcagcctgtcaccattaagtgtaaggtcagctgtggatttgttgtagatgccacttgcactttgctggcatggttgtgagtaggactgtgggttttgtgtgtttgtgtgtgtgtgtgatgtttggctgaaatacagtggttattatctacaagttttctgtcttgaaacagggagatttgttggggcattttctctttgtgctccttggcatttctgagttgctggtctcctcagttccaagtctgagctatatgcagaaaaggaaatgcaggaagctcaccactgtgttgttccttggatcctgaggtcccagctggtctgccttcttcagactgccatttggagtcttcttatagtcatctagcatagaatgcccaggggttttcattgttcttagcaggtggaatcagggaaagtgcacctgctccatcctgctgggagtggaaatggttgggggaaattggagcgtataggtcggggctagtttagatgcaagggctccgttctgtaggtgcaggagggccgtggaggctcagccctgacagcagtgggagggggatgggaagagggggagtggagagagcctaggtggctgctgcctgtgtccaggcaggaggtcctgaagtcctgaggtcctggccgtgacagtagaactgcagcagaaagaaggacaggaagttccatgaggacagtgaggaagtgcaaggagaccaggttggtctgaggtttctagctagagcagctagctggttctgagataacagagacagagggaggggtctaagcgtggcagaggggtgtattctaggcattgtagagcagatctggaagactggacttactgtgcttcccctcaggggaggcttcacagaggaagtctggctgctggggaaaaatccagggagtgtgcattctgggcagaggaattctggctgctgggtaaaaatccagggagtgtgcattctgggcagaggaaacaacgtgggaaaaggcacagatacagaaaacggcgtgatgggcctgttgggactccagctagctgaggcataagtgggtagttactggttccatgactgggaaggatgctgtaggagtgcacaaaaggaagaagttctggaatgcgagttgatgctgccagcggtccagttggctccttgccttctgttctttgtgtgttggcatcagacctctctactgcagacaggctgccctgcctgagggggcacagccaccagcagcctcagttttacaatcccagcgaagggggagagcctttctctacatctaggtatcagtttaagggaaaggctctgattggcccaggttggtgatgtgcctgcctttggacccgtcactgttgcaagggagtggagagttctaatctaggccggatcgtctgcccacccctgttggggcaaccagagtcttttaaaggagaaggcagacaaaatgcatctggggaagataaaaaagactgtttaccatggcttactgtaatagattttgaagaatatgtagtctggcagtgcaggaactcttcatggagattaaagcaggggacttgatcaaagttaggttttattaaaatcattctggacactgtatggggttgtgattggaagtgaatgacaagaggtgtcaaggcgggttcgtaggccactgctttagctccaaggagcactgatgaggcctaagctagcttagaatcctgacttactttgtttgcacttcacctgtagcgacagcatcagtgaggtggagaacagggatagagtcctagagatgttagacaggcaagacttggtggccagatggaggcaaggagaagggggtcttatggaggattccccactgccaccaagggcataaagaatgagtctctggagggctagccttatctttggaaacactattaagtgttggcagactcgatgtaccttattgcttcttcagaagtgttagtgttgttggcttcttgtggtatccagctggaaaaggaagctgattgattgcatttccctccctttaaagagcttccttttttgagaaatcagaagataggtgatacagtcaggactgccagtggagaaataggttggggagagggagacactggcttggagactctcctgcccccagcctgccccgaggcccgcgagtctgctttaggcacattcgtccttttggcatcatccttgctgggaaggcttttaagggatttaaggaaagaaatgacacaatctgattcatattgcaccagatttcctcctctgttcagaatagactatgggtggaggtagagtgactccaagagtagcagcagggaagcagggcaccaattaggagactgtcgcagcaatctaggatggggacggtggaggtggtgagaaatggtcacattctgaatacattttgaaggtaagaaccagttttagtgaggattagatgcggagtgggagagaaaggagatgaaaatgactccaaatttttggtctgggcagctggaagaacattgtcttaaactgaggcggacacaacgctgggaggagcacgtcaggggtctgtgttggacatgtttaagtttgagacacccaccatgtcttacacaaagctcccatctacttcttacttgacacaaacagttggatgtactggtcaggagttcagagcaggggtccaggcttggagagaaatctgagcattgttagcatggaggtgatatgtgtgaatccaggagactagttgagatcaccaagggagtgacagagaagagatgaaaacaaggactgaacacgctgacataagaggtggggagatgagggagaataagcaaagataagccagtgaggtgggcggaaaaccaggagagctagagggcatgattaactggtgtcaaagctgcaaggtaaggactgagactttaccaatggatgtagcaaaatgcaagacaggccaaatgcatatgctgttggacctaagcttaactttgcaaataagtcatagttccttcccagaaggagaatataattttgcaaaaagggatcatttaagatttattaaaataaatctgagaaagatgtgaagatagtaccgtaggaatccagcagaaggaaacagtgcttctggcttttgtggggaggattgagtcagattcattcataccttcattcatttgtgtgttcattcatttggcaaaaacttattgggtgccaggggttgcggggaggagggaagagagagttgttatctagtgggtatagagtttcatttttgcagatgaaaagagttctggagatggcttgtggtaatggttgaataagaatatgaatgtacttaataccattgaactgtacacttaaaaatggttaagactgcaaattttatgtgacatgtattttctcacaattaaaaatggagagagattaaataaaaaacagagcactttttggggccccatcatgaacttggtctgggatatgatgtttgaaatggatgcgccatctcagtagatggaggtaatgtggagaagagtggaggaagacgtccagctcagagggttttgggaactatcagtcctgtttgtctggatggtagggtctatcgggggaaaccatgcaagctgagactgcagccgggccagttggtgcaggcccagcatcctggctgtggatttgggcctgccttcttagattctgggagcctctgatggtttctgcccaggggagtgtcattccaaaggtgtgtatttagattaatttcattagtccttcctgttaaaccattgcctattaaaagcagtggggttgaggcattcatttttatggtgaaaattctggcctagcagaattttagatatccaagcatgtgtcaatgaagtgagtaggttatttttccatccattttacaagtatttattgaggatcatctaagtgcccgtagtgttctaggcagttgggggtatgggacggggtgaatttaacaggtctcttctcttaaaaagcctacagtctagagaaaccccctctccttcctaaacaagaagttatgccacaacgtgccatgtgttaccataggcatgccgccacagttccatgggtactgagaggagggggtgcctggcctgcctggaacactggggaggcttacagggaaaaactgtccaatggatttaaaggacaagcagggattttctaggcaaagaagcagaatgggcatcccaggagtatggtaaatcaaaacttattgggtgctatgaatttaaagctaaacttttatttcattggcttttaggtggtgctggctagagtgtatacgtttggacccaagcttaacttttccaatgtggaatcctgggccttcattggtaagtttgtttgatgccttcttaccaaattatgctatcaaggattggtatttggaatgaaaggcaaggtagttatcattggcaagttctctgtggaggttaccagccctggacctggagaagcctgtagcacaggctgaaggggtacataggaaaagtgaaatctcactgtaggtttctgtggtagatgcagagagggaggccagaggaggggaaccaaggggtgcgggggatggatgcagcgggccttatggagaggtggagctttggctctgttttgaagggcaagctagattgaaaaaagtccggggaggagtgaaagaagattttcgggacttgagaacatagaggtgaggtgtaaacaaagtgggcctagcagcagtcccataggagcaaaatcttcatcgaaaggagtcacgggcaagaactgtggtgggatctgctggcgtctgatgattctagtccatcagcaaactttttctgtagaggaccagatgctaaatatttttggcttcgtaggccatgtggtctctgtcacagctactccactctgctgtggtaacatgcaagcagccatagataatatggaaatgaatgggtgtggcagtgttccagtaaaactttatttacagaagcaggtggtgggctggatttggcctgcgggatgtagtttgccaactccttttctagaccctaaatgcccggctaaggcacatagactttatcctgaaggcagtgggaagccattgaagttattttggataaagaagtgaagtggcagaagtgatgtttacattttaggaacattcatctgatagctggacaagaggcatgggccccttttggaaggcagcagcagtcatccaggcatgaggtcttgcggtgaacagtagtgaaaatggaagcaaaggatcaatggaggagatactgcaaagggagaaccaatagcgttttcagtcttcttagacttaagaggcaggagtcaaagaggatgaaagtttaagcttgcttgtttacggtggtatctttgacagaaatgtagatgttgggggtggaaaggatagctgatgcatctggttttagatatgttgaattcaagataacagtggttcatccataagaaatgtccagcagagaattggaaatgcagggctgaagcctggcctgagaagattaagtctagagatgtggaatggaagccataggattaaacacggtctccccaagatgagcagtgggctgagctgtggggaatatgcgtaactgtgggacgggaagacgatggaagagacccagaggccatggaggagagtcccgggaagggaagagaatggggcagcagagaccagggagaacggacctgaagggaggctgctgaatttgtgacaaggtctttgcagatggccttgagaaatgtaatgtcacaagaggggaagggaagaggaagccaggttacatggagttggacataaatgaaggataaagaattgagatgttacaaaaatagaccgctcatagaaggtttgggtagtaaaagaagggagacacataagatttagatacttgcttgtcagaataacctttgctttagctttgaggcaggcaaagcatgctgtgaccagttttcatttccttctttggagccaagctgtgtttgggagtttgtgtgtaccttgggcttgtgattgtgttcttatgctcccttttgaggtgtggtgttcgtaactctgccacaacttgcaccacggaatccagcccgtgtttggacccttgccatgagacaagatgtgatctgttggggaagtagttgcatttgtataagttggaggagaaagtagagtggaccaaaaattgaaataaaccttcttactacagagtctatccaagtatggggacttgaggataattcctccagtcatgatttaattatgtatcaatttgtgctctgagtattttgagtgtaccttctttggtttgaattctaagtagtttttgacttggtttgtgtgaatatagcagttagagagctggtaacaaaagcaacagttgtaactggtttagagccatgatttattgaacactcattatgtactaagtccagtgctaagtgctattgtgtatcatcccatttcatctttgcaatgacctatgtggggggaattattaatagtattcttatttcagccagaaataagtcatagatgagtaactatgcaaggttacaagggatttgaacccgggtctgtataatccctggcttatgctgcttcctactttatcttgcctgtgtctggaatttttcctcctactaatgtagaaggactagagatagatcgagtccctcaggttaaatattcagaggctgtagtgggtgtttccacttcttaggagtctattgaaagggcagaagaagtgtgggaagtctggaagagactaaggccaaacctcaaacacttactttaactgtttccccagataaaatttagttgaaggcagcagccttgggcttggaaagaaaatagcgctagaaggcatgagagtcagattccagtcctagcattatgacaattataatgtcatttttgtttaaactcttggcatttctctccaattacctccagctttgagctccaaaggcaggctcctattttgtcttgtttttcactgtatccccagcatcgtagcacagaatctggcatgtagtatgttatgtactcactaattatttattgcttcgaatgcaccaagggacttggtacaagacacttagcctctcaggcactgctcttggcatcatggttatagaggtgaaacaggacaaggtctctgctgtcgtgaagcagacgtctacatgtgtgagatgtagaatgtgacgtcaggtatgatcatgctctgaaataaaagacagtgagaccggggtggagagggaagggcctgtccaagaagtgagacagtgagctcgttgggggtaaaatccataaaattcctcttggggtgactacagattgtcagctgcgctgtcagcaccttgttttaattgttttacttggctgccattgccaatgcccagctgactgctccctgcagcgagaactcccacctcaggcctcgctttcttcagctctgctgagcgtgcctctcctgggtcggctcccggttctcctccagctgctgagattccagcctccacagcctgctctgctggttctctgttctttgtccttagcttctggtttggcttggtccctttcacgtcatccttaacgtcctccctgggtgagctcatccaccactcacctctgtcttgaagacacccggatctccatatccggtctgaacctcctcccagtccacactcctagtggtctgccccgagggcacctcaacctgtctgtcccctcctgagtgccacatgcgtctttctccctgtgctgcctgcttggtccacgcccctcagttgcttctgcttcatgagtcgtcctggccttgtcttttccctcatattcccttggttaccacatcctgaagagctcatcttctaatttgtcaactcagttcttctctgtctctccactcctgtgtttaggattcatcattttgttctatgacagcctcttaattggtcatcctgtgttcatctttttcctccctcattccactgcccacattcctatcaacgtgatctttctaacacatgtctgatcagagctttcttttgcttaaagctctccaagagctcctcattgcttagaaaataaaagctaacccccttcagcggggcctgcagtcttctcatcatctggcccttggccccctgcagcttttgctcccccacccccaccccactttgggttttcctttttccctaactcacatttctaacctcagcctagctaccaacagccatcacctcctagtgcctttgcaatgctgggccctctcctgggaatggcgtggtctctgttcaccctcttgggaactcaactccagtttcccccaaatcttcaggacaccatccttccctacccagcacctctccatgacctggaaatgaccttcctcctggctcccagaacaccctcatgtctctcttgcaaagcacttatcggtgttactgttgatttacttacctgttatgctcagcaacctgagctccttaagggtggagaccacacacacacacacacacacacacacacacacacacacacactctgtctctctctctctgttccaagtgccagcatagtttacctggctcaggaagtttttgttgtaagagtgaggagtggtctgtttgtgcagccaagcaacagattcataatgtgataaaatgtacctgaaatgggaggttcattggccattgggtttattggggtgctcttcttgtcagctttgagtgcaggacaggttgtgttgggcttgagtttgtgacgcctgttgtgtctcccagcatgctgagacctcaggaatgtctcttctctatattctttgcccctgactttttatttttttagctcttgtttttgatggaccgataatagcaattcaaaatgaaaaataatccatcaaggaattctcaggaatgaggtccacccaccttggtcctggatgaatcccaaatttcctaaataagccagaatatctattcttgcgaactactgtctgacagcctttttcccccttaatccagctgagaatgcttttcttgaagggtaaggatacctagtggcccttcatgggggtgcctgagggcctctttgtcttcattttaaaccttgtaaagtccccagtgaatactgaggagtctaacaaataggaagaagctctgaccccaggggtcccaagtcagcatctgtactttgcatgggagctagcacaatgcacctagccaatagcatataaactctcctgttttcattcagtgccttaagcttgttgcttgttgtgtcttcttcacttcctatctctgccagagacctgagaagttgtgccaagagtgcagcttttatttggggcctcacagtaatctaggaaagcttttcagaagagagccattctcagcaccgaggtgtcctgcagaccaggacactccagcaggctcttggaactgctttcctgggatggaaatgcttgtgatgctgcctccccttgtagggactttccatatgctgttccctcagcctggaatgcatttttctcctggtttgcctagctcatgcctgttcaccctttggaactcagctgattggcctgcctcctcctcagaagcctccccaacctccctgataagaaggctaggtcttgtcctcaccattcccatgccagcatctagcgcttatggactgctcaccttgtgtcaagtactgttagaatgcttcatgcgtagctactttgtattaggggcttggtagatgttggctgaggtaagtgtcatcattgtcccaaagacactgtgtgaggaaactgaggcctcgacccattgagtaggtgacagagcaggagtttatcccagatgctggactgtgggtttacgctctgacccttctatacgccaccgttccctctgctccaagtccttgcagtctgtccttttccagcacttgtcatggaggtcatgacctcggtttgtgtggttatttgattaatgaatgtttgttccctcactgggcagcccttttgagccccaggatggcaggagtacctaggactctaggcaggtgcgcagcctggagttgaccgagagcatgtgggactgcccacttgcccacagctgcttcttgccttttgcatcacaggagggtgggctaggaccataaaagagccagcccaggcctccccctttctggagctcactgagtgcgtgcatggggtttggccgtcaccctcacttccatggttctgcatcagaaccagctgtgctgaggaaacatctgtgccttgttaaggtctgttccttctgcccactccctttgcccttttctctaccttacaacccctttgttgtccttcttcaaggaaaggggccccctttgtctctcagggcagagccagctgcccttctcctggtcctcttgatctgcacacactctgaggatgactgcccatggcaggtcatgatggtccgtctgccctggactgtggtttctgtggcagagcaatactttgtacagtcagggcccatggccctacggaaggctgagggagagcctgaggtcattgccttaagagaagctgcttcatggtgcagttggtatgtgtgcatgtgtgtgtggatgtgtgcttttttcatgcatgatgtttttatttgtgttatttatccccctgctatatctccctctctcaggggtctaacatggagctttgaatagtagatacatcatagctcttggctaaatacatattttctcccccgctgatctgaaggcacctcccttttcccctacccctcactttggtaccttggtgacttcacagggttgttatgacttcccagacctcattgagattgcagtgatgtgaaaaccctacctagattccagccagctgggcaggggccttggcagcaggggaagcccagttccctagggcaactcaccaggcctccagggctctctagggccaggctggctgagcttcaactgactcatactgtttttgactgggaaaaataaaaattttaaaatggcttctgaccaaatggggaaagtggatgtgggaggaggagaagggggacgttagccacaccctaggtacatttgccagcagcaaactgagatgggcttaaagtgtggctggcctctaagacgcctgcttcaaagggcattcggcacactggtctcaggctttggaggcccacctgcttcagaacatcagctccctgtctgtctagcgttgtgacttaagacaaacccaccaagctcccttagcctccattttctcatctgtaaaatgggattgtaatcattagaataacctttataaggttcttgtgagagtggaatgaagatgtgcttagcaccgtgactggcgtgtagaaagcaccaaatatttattatctgttaacattgtttttgtttgtcaaagtattattgttaataataattataagaagactttggaacagatataaagtctaaaatgcaggctgtgatgaaagggagatggtatataagaaaagtgctttttgaattgcacattatgtccagatattattattagcacaagtatgtttattattgttttgtctttgaaaaaaatgctggagcacaattttatgatgttgagtctatgtcctttgttgttttgttttttgttttggaaaaaggtttgtcacattggcctttattggaatcttgtccagtggatgtatgacccacattggtgaccctgggtgccaaatgcctggacagcacctggcaaagaagagccattatttcaatggtcactattgtttaaaatcgttatggtaaacaatacctgacagaagttcttagaggttcattgacagtaaattgtgggcaatgcactgagttattatttactctagacctgagaaattctccctctccaagttttgtgccttgtatagctaaataaatataaacaatttccttagaatttgatacaaacagctaccattgtcttcacaagtatgttagaaatactttcttaatagcaactacttgactgttttgttttttatctccattccctgccattactctgcctcttcccatctttctgaaataaaagtgagccaaattagccatttaaaaaatacgtagatactttcaggcagaggttgaaaactgtctaccccctggctgcatctggcttgcagatgtgttttgttcagcactcatagtgttttaagatgtttaaattagtggccaacatttaaaaatgggtagatttttgaatcaaaatccagatttccagctcttcataaaaaatcaaaggtctagtgggcctgggcccgtcttccttgtggcagtgcggaagagtggtggtccctcccctgggagcttgtttctccagcctgcctccggctggcccagcctcactgtacctttccatggcctgcttggcccctgtaggaatagagtttgtagtctctgcttaatataactaataccccttagatactgtgtatcagtttagaattatttccactagcaactgtgaccataggtaggaaggatattttacttgctaagttgtcattcttatgatagcccaaatggctataatagtattttaggctcttttggatttaatagaattaccttctctcctctctgtgggatttcctcattaacaatttttaaaaagtgttcagcaaggcttatatagcaacataaaattttaaataatgcaggatataaatttctatagctgctattgaaggggggttgcaatcaagtgaactgctttaattcaacaatttatggtgttgtaaatttgaaaaataaaagacacttagttttttttttttttttttttttttttcagaataaaataattaaatagttgacctttggcagagtctttgttgaaataggcaagggttttgagcttctcagaacttgagaccattgccttctggagtctttcctcagatgagtctgtgcctccttctagctagtgcactctgagcactgtggccacatctggagggtggagaggagacttagcttccaatggtggtcactctaggggaggggggcccttgcaaataccaaaatttttttaaattattattttatgagcttttaaaaacttttttgtttttgtcatcacaaaagtaataaacacttgtgataaattcagacaacactgaagtgctttaacataagcaacaaaatcttctgtgacctcccccaaccttttccaaccattccccaaacataagcacttttgagagtttgcttcttatactcctggacttttgcatttgcttgtttctctccacccctaccctttgccctcaaccacgacatagatactttcccttttgttttctaaagatagactgtccctgtgcatggtgttctgcaactttctttttacagctgtcaattattatggttatttttccaagtccatatgtacagataaatgtacttgttacttttaaaagttgtactccatgttatggttgtatgttaagtaaatttcgttttgtattgatagacactcaggttgtttctgaccttttgccattgcagtcattgctgctgtggaaatttttgtgcacacgtgtgaacttttgcctgagattttctttggtatagatacatagaagtaggacttttggtttaaatggtttgctgtttaaaatttgaatccataatgccaaattaccctccaaaaaggctgtaccaattcatgctcttcctaggagcatcccattatggctttgctaatctagtttttgcttacacatgtgtaagaaagtaaatcttaaaagcctcacaaataatgccatcaaaattacacgtttatcttagaaaagcattcagaatatatgtctgtagatttaattatatgatttttatatcttgactttgatggtggttatcatcctgcaaggtgacaaaaagttccctaaatactgtacacaattattaaataattattaaggatatcagttgtgccaggtagcctttggaagaattacagccaaatcacagcttccttttccacagctctgccaggctggcttgtctttcccaccaagggctgagccattaatactgaggctgggtcagcatttgaaggggccctgccagggagtgccaggccttgggccccagagacctggggagtgggagatggcaagtgactgctgtgaggctgagacaaagtttttgcctacaacaccccatggctgtttcctttactgagctagatgaggaaagcaaagggaagtgatggtccaagacttctggtggtcacttttgttcatagatttctcacaggagtgctaacatttaggctcatgtttacgaaggtttgaaaccttagcatttgggaaggatctgcaaattctcagccaggggccttaactgatcacaggtagttgtgaactcttggtccaggctgtatctcaaggcttcttcttagaaggacaggtcagcttaccacctgctaactgcatgtgaaattttgaattctgccttctctagctctcctctctggctctgagctggtatctggcatttgcaaacagtttaccctttgttgacttcttagcactaacctcacttttatgagtctgagtagacttgatacccaggccatttatcctttgagggtgccctcagcttcatcagacccatgctgggcagtctggcatagtggtaagaggcacttggagccagacagacctgggttcaaatcctgacatcatcacatttactaacagtgtgaccctttggctgatgacctcacctctttgagcatcagtgtctccttctacaaagtagggacagtaattctttcccaggggtattttgaaggatatacgaattaatatttgtcaggtgcctctcagatgttcagcacaaaataaacagtgtataaatatgagtcctctcttatcttcctgctgtagagagaaagttcgttggggatgctccaagttggtggctactggctgaggatcctggagtaagaggaaggctaccatgtaaacccagagatgaatcatgaacaatgtgtattctcaggagcttagtatttgatatgggagcctaacaagcaaatagtgtgtccagtaataggaactgattaatagaggaaagattaattaaccttctaggtgggtggggtggaaaagtaggtggggtattgaaggttcaacaggagttcgacagagaagatagaccataaataataaatatacggctgtatccactagagataaagttacattgttttttatgtacatgttgacttcttttggccttgccaatgcactgatatattcaaattcagctcctctctttttctcttcccttttcccttcactctgcctttcctccagccctgccttgaaatactcagccactgaaaatttcttaaagaatttctttatactttagtaagtcctcagaggataccagttcaccctactgagattttacaagaactttggtgtagctggggttttttttgcattcctttttctacggtagatataagttcttttgggttgcccatcaatgaacaaactaccaaccatttgatgtttactgcgtgactcctgtataccaagcacatgtgccatttcacttagtccccagaatgtcagagcagctttgtgaaatgggctgcccgttctttcttatggatgaagaaactgaggcttaggtaggttaatatactgaatattatacatgtagtgagtgggaaagccacagttcacctccagggtctttttctccctctttgctgccttgcttggggtcctgctcatagtaggtggacagcagatgtttgtctgaacatatgagaacactgcctgccacgtgccggtcagtttgatttgtgctgctggttttgtaacccacatggggcaatgacagctgctcaggtactttcctacctattagtggggccccagggtcacacatcagtcataattgacaaaaaacacaatttccctttcctctcaacttttatttctaaggtacttgtaagcaggtagattagattgttaacttttcattttttgctttgtctctctcctttaaagactatgtgaaagaatacacagtgccctgagagcctggcctgggaatcagaaacttagattccagcttcggttctgctggtaactcctcagtcattatgggtaaataatattccctctccagaactactagattgtgtccttggtgcagtctggggttcgggtggtcctagggaccctgcctactgcatgaacctgttatcaccatgtgaggctggaaggatctcagcgttggtgttgggcaggcctgagtgagcatcctggctcctgtacttcccagctctgtgacctcgggctaatcacctgactccctgatgcttgttcttgtctacgaaggagggctaagaggacctgcttcccaggatcactgtccagattgaatgagaaggaacgtcggcttccttccttctgtctccaactcctgagtgcactggttttagactaactgggtgtttctgcagttgaaaccaaaacaccttcattaggtacaatgttcattatacctcgcaacaccctgagatactcaactcttagatttcttgaagctcttttttgttaagaaactcctcaaaggaagatactcttctaccccattgagctttattagtgcttcaatgacagcaccttattttttcacttttttcccccttgcagacagaagctgcagtgtgaatcagtttgcatttatataatttcttttgcatttctttgcaaagaggaaaactccattcatttagcaaatgtccgtcatgcccaggccttatgttaggtgaagggatttggagagaaatagagtcactgacctcaagaagcttacagggaggaaaggtgtaaatacataaagtgacacatgggtttgtcctgtcaccaaggtatgcagtagatgctgtgggagaagagaggatgacacaggttctctcttggaagacctcatagagaagaggtgacttgtgagcaagtctttttttttttttttttttttttttttttgagagagggtcttgctctgtcacccaggctggagtgcagtggcatgatcctagctcactgcaactttgaaatcttgggcttcaagggatcttcctgcttcagcctcccaagtagctggaactacaggtatgtgccacttgcctgtctgatttttttttttttaattttttgtagagacagcgtctagccatgttgcccaggctgatcttgaactcctggcctccagtgatcctcccaccttggcctcctaaagtgctgggattatagacatgagccactgcacccagccgttgtgagcaagtcttaaaagatgagtaggaaggagtctgtcagctgtagaagtaggaagggcccaggcagaaggagcacagggcagaggctagagccctggtaggaggtgacacactgggtgcatgtctggagctggagccaagaggtggaggacctaagtggctacatcttggcagtcacccatatattggcaagccccaaatctttgtaaccagcccagattgtcttcctgagcccccaactcccatacccactgcccattcagcagctagctgcatgttgaagtgtagtggtcttcccagacctaacataactaaacagaagtcttgatttgttccttcaaaaacaaacaaaaaactagccttgctcctcctcagtcttccccatgttatgaggtccccatcatttttacctggctacccaggcctaaaatgtgggcatcatctttgattctgcttcctcctgtgttcttcacatcatctgtttgcaattctttttttgtttgttttactggttttaaaaattatttatttattgagactgagtcttgctttgtcatccaggctggagtgcaatggtatcatcttggctcactgcaacctccgcctcccgggtttgagaaattctcgtgcctcagcctcccgagtagctgggattacagtcgtgcgctaccactcctggctaatttttgtattttcagtagagatggggtatcaccatgttggccaggctggtctcaaactcctgacctcaagtgatccacccgccttggcctcccaaagtgctgggattataggcatgagccactgcacctggccaatttatttatttttaattaacacataataattgtacatatttatggggtacatagtgatgtttcaatacatataatctgtagtaaccagatcagaataattaacatatctgtcatttcaaacattgcagttcttgacaactcttactgtatgtcctggaagccaccactgctccttattattagtttgtttctttatcaaccaagcaggccagaccactgctctaccctcgttcaaacctccactgtctttcagcaggtctcttgtcagtttgctacataggcaaagaggtcttttaaaaagcaaatttgtgtcatttccctgctctaaactctccagcggctttctggcatctttggaatggaatctaaacatctcgccttggcctgccagcccctcctgctcatcttctctggtctcatcccttggcactctctgctcactccatttcagctgccgcatcttttcttactgttccccctgttgtctcatgggctttgcacttgctgtcctccgcctgagctgctcttccccagacaccgcctgtctcaccttcactccacgctggcctctattcaagtgttctcccacctgtctgaaaaagcaccgttctgccccctctccccgctgcttcaaccattctgtcctacctcgctttggtttctctcattagcactcatcactctctgactttatatgatatgtttgtttgtcttcttatttagtgtttgtcttaccccacaagaatataaatccatgaagatgggacctggtcttatctattgcattcagcactctagggcctaaaacagagcctggcacacagtgggtgatcctgaaacacgaggtgggtggatggacaaatgactgagttaatgcatgcctgcatgcaagcgaagactttggagtttatttcataggcagtgcaaatctagtagacatctttcaggaggtgagtgacgtggtcagcacttttattttagaaagccagctggtggcagtgtgggggctggactgtaggagggaggcagcagaattactttagcggctgtgaaaatcgtccaggaaattgatgctgagtgttgtgctagagctgtggggatggagaagaggggacagatgacaggacctgaagatctttgagtgtctttgatttctattgggataacttggtatagtgattcctttataagaaaagcaggaggggacgaactggtccagggagagactgttgacactctgtggtgtttttctcaccaagaaaacctaagccctgggatgcatgttctctgtagtggcattggctctctggggagtgactctgctgctccgcagcctcccctgttccattttttaataagagaatagtcaagatggtggtgtcagtgagtgggagtcttcttcatgcagatggatccattgatctttgcatactccaagccacactaagtcattggttcttttctcgcagtgggtacatttcaccttatttgattctgatctgacaaatgctgctttttttcttttctttttttttctttttttttgtttaaagaatacctagactgtgctcaagttccaggtggggtttacagataactggggttccagcatctcccttcttacaaacacgaacaggagcctttgccgtccttgggtctcagggaggcagaccggcagcaggcacacattcctggcccaggcgtagccatgctgtctggtgctgccttttgagaccttttgtgtgtgtgtgtgtgtgtgtgtgtgtgtgtgtgtgtgggcttgaatgattccttctttcaaaaattcaaccctctccaaattttgatgaaaaccttttcatctctgagtaagcacattatttcccatcttgatgaggtgtgtcccctctgtgtccctgagagtatgtcatcccagccttttaaattttattgtatttttttattttttattttttcatactagtcaagtgcagtagtgagaagcggggaaagagtagaacaaggggccgggggcggtggctcacatctgtaatcccagcactgtgggaggctgaggtgggtggatcatgaggtcaggagattgataccatcctggccaacatgatgaaaccctgtgtctactaaaaatacaaaaattagctgggtgtggtggcacacgcctgtagtcccagctactcgggaggctgaggcaggagaattgtttgaacccgggaggcagaggttgcagttgagccgatatcatgccaccgcactccagcctggcaacagagcaagactctgtctaaaaaaaaaaaaaagagtagaacaaggagtttgatctgttacagactgaactatcaatggagataactcactaccttcggaccagcctcatcccagtcttttaagcctggtccagaattcctaatcctgcttgtcaggcccttcaaagtgaaatgctgtaccatctgtatagctggattctcacctcctacctctcctctcccttccaaaggttccgatgtcataggaatctacgctagagggcttcctgtgtgccgggcactgtggtaagcacttcacatgcattctctctaatccttaccacttcggggatgtaaggattataatcttctttttacagatgaggaagctgaagcttgccactgcttagtagttaagagtatgggcttacagccaaacagaccctggattgattctcaactagctggggaccttgggcatgctacttaatttttttaacctttttcacatttagaagataaagataatatatagagagataatatagaagattatataggtattatatatatatatatcttctatattatgaagataatacagagttgtgataaaaattaaatgaaatgaccagacatagtggctcactgttgttttgttttgttttgtttttttgagacagagtctcgctctgtcgcccaggctggagtgcagtggtgcgatctcggctcactgcaagctctgcttcccgggttcacgccagtctcctgcctcagcctcccgagtagctgggactacaggcgcccgccaccacgcccggctaattttgttgtatttttagtagagacggggtttcaccgtgttagccaggatggtctcgatctcctgacctcgtgatccacccccctcagcctcccaaagtgctgggattacaggtgtgagccactgcgcccagcccatagcggttcactcatgtaatcccagcactttgagaggctgaggtgggaggtcacttgaggccaggaattcaaggccagcctgggcaacatagcaagaccacttctcttttatgaaaaaaaaaaattaagaaaaataaaaattaaatgaaataacatgtaatttcctaagtacattaagtacgtgcctactatgcgccggacattgtgctgtcagcaaataatagctcatcgcagatgctgttatcatcatcatcatcccaaagccacagattgagtctgtaggtgaggccctgcctggctccaaagattgtgtttttttctcctgttgctcccaagttcacctgtcccaaactttctagcccctaagtttgcttccttgcgcttttctggttgtgccatttgtccctgtctgggcagtgggctcaagctaaggcacagcagttttccagtccctttgagctactgacctcttttctgtcattgactgaacagtttccggtggctgaatcgtctgtgtaagagcttggacaattttttctgattgttaccatcatcgtgtttactgtgaaagggcttcctgtatagttgtttgtgttagcagcattgtctaaatgaaacaagagtggcaacagaaagggttggtgagcagtcctagtcttttggggtcacagatcactttgtgagtctgaagaaatttatagactctctcaaaaaaataaacgacaagacaaatacaagcccagcatttttcatgagacgttttccctgaagttgatctggaaggctatgtgctcttttgtcattgtgctactccacattcacagccatgaagggtgtcatgtttctgcagggtgtttgtatttaagggttgttgggcaatttggcaacactatacctgtttcattgatactatgtgctatttgcatttatttcccatatctgagatacgtattcacacatgagaactggcctggccattttgatgagatgtacctgctgatttgcacataaacacaagccatggcctgcatctagaggatcgactggagaggcttttttttggcccaaaacatcagactagtaggaattttattatgagttatagactaaaaggggggataaacttagcttcagcagggtttaatattctcaattcaggtaagtgtaaatctctacttttcattttaaacatttttgaaatttcagtctttaaaaaaatgcttgttttttttccttccaagttttaaggtatgggtttgggagaaggcagattccaaacactttaactcttcgacctcagacttgcttatgagcctctctttggaacatttccagtgaaccgtggagcaagcctgccacatccagcagccgtaggcatgatgatcactggtgccgatggcccctccactccctgcctggcttttgaggccccgcagaaagaaaggaacagaatcctttcataaggaaggccccagaatcctttctcctgctgtagctatgctgccagtgtcctctgtagatggaaatggaacttggattttgggtgccagaactgaattcatcacagataagattagttgatataaagctgtttctgatgagcagtttttcctccagagttttcatttttgctttttctaaattatacaaaataatagacactcattacaaagggaggatcataatgctccatacctggttttgaattccacttctatcacttattagatgcagccctgggcaaaacacacgccctctctgagccttgatttttctcattgaatgggagatctaattattttacctcataatactgctgtagggattgaaggagattggtataaataatggttttctgagagtctggtgtgtatttgctttttttcagttaatatgaattgagtacctactaagagctggtcactgttctagttgatatggaaccagtcaagagcaagacagagagggtctccgctctcatggtgctcacattctaatcagaggaggcacaagaacacaagatcacttcagttattaagaaattagaacccaggggtagcatgagagtcacaggaaggacccctttacgtcggatggccagcagaaccctccctgaagagctcaatgctttgtgacccccccggtcccaagttttccaggactcctacttttaaaaacactgcccctccaagtatataggtctcaattttgagtttggaaaatctgaccacatattagttctcttgttcattaatgggcttcccatttagagagtgagttcctggggcaggagccatgtcacaggaccttttgaaggtctcagggccaatatggacgacacttctcttgaacactcacccagttgggctgacatgaaaacctcatggtgggaggtggggggtgattagtttccagccagagcccattttgctccattgctgctttgaacattctggtttctaaggagctggaagtagtttctctcagcgagaatgtggcacactgtcatctcctgattctctgcatgcagttcttcaatggcttgttgaggctgcgtggaagcccagaggtcggggcagttccaactcacacactggcatttgaacggcagagcagtaagccctacacctgacataactgcattgccttcttggggtacggtacggatttttaaatgaccatttcagcctgctgggctgggcaacggtgatccaaactgatgagtcaggaagccactgaacagaaaggcaggctgcatctgactcacctgtcatgtcgatagttgacctccttttgtttgaccttgatttgctcagtgcaattaaagatgctgttgtgagtgcacttctgctacctgatttaaataaagtctaacatgtgacagctcagggtcttaaatgcacacacgacttaggcagacggacagatgggtgagtggttagcctttcacttacctctgaattgtaattctatcacaaggaaagggcttaatttcaggaacacggagtaattatttgagactagatacaatgccaaagcagcaggccttgattccttgctacagggcagcttaatcaggaaatggcctagatggccgcctttcaagtaggtccttgcagtagcttggcaacaggcacagggtcataattggaagaatttggctgtgagtgtctgtgggtgtttacagtgcactatagggcagggcttctcttatttatagaatattttgagcaacaagcagcagaaggctgaaaagccactaaaatctcgatttatttttaacaaattccatttttctcctcatcccagaaggagaactgagttattaaaaaacagttaaaaaatacatcattgcagagcatgccatatctaattatggggttgccagcatcggcctgcagccacatttcaagggcttcgtaaatcaaccatccattcaatctgtgaacttatatgactcctgttctccatttagatgtagagcgaaattattggcaagtgggtgctgatcagaaaaagttcttccctgtctaaattaggagatgggagggataaatatagaatagtatacttatgttctcaaaaggagataaaatcattcttcattgtccattatacttagctgcacaaacatccatcccattgcactaaatagccactttagagttttcacacattgcaatggcagttctgtgccactcaaaggcgcagtattgtgatatctcgctgagcctaaacctgagtgattattgctcacgtagtcatgaagagacataaacccagtgcttttttgcctgtgttgtcgtagtgtactagagctacaaggtgggccttcagagagacactagttttaagtatatctcattgtaggtggggaagcagaggcctaggcaagggagtgacttgcctagggtcccattaagagtcatggcagaggtgggctggggcggcagtctctgtgcttctcttgacagtgccctgctgtgctcactggagctactgtattaaacagatacccttcaggggttcacagtcttagaagacacaggcacgaagatggccaaacaatcagcccatgcataagcagaccaagatatgtgtatataacagattagttgagtggtagagaaaatgagagtggggaattttggaatctatttggatagcaaagcaaaggtaacatcagttgctctctgacccacttgggaaaagcttatagagatgctatgaagttttctaatggaaaaaggtgcagtacatttgccatgtgttagtgggaaggtaagtatgatgcagtggtgggtggtaggaggcagtgaagataagtattgcaactttggaggagccctgggaatggattgttgaggtgatttcataggaatacgaaagggagcataggaccagggcacaggccagagacaggcaatcccaagttccctggagtaccctgcccttttctgggaaagcaagtgggtggcatgagtgctatgttcccaatgctctggccccacccctggtagaagaataataactgatcatggtgggttttttctgagcctctgtatctttgagtagcattctggtagccaatatcagtggactggtgccagcctgtgtggtgaacctctatctctttcttgccctgggctgcatgtcaggcacagtgcctaagccggagtgggctttggggagttacttctctttctgaggctggaaggggcagagggacgtagggaaaactttgctagggagggcaaactgtgaaagcctctggagaagtcacctgttgggataccaaaggccagcggttttagaggatgcgaagaggccgggcggggttggtctgggcctaaactaaggctgtagcggctagcatggagaggaacaagcgacggggagtgattacggatgaggaagacgtactaggatttggctacagacagacaaccaaccagagagtaaaagacagtgacatgctaggatgtgaaccacctactacagagaaggtcagaggtggggagggaggaatcagggctgtgggcagatccagcagctgggatccaaagctgaagcccttgggttattgaatccattctttctgagaagagatggttgatcttcctgcccagggagttcctagccagactggacagtggttctcaaacatggtgccaggtgttgtcagatagcaaacaattagtttgtacacagaatgtccccaaggtcacctacacatatttgtttttcctaatctttgatacctacagccacttacctgctttcgagttctcagagttgagaacatataaatttgcagtaacaagtgcacaggaaatacttggaaaatggctgatgagctttagtttggaaatttcatttttttcttggatctggattataatttcagtacaagctagcaatttttcttgttggtaaaatagtttctagttttaaaattatttctgtagttaataaagttaacactatttcatgatggaggctgccccagctctgaaccaattttcaaaaggcagattctcctctttctctctcttatttcttgctcttgaacatttcactgtgttctagcaacttttcctgtgtgtgactcggccaggagactgacttgagtaagatccaggtcaaggggttgtgtgggtgggtcggtggtaaggaggtgctgaagaacactaaaacctttgcctgagaggagtctgggaagtagcctgcgaactggaatgaccccaggcttcctgtcacggtcatagcccatggagttggcagacttgatcactctatattgtgtgcccccaggtaatggcattagtcatcgatactgtcttttttttttttttttctttgagagagagagtctcagtctgtcgcccaggctggagtgcagtggcgtgatctcagctcattgcagcctctgcctgctgggttcaagtgattctcctgcctcagtctcccaagtagctgggattacaggtacatgccaccacacccagctaatttttggatttttagtagagacggggttttgccatgttggccaggctggtctcgaactcctgacctcgggtgatctgctcacctcggcctcccaaagtgctgggattacaggcgtgatccactgcgcccggccaatactgtctttaaatcgtccagagtaagaaaatgttgatagcttgttgtcacagccctgtcattttacacattccctgaattattgtctggcaccagcaggtgttccagaaacacttttggttctttgagccattactggtcattcctgtcaccactgccaccaccagatgtggttctgagagcattaagtaaaagttttgaaggttgtgtatgttaagactggtgcaaagtccatcctccttccttcgggctgatcagccacaccctggctatcagcacttatttactcattttcaaagtgacagaatggtccagtgggcaggggcataaggggtcacttcctctaaccacccgccagtgcaggaggatcccatctgcgcagtggctgcccatgacaggcagttccctagccccagtcggacatctccgcaccaggcatcctgctcctgctttatggacatctttggctcttaaaaatcctcctttattctgaccgcagatctgccttttggcagtgtttccttagtgacctagttctgctttttgtggcaacacagaacaaaggtcggtaggcatggcacaattccagcttagaagtttgaaggtagtgctcatggacccacatcctttccctctccacccactctatctccctccacaaggtttatgttctccagtgccttcagccattctttctatggcatggcagtcagtattaatcccagtaaaggtaacatgtatccagagagtgcttgccatgggccaggcactgttctaagctccgtacgtgaattgtcttatttatgactcaaaatcaccatatgaggtgagccctgtcatcatcctcattttaccaatgaggcaactaaggaacgagggctcacatcttgtcccgagccatgcagtcaagcagcagagcagagatttggggctaggcagtgtgactccagagcccgtgctcttagttgtggtgcaagactatcttacagcctttcctgcatagtgccaaaaataagcccatggtgcactagacttgggctggccctgctttaacttattttgcaagaaatcattagacaggagccttagttgaaccattttctgtgaaaccttcagagtttgttttgacagaacagactgcagggcagaggcatctgcactgtccccaacaaatgggttcatcctgtagctctgccaggccccacagggttcataaaatggtagctttagatcaaggtgacaaatacagggctcttgatgttttttttttttttcctgaacatggtgcctgagcaataggtttcttgtttaaagtgcttagtcatggttttatggccagaaagtagaaggagagaggtacctaagaattgcaaaactgggtcatctcttcaagtgcctaatccaatattcagtctcagagaacaactccagcagttacgggggtggaaggatgtgatgaccacctaccatccaaaactgggatgtaggtgccaaatacacattctcctgaaatgatccctggtgcctctagccaggctcttccaggagtctagagaaagatggcccatgacttcatccagagtctttgcttcctgtgctctgggatgcctgggcttttctggccacagccatacactgacagggccagaagggctgagatgctgggattgaaccatctttctctttgtgagttgctttccagatagcacgcattccggtcactattttccagagatttaagcagcaaagtgagggaccctcgggcatcgactcagagacctggaggggagcagcttgaagcaatgtaaaaagcactggataaaatctggttctaccaaaaatagggctatgagagttacctcacctccctgaaaggtaatatctttatctgaaaaatggggatgataatactactaacctggaagattgacaggaggattagatgagattctgcatggacataacagtccttggcatgatgtctagcagtgaagaaacataaatatgagaataataacttccttcttcctccgctgtctattccttctcttattctagtcctgtctgctgttgggttttgtctgttgttttgggtaaatagctaacctctctgcctctttttgtctgtagaaatgctactggttctgaatgggtacttcgcgccccctataggacatcgtgggaatgtgtgtgggtgatctggatgtcacagtgacccagacgaggcttttactgggggaagaggggaaggcaggggtgctagatataatgcttggggaacaaaagattgcccaacatctgcatagctgcctaatgctcagtgcattcttgtgggcaaaaccctgcttaaaattatctgggcctagagtctgactccaattaacacataaacacaaataatttttgcatgtttttaatatatactgaattttctgcgaacacagctaccaagtatataagatttacctatttgttatgaataggtgcaagcatttcatatatctttcatgatgttttctggtgtagcggtgccccaatacttacatattgatttacatgttgtcttatttttaactatatttcctttcttctttgtattacagttagggcattatattgattatttttggaattataagtgttgtaaggttatattacttacagatttcaagagagctaaagacatatttaaaatatttttattgcatttttgacaatatgaaagagcaagagagagagagtgtgtgtgcgtgcatgcatgcacatgcttacaaattagctagaaaaatcctaagacagactttaaatgaaaagaaatggtttcatagctcctagaaatgtccttttacataaggatatgtagtagaagtccaaatttttaactgcattcattgtcagagaaatgaggtgttttgatgtttcccctgtcccttttagaaagtatatgatcctaaaagagcctgaaacagtttccattgtcatattttttcatttttgcaatctctatttttttcactcctcccacctgtgcatatatatatttaaaagcgtccccatatagacttttaaagaaagaaaagccagccaggctccccactctttactaagtttgttttgattgttttgtggcctctgcctgcacctcggcctgagtcagactgactctgggagctgtgggcaggtccaagggaaagtcaaggaggtaatgaggcttctcgtgggggcaacttgtaggccaagttgggtgggttgaagtcagtctaccagaagcttcctgcctcaagcctgggcctctacctgtcctgaaacctgagggctctccagttggaccacgagggtctgacatccaggaggatccccaggagagagcaaccgtcactagggaatatgctgcccagcactgactgtactgagcagcagtgttgtgtgcctgttgggttgatgccatggatagccaggcgttcagaactgaacacgacacctaaaaggcaaacacgaactgtgaatgtgccagtgtcagatgctgccttggtggtcatgtgtgggctggcagtaagcttttggtcccttaacactcgctgttggaaatttcccaaggctttcatctagggtagctggtgtgtgatttccctgtcctttgttactcctatctggaaactagttgaaatcttttctatgatattgatatagttacagaaaatctgaatacttactactaagttttatagttctgcttagttcaaagtaacacaacctcataagagaaagtttgaaacaggtagagaaattgaaagatgaaaatcactacccattatctcagcccacaaagatagctactatcagcattttggtttgtttcctttcagtcctttctgtgtttatgaaattttattatataaataattcatgtccaatatagaaaaagatggaaaattgagaaattataacgttaaaacaaaactgacccatctcaccagttggagatgtcttaatattctggtgaatttttttttgtcttttttctatagacacataagaagactgggaaatattgtgtatatacgtttgtaccctttttcaccaatgtatatcaatgtatatcagttcactaatgaatactaattaaatgaaaatttattaaatgtatatctatttatatctattgatatattaacagatgccagtgcatatctattaaaagagtactatgtaagagatgatgttcttaaacataaaatttaatttaggcatgaaattactttgtcaaaagatatatcagtttatattcagatatacagtgtactgacctgcccatttaccacatcttcactaatactggtattatctttaaatagaatctttgctaatatgagcagtgaaagtggcatattatctattaaattttgacggttatgagattgagcatgtttttgtatacttactggtctttgtgtttcatcttttggggtttcctattcatagtctctgcttagttttccactgaggtatttgcctttttattgatttataagagattttgttttgttttaactcagaaaaggtagtattgcttcagttgtcacagagctttggagtcagacagagctgggtttgaaccctggctttcctacttgtgagctgagggatttcaggcaatttatctgacccctctcacaattaattagttcttctttgagaactaaacgaaacaacactgactagcatgaaaaaaaagcctggtgtgtggtttctgccaatagtttttgtgttgttatttttgttgtgattcctgcactgagtattttctcagaaaaatgaccttgagctgtacgactcatgcctgttcagacccacagacacatgatactcactatatccaaagctcagaaaaatgaaactgaaatcactgaagtttgtgggttttttttttaaattcttcttgccagaaggagacaaatgaaggaaaaaaaacaagccgatttcattttcattaagaggaatttgtagagttatttctggggtcaggcaggatacattcagacgaacattttagatctagggctgggaagatcccgagactcgttatagattacatcatcttcctccaagtgcacttgccaggcaaatggacaagtgcattttagaaaggttttcagttgttcacgtttaaacagaaaggatcacctggctaacttttagttaacccattgaacagatgtgccattcccccagcccattggttattcatgtccttgttactggtttttgatatccttgccccgtaggtgggaggagggatgggtatgagcctgccctgccctctttctcctacttgggacagagctgttgcttttatttgctgagtcactgaagcaatagagcatgtgcagagtcccagcctggaggtgggcatatctgggttccagtccctgctctagcccttctcagctgtgtgatcttggacaagttgccatacctctctgagcctcagtgtcatcttctatgtgatgtcgatgcctcccccaaaaggtcgttacgaggaccaaaggagacacgtcagggcaggaaccatcctaggcacgtgtttgatgctcagtaaacgggacgtggtcagtgttcagagttgtgggggtggcaggtgactgctctgtttcacctccactcacagcaacagggcctgtggtgtcacctagacatctcataggcatcccacactgaacatgtcccaaaccagcagctcctccctggatgggtggatggtgtacagggacctcttcctccagctgtcacatggggcatgtacctggcaagtggctttgcagccctagctgcccccttggctgggggcctttgtgcagttcatggactgggagtcacccccatgtctagaccgtcaggaaacccattggcttttcctttagagcataccaagaatcaacttctcagaacatagcaagagttgactttttgtcaccctgccgtggccactcagactgactcctcttacacctcacatcccattgatcagcacagcccctggaaatatgtctagaatccagctgcttctcatcacccccacacctaatacagagggctgagtcatagcatctcttccccggactgttgtagccgtctcctaactcagcttcctgccctgcttttacacacacacacacacacacacacacatggtatcttctcaccactgcagccagacttaaaacctaagagggatcatgtcactccccattttactcagagtcaaggccaagatccttactggggtctgcaggcccccacacctggccctctgactgcacccctaccttccttagctgtctcctctccctagcatgccccaggtcgctggtcccctagcactgggcagctccctgcggccctgttcactagctgtcctctgcctggaacacatctgtcacctctcacctcctcctgtccagcctccttggggcctttctaactgcctccctcctgtggtctgcctcctccccatctctgactttcctcccgagcacttactgccatccagcacccgacataacttacttgtttcgtttgcttgccttcctcaccaggaggtgtgccagatgaggacaaggatttttatatccctacccccatctgcagcactgccatggagaacagtgcctggcacttggatgccctcagtaaatatttgttgagagactaataagtgatcgtgggccagcatgccaacagtgtcttcgttattacaaaattgtcccgaattgaaatttggctactacaagcagtttgtggtggaaatttactcaaattaccaattctttcactgaagaaattacctggcatatgtgggttctcaataaactgtgttggattgcctcaaggctttggggcagtggtagccgtctgaggcctccttgccagtcaaccaaaccctgtgctgggtgggacataagagatgcccccagcatccttagctgatgctactatgtcaccccagaatccctggggcagcccacccctcagcagcagctgtcaccctgctgggttccgcttttcctcctgtgggcttcgtctccctaaggaaatcattgtccttgctttctacatcttatctccctgagcagctccaaaattctgttattcatatcccactgacctttctcattgtcctagtccaagcttctcacaggaggagttgtctctctgttttatattaaaacaaagcggttggactcttaaaactctattcacttttcagattctttggagtcctcaatgcttcctgctatgaaatgctgcgctctggaatgccttccagacccacccccaggatacctgtagccttccctgcagccactctcctcaactccctcctcgttcccaggggtcaatgtcctggatctctccagctttaagttccttcatgtcctcttgccacccctgctctcaccatctctgagttcttgtatccccaggatttcaacctgagtttgcatctcctgacatcacttttcccagccttctcccttttcaaccagcacaaggccatccacttccatggccatagtggacgccactgagcatgctaggtgttttcttctattcaactcatgtggtctgcacaacaacccagtgcggggaatccacccctttcacagatgaggcatctctagctcctggaagtcacctaacttgcctaggacatgcagctagtaagtggcagggctgggattggaacccaagaggccccgccctgaccaccatcctgccctgcctctcctcgggcacccagaatcccctcactctattgtcaaaacccaccttgtcctgcctgtctggtacctaggggagaaccctcagcctcttcttctgctgccacttgcttcctcttctgccaggaaggtcccacgcctggccagcctgctctggagacacgcccactgcctggccttgccaggaggctctgatgctctgcaggcttcctgtcccacggatcccttcctgcctgtcctggggtcccaccaccccactttgtagttggccttgctctttattgtggtgaaaggtgcaggccattccatccaagatcctataatattccttttctctgctgttgaatgttcttcccattccccccacattctcaaagaaggcatgtggctttcttcactgcgtctcggcctgccctgagtccagcccctgctgcctggcccagcctgtcttgttggcatcccctaagccctagccagaaacacaagcacctttcaggtgctccatcctaactccaccctccctcacactggcctctctccctttgccaccagataacagcagtgcattcttttgtttcctttagaacaagatgcagatgttttccagaattttcttcaacttcaggcagtaagttttttggtgaaaggagtattactccctgagtctgtagaaccaggctctctcctcttattctgtagcaattaaagacaaagacaggcaagaaaacaatgaaaagaaacaggagccaggctgatgcaccttcatttagctggtccttgagcatgactcattgatccttcttgcttccatcagggattgcaccctgtgccctctttgaatgcaggggcatgtcaaggccaagggtcaggaagagagctttggcctcgccagcctggtccccagagtggaagtggcagggcaggaggggtgtggcagacagagcacatatcgcccccagccttgcccccagatgttgagtgctgggtgccggagtgcagaggggaacaaggcctggaccctgcctggggagaggcagcacctgggagatctttgtggcttcagatcccatgtggtcctccaggtaaagcagagcatctctggggtctaggctgggggaaaactcttgcaaaaaattcctggttctgggacagaatgcatggggtctgcgtgaggggcagaggacagtgccaggccagtgagcacgcactgggcaaaggaagtggccagagaccactcataagaaaaagtgggacatgaacctcagagcctgggctgctttcagaggagccaagagcctgggaaataagcatcttctggtgaggaaatcagcagggggaggggagggtcatacaggaggggacttttaatcctgaatggccttgcagggcatggttcccctagtgtgccccatggaacccttggctgttagatgtgaggtgataaatggtgtgtggatgcatacacttgggactcagactctgctgcccttagactttcaccctccacagggctgcgtttaaaggtccaagaagccctgcagaagaaaaacctaactattgaaccagcattccctatacgtatttggcccctgattttttcccccgaataacatcattacaatcctatgggattagtgttccatggcagaactttgggaagtgttttttgaagaatttgtaaatccctgcaccctctggactgtgcccatttcttagattgcatggaggctgtgctgtacagtggaaggagtatgggctttagatgggactggcctgtgtttaaatctgctttcccattatacaaaatctctgatcttgatcaagttacttactctctcaaacttagtttccttatctgtaagacaggggatgaaacattagctagttgtcttatgaggctgttgtgatggttaatgggaagataataatgacacttacagagggcttgttatgctccagacaccattctgagcactttatatatctcacttacttttcaccacaactgtgaggcaggtaatgttatccttatcctacaggtcaggtcaggagaccaatgacacatacaggctaaatgttgtgcccaacatcacacggctggtaaatgtgggacctaagatttgaaccctaggcactcatacatgatggggtcaggatttgaaacttgaccgtcatctcccatcagagaacatgctctgaatcagtatgttctaaagggtctagagcagtaaaagcactaattggtatcagttcccttttcagatggttcgtggatatgttagggggattgatggttcctgggactccaagtcattctgcagtcattaaaatcagccctgttgaaagagtaatctcctcgatctgcttgcccactcagatgctcccattgtgaccattttgtttgctctgctgcctcatcctgggccacttcaatttgggtggctgctcagcgttcaggtggagtcgggccactttccacagccatctcatctgtggcctgtgcctccacttccaggaccaagagtccccccaggatgcccagtgagttggtagcttgttctctttctacacctcagtgatggacttgacaaagggttaagaagacatcccttttatcattcagcaaactgagtgcctttactgagctagatgcatgccctgggggaactagcactgtttggtgacttagttagacctctgaatccctctaccaaccctcagtagctgtctgggagactgggattctgtggactctcctctatcaacgatattgggggtcttttccacaaagaccagcctggttttgattgacaaagtgcctcagatttacaaatcttaccccttgcaggatcctctcaactgatcaagccccatagctccaaatgccgtctccttgattgatgtttaatttggggatccacaagcatctagagctaccagttgaatttgggtacccaagggccacaaatgggcccccctcacaccctgacccctgacaaccagcacctttgagactgaagtaccactgcatatagtgctgtcctctgctcagggcattctccctaccagccaggccacccggcaaacccctgcaacacctcataagacctcttcgctggtctcatctccttttattaacacctcctcagcacccctccacacacacccaagcccacaagcaaatcattttttcatctgttttgctcttgtaccttacctatgctccactaatacaaaaaaagcacgccttcctcaagacacttgactgccacctgctggagagttgtcatcatggctcaacaaatatctgccacttctaaacccccaggcacctctggagtagggcagtgcattgcttgtacagctgtaaacatggcctgcctgttgaattggtcatgctgtcatgtacttattaaaacactcgtctttctaactggactgaggacatcttgaacgtaaggactgccgatttctgtcttcgtccccattgtggcttctgctaggggctagagaaatgcttattgaatgatccttgtgcaaacacctgttaccttaggttcagggcatctgctgtcattcagtgaaggtcttctaaatctgtctgttgcaaagcaaggctcgccacaggctgtcagagtaaccatggaggtcggacaggacttgcagtggggacagggccccatcagcctctcacctctgctcagaggcaccaccctctgaacagatcagagcataaacaggtcagagcaattcagcattcattccctctacagacatcagggcaggcaccatgtagtggagagtggggccaggggccatctgccatggctgtttgggctggggaaggagagcagtacttctggagcatgtgctgtgctcagggccagctccctgtaggtaggttgtgggaatgcagaggtggcaactcaagcacccctgctggggattcagagttttgtggagaagtagatcagtaagcacatggataccagatagggttgtcaaggatgttgattcactgttgtccctattttcctaagctcgccacatcatggaaggctgctacccaagtgacattcttgggcttcaccaagtgttttaacagagctccacccagctgtcacactaggggtaacacagtgggccagaaggagaggcaggccttccctggggtcccattttaaaaagggggaagtcctctgttcttttacaacacttgtttaccccaagccattcagcatagtattacttaggtcccatacagagaaccttccaacagatagctctccttgctcaggcctgtcctgatgaactccctgatattcttccaggtcttaaaagagtgagagctgagcatttccctctctgccctggctgccaggaagctcagagataacttgtttgctcagttcctgtagctttcctgacccaggacttctttttcttataaattctccttgttccttttccaggaatgcttgctttttatgttttgtttgtttatgttgcttttgtctctgtattatactttggggggtggtttttggaggcaggattggcagcagccatggtagttagaagcaccagcagtaaagctggacacacctgggtttcatccccacttgctagctgtgtcattttaagtaagataagttgcctcttcagttctcggttcctcaccttgaaaattgggataatgatcataatgaatggataggttattgtgaaaattaaacttgtttattgtaaatgcattgtttcctgttcctgctcttggatcaggcttgatctgtggctgtagaatcctagtcttaatttccttcttcctgcctgtgtctgtcagcatatgatgagttgtacaatagtagtgactaggggaccaaccatcccggtttgtctgggacggaggggtttcctgggatgcaggactttcagtgctgaatgggaaggtcccaggcaaatggatgagtcggtcaccctggtaataaacaacctcaacatctcagtggcttactgtagcaaaggtttatttcttcgttgtgctactgtccatccagggccttggctaaaggaggagcctctatcccaggaaattgacagtcatgggcacagacagaggaacacatgttaaaggtcctttagaaagttgtggctgtcacttctgccctcattcactggttggggccagtcacatggccaggcctgccaccaggctgtgcagaaccttcccactgggtgggacagctcagcctggaacactgatccactctgccaggctcacctttctcttcttttgcattttagggtgctggagcagggaccagggaaaggagagagtcacttggtctgaactgggggtcttggatgtgatcatcttcctgtagatggtcggtatgggtttcttaaggggcagggttcagcttcaccctgctctgctcagaggagcagctgtgtctcctttggacgccttctagtggttgatgccctcacctttctcagctgccaaggcctctctcgacagggcaggctgggctgtgacttctcttccaccctccttgctccttcctgtggagcccctgagatcctttccccatgctcctgggtggaatggagggtgccctctcacattcttccaaggcatcttgcgcaagtccctccatgccctgctttctctggcggtccagcatgcctccatctcacctttgggactctctagcttggaagtgggcacacctgcagcccctgactccaggaccacaggctaggctctccccaaagcatcctcatcacacaccatgtggatggccaggtcagggcggccgtcagagcccaccctcggcaaggataccctctcaaaggcacctctgttggctcaaatcccttttggaagtagcccagaaagaggctttcttttttcttatcttttgttgttttatttattgttcttgcatctaagaacaccttcttggtcagaaaacagttttccagaaataatgttaagtaagtgtcacaactggtttagctccctaacctggtctaagcatataagagaggcttttgaggctgggcgtggtggctcatgcccataatcccaatactttgggaggccgagatggagggattgcttgagtccaggagtctgggcagcatagtgagaccttgtctcttctaaaaataaaaaattagctacgtatggtggcacatgcctgtagtcccagctacttgggaggctgaggtgggaagatcacttgaggccaggagttctaggttgcagtgagctatgatcacaccactgcaccctaacctgggcaacagagtgagaccctgtctcaaaaaaaataaaaaaggctttttgatttttgttttgcagaagtaccaaaatctatattagcatttattatttttatttctataaagtaaatttgagtattgggaaaattgatcaaaatgagaaatttcatatggagtttagtacttgaaatttggatccttcatctaaatttcagggaagtcagggctgggcatggtggctcacacctgtaatctcagcattttgagaggccgagatgggcggattgcttgagcccaggactttgagaccagcctgggcaacaatgcaaagcctcctctctacaaaaaatataaaaacaagccagacatggtagtggtgcatacctgtagtcccagctacatgacaaactgaggcaggaggatagtttgagcccaggagatggagattgcagtgagccgagatcatgccattgcactccagcctgggcgacagagcaagactgtctcaaaaaataattaaataagtaagtaaatttcagggaactcagagaacgagaaaggacatgaaattgttcatttatttagcatttgttgagtaccacctggagtgaggcacgagatcaggcacaggagacgcctataaataaggccctacctgcctgaagcttatgggaggtggaggagacacgcctacaagcagagaatggtcacagggcgtgaaggagcctgggcaggagctgctgcaggagagccagggagagaggatacagctctgaaggcttctccaggaggtgtgcccacgggcacaggaaaggaaagcaggagtttatcaggtgactgggtggttgaaaggagccacacctgcaagaaacgtgggcccagcagaggcagggtggttttgggaactcttgtcttttagtctgtcggggggctttgggtagcagatgggagggttgggctgaagactaagcagtgtttcctgctgggtgggtttgaactttgtttggaagacttagggggaacagtgaagctattgcagtggtctgagcaagggggtatcccgcctctgaccacagtggagaggggatggggctggagacgacagcagactgaacagaggcagtgacaaggatctggagggaagtggctgggcccatcccttagagggctgtgtgggggctgtggggtgtgggaggaagagaggaaggaagcccagggtaggttctgggttgctaatttgggggctgggaggatagcgtgtgacctaaacagagaatcagatttagatggaattacctatattaagcctggggatttcatatctatttgctgctgctttaccagttgaggctcaagaatgagaagcacaaaatttctggtcacattatttgcatgtgcccagactggggttaacagaatcggacagtgagcgttcctgaatcagactgcaatggggaatgaatgccttgggaggctggaagcagttgtattcgcagatattcatttggagatctctatagcgatcgaggcaaagataccccaaagactgcaagaattagccagtggaatttgaaatgccaaaattttttttcagaaaggtcaggaaagccccgtttaaaatctaaattttgccatctcaaggcagtgcagggatggattaggaggatgtggggtgacccttttcttcctttcagagccagtttctgccagacacaggaatcctccacatgagtcatagggtggagaggagacccctcagtcctttcagtaaggtgggagggcagtaccgcccggtggctaccatgaaccctgtttcagaatttctttcttaacttcgtgtgtgcccaggtgcacttgagattcactgatgttttctttagaccgaggagctcgcttcagcagttagtttcaggtgttggctctgctggcattatgcttcggcttaatgttttctgaagacttgttttctgttgtttttcattgttcttgttgtctggcttcaggccactaccttcaacctagcaagagctgagtggtgccttcagcagtgaggtagcttctgaaggccaccactctcttgctgtgtgactttggctagtttctccacctctctgtgcctcagtctcttctgtaaaacggagaacacaggagtatctccctcatagagttactttcaggtttcaatgagttaatctacataaaacaataaggatagagcctgacacaaaatcacactcaacaagttttcacaattatgattacttgacccagtaggagaaataaaaaacacaactaacttccttctaaggacatgcccaagaatccagttttagtaactttgaaggcattgtttttcaccgaaaatatctcctgccagattttttcatgtgtttgcagcttagctttaacaaggagctgaaggacggccaggcagcaaggggtggtgagtgccggtagagtgtgacgagctcgcccagccttcctccctgtaattaggagtcatgaaccatctacaccatctcccttagctaataagagatttttacatttacttacctcaaagtgacctgtctgggttttcttttcttgtggcccccactgtaggtttttggaagaagctgaccgcctgaaaagaaattataaaacatgaaaatcgctttgaggtgaccaagtccagaggcccctaactcctcccaagctggatctggggtgtaagaactgtgacttcaggtaacaaagtagtatcccctccctgccccctgtgaactcatgattcttggtagcttgcatggcagttcttcctttaggaagtgtagtttcttccaggaactctgaaacttggggtattctacctcatgcggttgtttggctggtcaaaaaagggagtgggggattctggaggtacttcatgtctgctgcatggcccaagggggccagggctccataaatcaccaagaccctgagggcagggctctgtactcattcctggccctgcttctgtaaatgttaatgacaaaataacaatgtcacccacccaacagggtctttaatatgattaaataatcatgaaatacttcttgaaggataaatcagagagaatagctaggaaatttccaaaaataaagagcagtaggagagtatttgttctgctagctattaaaatgtattctaaagcacagttgtaaaaacagtatagtactgtgatggaaataactagatcagaggaacagagtagagagtccagaaataggtgataaatcaataaaggtgtatttcaagttagtggcaatgggatgcatggactagcaaatggtgttagaaaaaatctcctatccattagagggaaataagaaattcctaagcttaggtagtatatcaaaataatttccaaatagcattaaattaaaaaaatcattaaaatcttagaaaaaagaatatttatattattttgggtaagaaaagacttaaaacatgtcacttttggtcccacatacaaatatcgtaaacaaagttaaaaagcaaaagggtgggaaaagtgtttacaacatcaatgatgaacaaagaattaatattcttagtatacaaatttattcgttcattcaatatttattgagcacttagtatgtactagaaagtattctgggcactaagggcacaagcagtaaataatgttcctgttctcctggtacttagaccctgatggagaggactgccagtgactatggtagattattgtaggtcacattttgataagggctaaggacaaaacattacgtaggtggctgggctagggaggcttggcagggtttgcattatgtggatattcaagggggcttcactgatggaatgacatgtgaagaaaaagggaaagtcattgaatgtcgagctgatagcacatttgctgtttttggaatgtcgagctcataggatttgctgatggattgaatgcgggttgtgaaagaaaggagtcagggtggcttctaggtttggggcctggcaaccagaaggattgacataggaatgactgagaggcttggcttggagatagagttttggttatggatgtttcagtttaacatctctcttgtatattcaagtgaggacgtcagggaggtggtcggccataaatatctgtaattcagggtgacatctaggctggagatataaatttgggaattgttgcagtgttgatagtatttgaaagaatgacactagctagagcccctggagagtgtgtgtagatacagaagagggcccaggacatccatgggaccctcccttagagttgagggagatggagccagctaaagagagcaaaaaggagtgaccactgaaatggaaggagtcccgtgagaagggggatctcccaagccaagagacagtgagaagggcgaggtcagctctcctctggatgtgctgatgggcaaggagagaactggccattggatctagcagtgaggaggtcactggtcaacccaacaagggctgttttatgggaatgatggggagagaatctgtttggagttggattattgagaataagaggaaaaaaactggagacagagaaatgggacaatagctggaggaggatggtattcaagtaagtttatttttcccaagatgggagttacataactcttgttttcacccaagtggaaatgattcagtagcgtggggagagtggatggtgcaggattgggctggggtgagggttctgaaatggtggtctcgaggaggtgggagaggtagaatccaggcatgagctggggaagggatcctaagtaggagcatctaaggaggtggtaggtgtgcacctgcctcttttctcagttcactaagaagcagagtcctcagcggagaatggagactaaggagacgatggaagtttgaggagagagggcaaagtatgaagtccttcatagcagaatgagaaaataaatggccaggggaatgaaggattgctgggcggcatgcaggcctctaaggggtatgtttctccagccatgtcctgttacacaggtgaacacggggtaggaggccattgtggtagaaaaacaggacatgagcagacacaacgtaagacagagaaacgcctgtaaagagaaaaagcaacatcagtaatagctgaagaatacaagtaaaaacaatgaggttttctttttttctctttagactggcaagagctcttgttggggatagaaattattgtcgcttttctggagcacagtgttacagtatgttccagaatacaacgtgtgtcccgttttgacctgtcagtcccacctttagaaatttattctaagaaataattgctcaaatgcaaggaaatatatgcacaaagatgttcaccccagcagtgcttatcaaagtgaaaaaatggcagtcatctaaacaggaggcagctggttcacttatctgtcggcctaacagtgatagtgggaaacagtagctcacactcaccctcctgttttgcagatgagggaagttgggtccagagaggggtagtgacagctccagtcctactccacggagctcagaccccctggctgtaggcaggcaccctgcccaacctcttcaactgggcttggagtcagagtcccttgcaaggcacttgtcaagcccttttcaagggccggtttgcttaatgcttttaaaatacgagttctcaaaatgttttgcaaatttgtttacaatgtcttcatttcatctcatggctttccttgcaaaggatgctgacagtggggggaaaacaggccgactgcctggccgtgatagaggggaccatattttcctgattcccaagtaagacttacagtggaagaaaggatattttctgctttcttacagtgtttacaaaagtcataacaggatgtgaggactatctggctgcaacatctgtcaccccattggtcgccagagttgattgggctgatctggctggttaggcaggtgtcccattcctccctcaccactccatgtgcgtccctcccaaagctgtatgctcagaaaggatgaccatccccgatagaggaggactggtctttggtcaagggtatatgagtagctgcaatcttctgctagggacccccaaacaagctctcaaaagtcataacaggagtacaaagataataaggaacttgcatttatttgtttccttgatcatatgtttattgattagaagaaaataaaattagcagccagccgtggtggctcacacttgaaatctcagcactttgggaggctgagacgggcagatctcttgaggtccagagttcaagaccagcctggccaacatggtgaaaccccatctctactaaaaatacaaatattagccaggtgtggtggtgtatgcctttagtcccagcttcccagcgttttggatggctgaggcacgagagtcacttgaacctgggaggtggaggtggtagtgagctgagattgcaccactgcactccagcctgggtgacagagtgagactttgtctcaaaacaaataaaaaataaaaataaaataaaattagctttgtgtgtggagaaaagggaggaaaaataattagcattgtcagagaacatctgggttatttggtcccctccgtgggaactgccctgggttttcacttctagagtttctggttctggtttaatttttccacgccacagcacagggaccgagaagctgctcagcttctctaggcttttatgtcttcaccagaaaaatgagcgggtgggcttaaatttcctacaaaaactcttaaaataaatatgatgctctttccattctatcacatgcctgttctgggtccgggggtgtgagagatgcattagtgctgctgtaaaccagccccgggtctccccccccggccccccaccaccaaacccccaagcaccaacctgggttctccaccacttttgagagctcatcgaaataaacacacctttgtgcctcttgtaacaattccagatcatccaatggcagaccagagaatggacatttcttcaaccatcagtgatttcatgtccccgggccccaccgacctgctttccagctctcttggtaccagtggtgtggattgcaaccgcaaacggaaaggcagctccactgactaccagtaaggcctttggggcatgtcttcctcttgttaaacttggtgtcagttctcgggcatggaacatctagcagccagctactgtttcatcctggaaaaggggatgggaataaaaaacccaactctaggtggcgacacagttggtttttggctttaccttcccctagtttgtaagcaagaaggagccttcagcagtgctgaggcatttaacttccacttcctgtccccaaaatgttctacacccagagaaaaagaacagccttaaggccaagttctgtcttttacccctttcttcgtcttctttctttgctcctttgagcaagagggttaagtctatgggtgtcatctcagggggttcaaagagagctttgcctgagggcctctctgaggaagacagcaagtgtcaggtgcttaatgaatgtttatggaaggaatgagtggaggtcctctctgaaaacaatttaggaacattgatgttgtccttaaacattatttaaattagtatgaacttgttatattaaatagtatttttgtttatttttagacttgttgacttttcgtttgagtaagtaaattttcacacttacagtcatcccttctatatatgtacaaacacctagggaataaggcagtgtagaatattcaaaggcacattttgttttgccgaagcacctgcgtggaatcttacccaaatgtccatttaagaggttttcttttgtttaatgagggaaaatctccgaggaggtataccccctacagcagatgtcctttctgctgaagttcacaggtcgaatttggggagcacaatggctggaggtcagatgcccactaggagatgctatgattaatatgtaagttatcccagatgattaagacagccaacacccaggggctggagagtgggtatgagggctgtgagggcgttcttccatagcagtaactccccagcagaaagactgcgagatgttggccacaaaccctttgtcttgagcaagcgctaagggagccactgatgtgttctaaggcctctgtcatctggacctgtgggttccagcctggtcaccacccaagatttcccttgtggactctggtttgctaatcttctgtaattcatggagactcaattaattaagcaaccttaatccctttcactatcattttaatgtaactgaagtcatctgtgactgtcaggcagagctttttctcacctgagattatcacctggcctcaaggaacagatagaattctagacaaaagggagaggggagtttttgtccttccgtgcggcctgcgtgatctctgaactttagaactagctggggaaactctctgcctgtgaggaaccccagggcgtctaattgggaacactgttctagaatgcccatgatatgatccagtgctcctagaaacagctatttttgcccttgggattacattgtttgaagggccatgctctctcctttcctgtgggataaaggaaaaaggagagaggcccagctggcagtccatgccctcctgataaatgtatggattggagaaggcggtgagggggatttggaactccttcctctggggatttcagtctgttttcttctactgaaccacaggatgcaacgaaacttggttttctgaagtctgtgaaagggagggagatccttgctgtgaccccaggacttctgtggccctcagccccactacgcccctccatcccaattcctaaaatctaggggttcccacctacctgagaagcagaatatttggcagtagtgcctttgaaaagctgcctggggctctgctcagtactttgttggtactttaattccaccctcctcacttcgtcccttccctgccaaatagatatgtatgcacatttatctttgatgctcaatatgttttgcaaacagaataagcttcatttatccagaatgatggggggggagaatgagaggttatatagatatttcaatcctatggttaactaagcatttttataaacactacatattcccaattttcaaacaatcagaatatggtaaaatatatgttaacacacaaactcttttgagatgataacttttgtttgataacctgagaagctggtccaggttttatagtaagttcaagttaattttcatttgttttacccttattatacatcattaattgatactgtggctgttcgaactttatgattgtttggtttctggataaatgagagccttctgtcttatgataagaagctcttctgtatgtctttattaacatgcagtcacattctcttttgttttttcagagaaagcatggacacagacaaagatgaccctcatggaaggtaccatgaacctagtaatttgaacttcagcatccttatagccattttctttgcactgttacacattctgttacttggggcagcacccatgtcctcaactggagatgagcaaggaggccgtgagcctgtgggcgctcactgtgtccctccaacccccagtccccttgtgtgtctgcagagagatgacaggatcaggcagaagaaaacagcaatgtgtaactttgccattcatctccagagaattatgtttttatcttttgctttttcctccccccaggttagaatatacagaacaccaaggaaggataaaaaatgcaaggtaagcttggaccttattttgtctacaaagcatcctagttctggttgcttagagagcagctgaggaggctctgcatgtttggtcctgtctaagagttctgttgggcactgtcacctccttagggaataggcaggtagtgggccttggccgaggtggccttctgccctccatgctctccatactggctggcctttactctttgctgtctaagcacctttaacctgaagtggatttgaaggtagcagaaatcaatcaaggctcaagtttttccccagtcttcagcagagaacgtcttcctgactggagcgccctccgcaggagacatggctcagtgatttggttcctgggctgggacttgcctctgtcaggggcccctattgcactgcgagttgcaactgaatgcaccacatggggcatgctcggtgtctcgagtagattctctgcctgggtctgtcctgcctccagccacacttgctgacctcttcccattgcgtcctcagttcttctgccgttagtaccaggctgtgttctgaggctgcgtcatgacagactgatacagggggctgcagaaattggctgccctaaggcttcaagctcttccctcggaggccagccttagcaggagctcccatggctctgtatctgcggcagctgcagcaaactacatttccatcgttgctgcacctccttaggaggaccatcaccaatggcaggtgcacatcagtcagtgtcaccctgcctcagcgggaggagtgtgacattcctcagaggaggctcctggggacagatgtagcatctgctgcacctaggtggggacctagttttgatccaaggatgacggcgttggttactgggtgccctagtcagtgaggctgtgactggaaagaattggtgccctgcccaggtcacatggccacacagcgggctcctcacagacctcagggacagcccacggggctctggatgctctgtgctatgaagccaccacctcccttctctttcctttcacccccatttcaaaatccaatttgacaaaggctgagaggaaaagaaacgaggagaaatgaacaattcagtttactctgaagagacaatttttgtagcttttctcctgaattctaaagatgaggtaaacataaaaaaattaatactgacctggcagtgagaccattttcttggagactttagttgaaaagtctaattttaaacattctgcaaattctaaatttgccttgtcagatgaacattgaaaacagttacaactcatttatttttgtcatcttttcttgatgcttggttacattttataagaaatcgtttttcatattgttgttcagggaagctcacagtcagattgaaaagcggcgtcgggataaaatgaacagttttatagatgaattggcttctttggtaccaacatgcaacgcaatgtccaggaaattagataaacttactgtgctaaggatggctgttcagcacatgaaaacattaagaggtgagaccctgggctctattgtcctttatgtccttgcccacaaatgttaccacccttgcctagaatgttcctatccctaaggcagatgtttattacttgcaattatgtagccttcagtagtatgcctttactcttcagcaacagccgtgatgccaaatgaagtgattattgagcttatgtgggttttgacatgcaattttgcagtcacacattctcagagcatagaaactgtgctttgcacgtctctgtatatgcatgtaatcaggctatgtgcctatcagagatgatactgctctgatgtctcacatcttgcctatgtttgtgcctggatcccatccttacaattataacacgcagaaatgtaggtgcacacagtgacacagaaaagtcagttcaaagatgaaaattcatcatggttcctttgaaaagtgagtcatgggttgtgggttctcgcgacattttgttgtcaggaatgaacactgaagatattttcatcttcctggaattttcccgaaccagatccactctttgtgagggaggcagtattttccttcttttctgagtgtggggagggtgagaaaacataggcagaaaagtggaagtgacttatccaaaccacaagagaaatctgaaatatatcaggcattttagtgaatgctgttcctggaattttccatagctagtcttggacttttggaggaaattggaaagtgggcgctcagtcagatctctgacctgcgtggtagaagaattgcgtctttttatatttgcacaaggccaccagaaataagaagtagctggttttgtctgactttagatcattacccaaaaatataaatgttgtatcctgtgctggaagaatggcatttaaaaattcatattagcaaagataacatgggttaaattattataaactaatttctattaaattggaaaaaagtggcaaatctcaagttacagtaaagagcagggatagggatcaataggatggttgcaacacgtcctgtctccttccctccccatggtactttgaattgttacagatccatttccttttattccttcactattctactcgctattctacagactccaaatcatttactgctggcatttttctctgttaagtgattgttctcctgaaaaatgccagattgacagccttttaaacctaagtcttgtcccctttcagtcctgggagtgcgagctgcattgactgaagcaatgcattcctccacattgccacgctcgtttaactcacccctgatgaagagtaactcacattaaatgccttccacaatatatttactcagggcctggaagactgaatggtttcccaagaacatttagagtggtgatttgaaggactaccagacaacccatttaatacagatcttaggaggagggaactctctgaggagcctctaccagtttacttccagagctgccttctttcttagaagcagattgttaaacttccttctattatctcttggttttccctgtaatgagaaaaacaggcttgttaggtctcctgtgggtaacagtgttctctcttccatggaattctctttggcttacaggattctgtccaaagccagatctaggctcatctcagttaaggcctaaacaataaaatttaaataccaggtcatagagactaggccacttacagaaggtttgaggcagcaagttagaatgagacattttctgaatatcaagtataccaattctttctctttttgcccctaaggtgccaccaatccatacacagaagcaaactacaaaccaacttttctatcagacgatgaattgaaacacctcattctcagggtatgttcaattatgggattgttttacaacgtttgtttttataaattttcaagtaagtaccagcatgtgggaatttgatgtttcaacactgagcttttttttttaggcctgcttcctctctcaggtccctccctttatcttattgtttggacaggcttcacatttcttccacaaaaccattctcctcctcttttaacctcgtctagacaaaaatggaaggtctatgccaccgcaatttaaaatcagaagagtcaggatttgttaaaaataagggggatttgagaatcacatttctgcatgaagattttaggaagggactgaaaccaacaacaattgagaatttctcttcacctgatttaaccactagcacaaaaaagtccacctaaatctttacaccaaaatctcatcaaaataacaaaactgtggctcacgcctataatcccagcactttgagaggccaagacgggcagatcacctgaggtcgagtttgagaccagcatggccaacatgttgaaaccctgtctctattaaatatataaaaattagctgggtgtggtggcagatgccttcttgggaggctgagacatgagaattgcttgaacctgggaggtggaggttgcagtaagctgagatcactccactgcactccagcttgggcaacagagtgagactctgtctcaaaaaacaaacaaacttacaaagactagtggtccaaaaaagaaaaataaatgcaagagatatatgctttcacctgcttgacttgagtgctctctctgtcttgctaaatctctgctgggagatggttgaggtggcactatgggaacctgttgtcttccatgaagaattaggtcggcacaaagctctaagttgtgttactaggtaaagtgagattaacttgggaattgaagggaaagaaactggattcagaaacgtgttcttgtagattgtaaacagatgaatagaaaaacgtaactaaaaggaaggatacccgcttccacctcccacaaagtcagggctgaccttacctgcacagccaacagaatcttcctacccatctttgagcagaagtttgcaaagctctagagtagagggtagtccatctggaattttgcatcatcactatccattttcagctctctataagcctggcctgtctgctcactccagcattctctatttatctcctcatgacgtgctatctcaaattggaaagcattcacctgcaaggaccagaagacctgatgaataaatagagtttaatttctcaagtataactggtctggagtaggttatgttgggttgctgcagtggttcaatgaggtcaataggaaccaggttctttgtctttgcactcagccacaccaagctagcatgctagcttgtttccttaatgtagccaggtacctttgccaggtctaagtagccagacccactgtaaaaacaggggtaaatgaagctctagtctggctgtcctttttatcaagaaaggatacaccttcctgaaaactcaacagtggacttcagcttattcaaaagtgtgtcacttggtcacgcctagctgcagggcagggtgcagaaacaagtgtttatagattttccagcctccctggtggagacaggcaagagagaaggggcctgggaatggtgttgggaattggcttccccaacagtgtttgccacacacactttccagagccacatgcatttgctcgattccttccagaagtgactcccacaacccaatatagtgcttcaactgtggtctgattggcctgaggttgaatgggactagtgccttccttgccaaaaaagccatctgattagtactgtatcatttggggcagctgcagtactgcctcctcccccttctctcctgaatatgaattattgttaggtcaggttttttacatcttgtataggtgcttttttgaacttaagataggacttctctttcatttctgtcaaaacctgtttgttgaatggccccacagtccagcttgtcattagtgacccttggaatctttgtgtgacttgtagatccaatacatgcctctgtgcctttcatccttgtttattcataaattcaacaaacatttttgtttacttactagatgcatggcattgttctaggaacatccaaatcaatgataaacactttagggtgggaccaggctcccgatcaagtgagtgatagtcttttggctaccactctcaggacacagttattcaaacacccaactttgcccacctctccatccttttcgtaaagatgtccgtgttctcagagaggatttgctgaggttaaaatatgaccgatgcctgtagcatctcgagagctgccgtcggtgccagcttcatgggcatgtgacctctgcagtttcacaaggccccatgcttggtttaatgccctgtcaccatcttgaaaacgtaatttttgaacaaggatccctgcattttcattttgtactgggccccacaaattatgtaactggtcctgattcccatactggtaacagatctgcagctgtagatgtgataggcctgcctctatgcctttcattcttgcgtattcatgaattcaacaaacccttttgtgtacttactagaggcttggcattgttctaggaacatccaaatcaatgacattttgggctggggtacaggcttgattattttaagaaaaagaatctatgtctttatttcatatatatatatatatatatatatatatatatatatatatgtaaaataattatcaagcagagtcctgtggatggacaaatttaaaaataaataaaacaagctccttttgcagtggcacgtgcttaatcgttttcttgttgctgcttttcttaataattttctatcagatacccatacttaccagggtatggaacaaggattatcatgctatctcagctaaatacttcatgttgggcttgtctcttctactcccttgtttatgcagcactcaagagtgatctctcttgcccgatgaaggttttgtcacctctctagcacgtgtcagtggctgtgaaatactgtccagtcccttatcacttccagggtcccagttccagggacttgcttccacagaaagccaggtctactcagatgatgttcagacagtttggccgcaggagctggacttctgcttttcctcagcaatgcaaaatggacaaactgctttctttactaagtgctttcaaaatatctttaataaagtgtatgtcagggatcagtcaactgtatcagtttacaatgtctacgttagtctacttccccatgttttgaaaactaggcagaccgtaccaaggcctctgtgtcttttattaaccagcaccatcttcccaagagtgaccctgccactggctggcccctgtggctctgtggtgctggtagtgttctcacagcttctgctccttagctgtccttcgggcccggctccttcacagatggtctgctggccagggtgctatggagttggaatgtccagagcctcccctcgctgatgcattcactgctttggaacctgctggctttcctctggagtactgaaatagctttacctgtgttgtcggttcaggcctgaccctgcccagcattacctccagggtgtcacagttcccttctgtccaggtacctttcaagccacattgccacatcaatgaaaagcctcaaaaacacttccatgagatacaagattatctgcaaggcaaacgaggaagtttttaataccctatttgttgacagaatgaggcttccagcagatggtgcttggaaagttacttccccctcactgtcatcccttgcccctgggccagcttagggacctaacttaggaaaggatcctccccagcttccttctggctgagtagcctgccagggtcttaagcaacagtgattctgttcccctctcactcatttcttctgtcccagcacaagtacatgcaccattcttttaccttctggcacattaattcatttcctagttctttgaattaaaccacatcatgaaggcccttttgtggaaaaagagaacagtttctctgtatttttccaaagagcagattaaggaccagtgaataaggtgagaaactagtccactgtgtattagaacgagggagggctgagtcataagagcaagggcatgacagagtggggcacaccctccttgtcaccggaagaccccagcaggagttgagtggttgtatgtctggaaggcagtgggtgggattcacacagcccaagctctcaggcactatagcttgggtatttacctgcttcagtctctttaccaaatgttgtcctatcttaatggctggctttattggaacatttagattttttcctgtatttaaactgaagaaggggtaagaagaatctaagcggggagttttgcttttctgaatgcaaatagtccggccctggatggagggataacatttgagagtagtagttctcagccctatgtacattagaatcacattaacgtggaagtgggatgggtttaaaaataccccagtgatcagccccatgccagaccatcagcataaaaacaaaaacaaaaaacactgctccgaatgttgagaaccactgttttagagagctccctgtacgtggaggttttcaagttgaaggcagatgatggctgagatgttggagaggggattcttgaagagtccttccaaatctcagattctctgactctccatagagttgttattattagagcaatgaaatatgattctctggaccatgataccttcaaaagaacacgtgcaagctgaattctgctttgaaatataacttactttaattggactttcttcctataataattagatgatatgcagaaacacacacacacacacacacacacacacacacacacacaatcttacagttcttcagagacgtttgttttcagcatcctgcactcaggatatcactgaaactgttagtgttcctgtgctttggatgcttagaaagcacatcctctatttgttatcagggtgattacaaattatgtttcctacagtatgagaaattgattatccatttctcctgattaggcagcagatggatttttgtttgtcgtaggatgtgaccgagggaagatactctttgtctcagagtctgtcttcaagatcctcaactacagccaggtattgttcatgctcctgttgatggtgggcagcctcacagcagtcagaagtgtcactcaattttgtcagaataattatagtatacaagtcacatgtgaacttcttccagaaaattcttaacttcttaacagataaattaatttagacttagaacaatcttgtaatatgttccgtattccccccattgaaagatctgactctgatctgatcgatagcattatggctttcttctattgctgcaaaataaatatcccacaatatgtggcaaggacagagggtaagaggctatctgacaagggagaaaggtaggcaggttaacacaataccagagaatacgtcacttggaaatccactccatactgtgtttgcagtgctgtgtcacttcttagctctattgaacctcagtttactctaaaaattaatgataacttataggatcaaataagagtaacatttataaacgcttctagaacagaacttttcacctattatgtcccccagagtttttattcatttattcattcactcacacactggtatttgcatggaagcttggtaggcagaagacttgaagaatcaaaatgacatttatgtaaattagaattaatgtaaatttaatttttccaaagatttctgctctttttagtctcagagcaaagttatggaggaagttgctgttatctctgttaatagacaaggtgactgaagcatatgatatgcgtgacttgcttgagaacagagaggctgaacagcagagctggaatcagagcccacccctatcttctgccttctgaggtcttacaggggaattccaagattgttgccttagaagagcataaactgtttatataattgagggttttcccgtcatgttatcaaaaccaacctccagatgcctccttcctggtgtcaggcaaagtggttggacatatgtacaggttcacataggaaaagtttgaggtctcatgcacaaaaacacaaaggcaacatgcagactgtgcatgcttacttgttgcataattgattttctgcatgcaattgacttgtcatgtttaacatttcatctccccagaatgatctgattggtcagagtttgtttgactacctgcatcctaaagatattgccaaagtcaaggagcagctctcctcctctgacaccgcaccccgggagcggctcatagatgcaaaaagtgagtaccagagaggcctcgcatttcctcagcagcccactcacaggcagccaaccctgagtgagcagagggcgggtgtgtgtgatgggctcagcctttccagtcctacttctctgtcctctttctggggcaccagagctatctttggctaaatggaattatttatgttctttggtcttttacataaaaagaagaaaaaaatctcaatgtccaaatttattgaaaagaagagctatttagactggattctttctgatttttagacttttcttttttctttcagaatctagaaaatcccagttgtatgctcctgagtttaaagggctaagtttgatttgttctcccagaacaaatgggctctatttacctgaattgcacacaggcagcctcataaaagtaagaaaacgtcaactataaatatggtgtttcttcaaccaaagtgttcctccttaggttggctcccccacctggctttcttcttttgcagtagtggaaccaccatccacatcgctccctctgcccccagcttcctgctactgcacacacttctgtgcaaggccccagtagctgtcatctactttagtcctgtgggaggctgtacactcctacagttaagaatgagagaatgaggactctggctgggcgcagtggctcacatctgtaatcccagcacttcgggaggctgaggcaggtggatctcttgaggtcaggggtttgcaaccaacctggccaacatggcaaaaccccgtctctactaataatacaaaaattagacaggtgtggtggtgcgtgcctgtaatccaagctacttgggaggctgaggcaggagagtttcttgaatccaggaggtgggggttgcagtaagctgagattgtaccactgactgcactccagcctgggtaacagagcaagactctgtctcagaaaaaaaaaaaaaaaaaaaaagaatgagaacacaagggagattactgggctcattccggctccaccattcactagctgtgtgaccttgagcaagttacttaacctctctctgtctcagttttctcatttatggaagagtacctatttctttgggttgttgtgaggattgaaagtgttaatgtatataaagcaggcagaacagttcctagcacatagtaagaacagtatcagtgtggcctaatgtcttgctcccaagctgtccacgttaatccctggaaaaaaataccaccagataatctccttcaagtcatctctttcattacagcacaccgcttgttcctaaaagtaaaatgcagactttggtatctgttgttctttatagtctagccttggcttttttaagtgaccttaggagaaaaatatgaatggcatttgggccttgcctttgaggctcttagcatatagtcagagaaatgagacagacagcaccctgcatagtaataggtacagccatagaaatagtgccaggcatagagaacggatgattaattctcatgtgggcgcaaggacaggcatcactgagtagatgacaaccgaggtgggtttgaaaagatgaattaatgtttgccaggtaatgaagggaggaacaaagaggaaacaatctgtgcacaggtgcaggggtgtggagccacatggcttgcttggtgctattggacaaaacgtgcacggaggggaagggctgaaccatgaagaccatttgttctgtggggacacagtgaagagctctgagttgggtggggcaggctcggattggcattctaggggagatcgcagagctggcaatgtgggaggtagatgggatgggaggaagcccagaaggagccctgggcagtggccattcctcggcacacttgctcgtgtgatggccatgggtgtgttttccctcggcttctgtactgacacctagccagtgtttggtaaggaggtgtgctcctcagaatcacctgggagcttttcaacatagtcatgctccacccccagagattctaatttggtttttccagacagcacagtccaataaaaacataatgcaaaccacaaacatgagccacatatataatttcatattttctggtagccagactttaaaaaataaaaataaatgtaaaattaactccaaaatatttcagcatgtaataattataaacaactaataagttcgttcacattcttttatttttctatactgtctttgaaatcctgtgtgtatttaacacttacagcacatttcaattcagaaaagccacatttcaagtgctcagtacctgcatgcagctagtggctaatgcattggacagcacagatctagaatggggtccaggaatctgtaggttgatcatgcatccagggtattctggcctacaagccaggttgagaacttaaggcagtccggctcccaccttgccttcccaatatccatatcctacccatccttcagtgccagcccaagttccttctcctctgggaagcacaggttgtctttgccatttatttggcactaatcatacatcaccctgtcctattattaatcttttcttggtgcacctccatttgccctttgttagccataagcgtctattgggcaagaaccccatactatatttcttttcatccccagagtacctaatccatttatttagtagcacactctgtgatttataaacatttccagactgacaacacacctgtccatgctgcatctgttaaagcctaaacttgggagatatttatctcatgtcatcattataaaacagtgaggcaggcaagaaaaggctttgctcaaggtcacactccccctcctgacagacaacactgctctcagtttatcacattttgtgtattgatttgcagctggacttccagttaaaacagatataacccctgggccatctcgattatgttctggagcacgacgttctttcttctgtaggatgaagtgtaacaggccttcagtaaaggttgaagacaaggacttcccctctacctgctcaaagaaaaaaggtaacaatttaacagtccattaaaaccctgtgacaggtgaagcatgctttctgcagcggagctctcagctgggcgttggttccatggtttctggctggccagagtggcaggtcccaggactgcagacaggaccctgcagtcctccctatgtgtagggcagttgggagcagaggagagagctgaaaagcctgatggcagagatttgtggagaggcctcctctgtttaaattgtgtttcttttaacatgattgaggaagaatactctcagccacaatcctaactgccttatgaacagccaccagtccaccaaaattactctgagctcaccagtgaccttgatgttgttaaatgcgatgaacatttttcctttgtcttccttcttgaagtgttctcttctcctggattccatgaaaccacattcttcttcctcctccccgaccccctgctgctacaggctctcttgctggcccctttgctggctgcccctctctgtcctgggctgcatctctgtctgcagtctctctctgttggtcatgtcatctactccctcagctttaaatgccaacaacttccacattcatatttccagcctagacttgtcttttgaactccagattcataaatatactgcttactaaatcaacctgctttggatatctcaggggagtctccaacaggatacgtgccgaagtaatcacctgagcctctcctccagcataaatggcactgccattcagctggctgctcatgctagaagccggggaggtgccctcacttctgcttcaccaccccactcttcaatcccgttagttatgaagtcctgccacaatgagtcccatctgcaaaagttctctgaaatgtttgtccctttccatgctgcctactttcactcagctccaggctgcccccaactctcaccaggtctcataaagtgtagacccacatgctccccacccccaacacagcagccaggatgatctttttatcagtccccttttaaaaacccttcagtgttccctattgttcttgaagaaaagctcaaaatatttaacgtgaccatgcagcccccgaccctgccactaagcacatgtgagccatgttgacttcctttgatgcctcaagccccttctgggcaatgcttctgcacatgctgtcgcttcctggttggaatttcttccctctccccatgaactcccttcacatggctctctccaacctcagactgccttatgtcttatagcaccctactggtttgctttctagtgctttcttatacttgctgttatatagttatttgtgcgattatttgtttaaagtctgtctcccccactaggctgtaaactccacaagggcatgtctgatttgtttttcactctattccagtaaccagcacagactccacgcttggcagacactccatagtggtttgcttgttggtgaagtctataggtgctccacatttaatgtgtcccaaatcgaactatcttttttctctctctctcttctagtctgttttctttcttctctgagtcagtgaatgacaccagcaaccacccaatccagaaaagttagagtcatcttcatttgtttctttcccttaagcctgatattcacagcaaatcccaacagtttgatctcagaaatttctcctgctttctttctctgctccctctcatcttcactgcactgccatagttcagtcctcctaatctcttgctgtattatagccactggcccctgaatcagccttcctacttctgttttctactgtcttccagttcatacgtcactctgctcctacagcatccaaaccacaatttgattttgctgtttctgcacttaaatacctgtagatgctctccatttcctgccttaaaaagacagaccaacattggttagaaagtaatccaaggcccttttaatcttcctccaacctgcctttccaatttgcccctcactcccagtacctccaatttcacttcaaccacacagagctcttggccagttcctatataggctgtgcctctgtgcctgtgtacgtcatcagcctttatacattctagtccctcagccactgctcatccttcttgatccacctcctctactggttttttgggggagccttcctctccctaggaagagttagatattccttccttggtgtatgtaatgaatgtccatggtataactggccctacttaagcattctgacactggatgacagtttgtttctctttccgtctgcccctttcattagatgcttacttctggagagtgaagccttgatttttttttattttttgactccctacctacatcccatcccaccatcggccgtgtacacctccatggcccaaacctagtgctgacactaaccacgaactttgctttctagcagatcgaaaaagcttctgcacaatccacagcacaggctatttgaaaagctggccacccacaaagatggggctggatgaagacaacgaaccagacaatgaggggtgtaacctcagctgcctcgtcgcaattggacgactgcattctcatgtagttccacaaccagtgaacggggaaatcagggtgaaatctatggaatatgtttctcggcacgcgatagatggaaagtttgtttttgtagaccagaggtaagagtctacatactacccttgagcaatgatggtagaggattttcaaccctgatctaaaaagcagagaagactgggccatcagctggcttttctaagaatgaagaaagaaagaaaaagctgggtgcagtggctcacacctcaaatcccagcactttttgaggccaaggtgggtggatcacttgagcccaggagtttgagactagcctgggcaacgtggcaaaaccctgtctcaactaaaaatacaaaaattagccaggcatggtgacacatacctgtagtcccatctactctggaggctgaagcaggaggatcagctgagcctcgggaggtcaaggctgcagtgagctgtgattgcaccactgcacttccgcctgggcaacagagtgagaccctgtttcaaaaaaaaagagacaaatgatgagagtctctgttaaaaaatgagattcaataggatatcatcataaatacagagatttttctgtcattctttggcatatagagacaattaagtggggtgccttgatgtccatggctaaaagaaaaacagtagggatagcatgctgtctgaatctatggaatgttccagaaccattattgtgattgaaattcttttgaatctaggacttggaagcaattatttagtcctgagctgtccaataaaatactcgttggccatggtagcctcccatgtggctaacggcacagacatagaacatttccatcatcacagaaagtcttgttggacagcgttgatctaatccaacctccttattttatggatgaagaacagaggccagcctggggactggtctcctgtaggattcacaattaattggtaatagacctggaccaaggacccaggtgtcccaaatttactgctgcctactgctttccctcagaatatgcacaggctaataatttttctggctactagagacagccacaacatgctggaaaaagagacagcctcagctgtcttgtggcctcagctgctgcagcttctggcatttggttgtcctgataaaaaggaggcagcaaaaactagaagccttgcactgaggtttagatttataccacattttaatctaattaatgtggttccttttttaaagacagatctcagtctgtcacccaggctagatctagtgcagtggcgagatcttggcttactgtagccttgacctcccgggctcaagcagtcctcccacctcagcctcccaggtagctgtgaccataggcatgtgccaccatacccagctcattgttctgtgtttttggtaaagacagggtttcaccatgttgcccaagctaatcttgaattcctgagctcagacaatctgcccaactcggcctcccaaagtgctgggatgacaggcatgaaccaccatgcccgactggttgcaatttttaaagccccctcagatttgatttcttgtgataatagtccctttacaaaggctttgctctgtttccctctatttttatagccttgattaaattcagatgcctgaaaaaaagagagaaagatccacacagtgagccctctgaaaatccatccagctcttttgcctgcagctttgaccttgctctcataggctgtagcagggtttatccattgcaaagttgcaattaatcatctgaatggctttttcttctttaaatattcctttattcccttttagggcaacagctattttggcatatttaccacaagaacttctaggcacatcgtgttatgaatattttcaccaagatgacataggacatcttgcagaatgtcataggcaaggtaagctaggatgtatgaaagatcttaagttgaaagtgtccccttgcttctagactagtcaacatgaccttccagggaaatctgtccactgaggatgtagagtcagccagcctaggactcttcaggtcagaacatctgtgtgaagaggaagctgatacctgcaggcactgtttatcccccttgtagttgccctgtgctgactgcatggcagtttctgaaagacatctcttgttcagagggttttcccagaccctgtaaagatttagtatggcccagactgatctgattctcttttccattcaagcctgcactacctcctgtgttttctgtcttgactaatgctgtggcttcatgtgcaggctcctgagagagaccaacattgaccccttctttcactgtgtctccaccagatcctgttcattcacctcagacatgcatttccaaaagtctactttttaccacctctgccatcaccctggttcaggccctcgtgcctacttagagacctgtgatagacttctcagggtttctctgatccctctcacccccagttcatcttccatagttatcctatttatccccagatagattgagcctggtaacatcagcctgcttaaaaacctcctgctttagactcaagcccaaatgcttttgacaggcaatcaaatgtgagaccttccaccttctggccccagcccacctcctcagtttcagtccccatccctgcctgcagaggcctgtgctccaggcacactgacctcactggcctctccccaaccagaccctgctgctcctcaggcactgctgggttcttccctccctccttctcttggcaaactcgtgttcatccctcaaggctctgatctcttctccctgtatagccttccctcactactcttcttgagggcaggagtcatagcctgtctcctcttgtatctccagtgcctggcacatgagaagggctcattacatgttacatgaaagaatgaggttgaataggtgagtagcctctgttgatttggatgttcttagaaatgagataagttctatattgcccttgggctttgtgattgagataaagcatgacattttggacagtgccttctcatttgctggtggtcatgttagagctgattccagttagatgtataacatgcagtcagtaattccctagagcctcaattttacagactatggaaaatcatgacagcttcacaaatgaattgaaaggctctgagttagaccctcagaaacaacctatttcctgagtgttgaccactgcagtttccttggcttactaaagagcgatgtcgttggagctcaagtacctttaatattttgtattggatgtcctgtttaatactttggtctgagaaaacaacaatgtccatgttttctttacattttcagttttacagacgagagaaaaaattacaactaattgctataaatttaaaatcaaagatggttcttttatcacactacggagtcgatggttcagtttcatgaacccttggaccaaggaagtagaatatattgtctcaactaacactgttgttttgtaagtacttttcctatatctgaagctccccttgcttcaaacagatgcctagggttcctcatctgggaaatggggtgcaggcaacatccagtatcacatcctttaatgccatcttgctaatacctgtgaagcctcaggactggcagaagctagaaaggattgttaacaaagggacaagcttcaggacttgtaccatgcaggccctggcttatgaaactgctccaggaaatagcaacatttccttccagataaagcagctaacctttgaattccacaggccctgcaccctaggcatccacttgtgctgctgtggaggaaggggttggcaatctatgaaaggctcattcaggcactagctcacactggccttggctgaggatggggaggtctccatacctgtcaggcagggggcccaagcactggcagctggaatgccatctcaaaaggctgctacctgctagatgagcagagggaggtgaaggagcctctctttggccaggcctgctccccacttttccttccccatagtgtccaaaaccccacctatggtaagagctgtgtgaggggccggggctaggtgcactgcaggctggcaggaggaggtgctgtaatgatggcagtaggttactgcagccaccacctctgctgaactgtgtcccacacatattaggaaggcctaggcaggcagtggggccaaaggccaggatgctatccattatattatcaaacagtgagacctgtttacccactcagacagacacttcattttctggcctgtccaggtccagagtggacaccggacaccttggccaagttgaatggtgcacagttctgagcaggcctgactcacgtttccttattgctgggatgttcacagagccaacgtcctggaaggcggggacccaaccttcccacagctcacagcatccccccacagcatggacagcatgctgccctctggagaaggtaactatgtgctgctggggccctggggcttgcccgtgggaaggtgcttgtggtcaaatatcctcccctaaagtattcagggtcccctccattcatattctgtggaacaagggaggcctcgaggggatgatgtgcggatttccccatgaatgcagaggacactgtcatgtcactttctctgttgagccggaatactaggagctcactgctgcacttcccaaagctgctggcccctggaagcccttgagctcgcaaactccctactccccttgtgctttcctcctgtgttggctagtggccatgatgtgaagtgctctttcgtgactgtcactaactcctgtggttggcaggcaggtgtctttcggcaccagggtgtgtaccatacccactgggctcccttctcaggctcagccttggccctgcccctgctgtccacgctggactcatccttcctgggaccatccccacatgcatggctgcagcccccatcgatgactcccacatccacatctcctggcccagtctctctcccgagctccagatctgtctctccaaatgcctcatagacagaaccacctggagtctcagaggcacctgaaattcagaatatcccaagctgattttctgcactcccctacctgattggttgtttaagccagaaacctggctgttgtctctcccccattatatctaaacacggagtcctgaaccttctatctcttaaacttcgtcaccactattgctatttcaccctcctcatctgctgcctggattattgcaaatcacttcgcaactctagtccccctctccccaccccatcctccattgtagttcattctccctgccgtggactttctaataacccagttctcatttgtgccttttctgtgtatcgtcctttggtactcctcattcccttgtggaaactgtccaaattcgttagtacggcatccaagaggcccctcatgatcggattggtacctgctgccccagtttcatctatcatgctctcatcatcatttatgatgaattccttggaggagtctcccaagttttaacctgcctcagtgctcctgcacgtgttggttgctgtgcctggaatgctttctcctccttacctctctgccaagctaattcatattcatctctcaagactcagctcggggttaacttgctccagaagctgcacctggccccagatgagttggttgcctcgtgcttgcctgtcaaacttacaacattttgctttagccattgttcatcttgttggttttcctgttaaactgtgagctccttgagggcagggacttgtctctgtaaccctggcacatacagtggtcttcaataaacgttttttttcagtgcatgaagggaaagaattagatgctgtatgaagggaaaaaactggcctcagatcctagaaggaaacttgagcctttccctgctggaatgccttttcctgacaagctgtagccctaaagtccctcaaggcacaactctgatgttgaactgcaaatggatcatgggataaactggttttactttaatacataatagtatttcttcctcagttttcccctttcctactctcagattcctttgttgtaggtggcccaaagaggacccaccccactgttccagggattccagggggaacccgggctggggcaggaaaaataggccgaatgattgctgaggaaatcatggaaatccacaggcaagtaacaccttctagttcctctgttaaaccagtggttctcaacccagggaaattttttcccccaggcaatattttgcaatgtcaggagacatttttggtcttcacaactgggtgggaggttgctacttaaacatcctgtggatagagaccagggatgctgcttgttaaacatcctacagtaaacaggacagttccctcctccccacccaacaaagaattatccaatccaaaatgttagtagtgcctagattaagaaatcctgccttaaataaagaagctaaaccaaaatagcccagcgctaaagagaattcttgagaagacttaactttcttatggctcaaggagcttctcagtgcggatagatgtacctttactttacaggaatgcaggagtagagctgtgaactatcagagtgatctggaccttaacaaaacattcactttttttcaatcaaagagctgcccaggattagtactagaaaccaagcagatcagctagttattactagctgtcttgggagagacttcctttccatatgaaagagaaggagcttagaagcagtccacctgggtctgagtcctgggcctgtctctctacctggctatgctgagacttacttaacctcttgctctctgttgatttaaaccataaaaagaaagcactatttcccaagaattgtgttaggattgtgagggcactcaggaaagttccaggaacacagcctgacatatagtgagtgcttaaaaattaattaaatctgtctttaagagcagtcgagagggaagcagttatcataagtctgtccaaatttggggaatagagaaggtggtaaccagattcttcagaacgaaacttaatgtaacataagaaaaggaagaaaacactgctgccgctggattctctcaggagaattagaggctggcctgttttccaattggccataaaggggctgttatccccctataggtaacacagctcttttccaaccccacaggattagtgggtgtgacttctgcatcaggaaggagacatgagggtagtgtgcagtgtaatcaggttcaaaccctatactttgcatttgcataccctgtattttgcttgagaccatccaagaacagtatcaaacagtccttgacctcaagaattttaaaatcttttataagtctattttctttatgataacaggaaaaagggagggtgcatgggccaaagcaagcaaaagaggaaagatttgaacttggccttagccagggtttgcaataagagtggatgttccctctagaaaagccagggctattcttgagtgggcatgtgagtggcaaattcagggtcaagaaacaagctacctaactgggcaggctttgtgtaggaaggagacacagagctatgataggcgattaagaaacacaagaaatgatactgtgcagtttggaagaaacctgtaagaccccatttgttgtaggatgctgaacaagcatccaaagtcttgtgttacgctttgtggaagttgcattggaatagggagagatgaaggtgggcatgtttgacaactcaggaatgaggccttatcctacagagatgacactgccaaaagagaaatcaatcatctaaggtctagcgtttgaagatgaaatcaggaatgatgaaacagcaattccaagatgagaaacctgggaaaatagtggtttcatagacataagtagagaaaggtgggggacactcagcaatttttccgtaagcaattagcagccgtttgtgcatgctgagaatacatgatatgtagttgtaaactgccgttaagaagcttctaatccagaaagaaaacttgttcactcataaatctagagaactaggcagtacaagaaccaaaagacttctgggtggtggaggagtggtctctgggtcacccaaaagctacattcatccatgtaggagctgagagtcctgtggttacacaactgccatcacactctccctaaactgtagctgcaatgccaagtgatggattctttcctgaggtccttcagcctgacaagtatttaggtggatttacagttctaagtcttcccttctataaatcttctgagagatatgctagataagaaaggcctggacccatttttcatcaaccactgccttcgaaggctgcttttcctgtcactactactaggctaccttttagaccctggtgccgtccatgtcctaagagtattcactagctaaacagtgtttgtggagaaggggacaaattgttttctgtggatcaaagatggaggttgatcttagaagttctcctccaattcacctggattctgtgaggaaataaaactggccacttacttgaaattcaccaactgaatgcaaactccaatccaagggctttgtcagtgagatgcttgactctagggactgcattctagatcaggtgcctgtagaacaaatccagcttgtcatctgtttttgtaaataaagttttattggaacacagccacaccgattcgtatctgtggctgctttcaagctgcagaggcagagttgagcatttgtgacaagacaccatatggcctagagagcctactatctggccccttacagaaaaagcttgccaaaccctaatctagatcttcatcccctttctcacctttaccccttaacaaagcacatacactccactgaaaaaagaaaaggcagtgtaattctcttttctgacaggataagagggtcatcgccttctagctgtggctccagcccattgaacatcacgagtacgcctccccctgatgcctcttctccaggaggcaagaaggtaagactgatgattcttagcctaagctagagaacctcttgcccaagatctgaaatgttgggggtgggagtatggaattgcaactgcgattgctgaaacaatttggactacttcctccttgaagtaaatgcatctgtgtgaggctggatacaaagcatactggtagggctagggaggcttgctgacatcctcagaggctttcttccatgtgagtggaagaagggagaaagaataaggaatggggaactgtcagttcatttaattgagggagcaattcaagagttcccatgagggaaagattattgagtacctcacatagaaaagtttctcattttctgccaggaattttcaagggagaaaatattagtgtctagggcaggcaatggaaacagcaatgccaccagcagtgctttggaaatcaagccatgctttatagctgcagaatacttggggatctgctgcctgggggttccattggtgtgacagcattggatccaagcagtggatcaatcaccagccctcatgaagagcttgctataagactacactataaataggtttaggaaccagtcatttgttttcatctttgctggagaacttataagcctaggcccatcttaatcgtaaattataaatctgtttatattgcctgatgccagtagagcttaggacagtttaaaggccatcattttggacacaatggcttcctttccccatctcctaaaacagagagagagaatatcaggaatttccataggcaggactcctagggcacaaaccatcaaaagcagggcaaggattttcaaaactgagctcctcggaggtttgttcaggttaccaagagctgtggtgttaccaggtgggatgggcgtggggatagttgctaaggagagagggtaagagtagaaatcctgcttctacaagggcagcaatacttcttttttatacaggaatcttctgcaaacatttctatttgaaaaagcgttttgctccccccaaaaaaggttgaaagttaacaaattaatgggtaagactacaaagtaagacctgggttcgaagcttggccttgccatgtgctagttatgtgaacttgtacaactttcaagccctagttttctttataatggagctaataatggttagggtagccagcatctttgcacgaggtcctactgtgagataatatatgtgaaagtgcttggcccaaaataccactgacagatgaagtctgagcttggtgtcccgtgacccccgcccccctgcccacaacacacacactgcttgccagctgtcttcttagctgttcttctgttatacctccaggtccttcctgcatattggatccaccatcttcttagggtggtcttccagtctctgcttcttaagttaacttttaggcacttgacttgactcctggtattaccaaggattctacttcttggttttgaaaggttatcagtccagtataggcttaaatattactcaaagaactttcatatacattgtctcatctcaccttcacaacattatagtgacaagatccaggctcctcagcgttcgttttataagtatggcccccaggctacaatcctgggctcatggcttccaattcttttcacatcaacaactaccagaaatcaaaagctgtgctctgcatcataaagccccagctatttttgaggcacttatgaaaattctcccttttctttgagaagaatggattataaaatggatctgtgagaagaaatttggatgtgttctcacgagatgagtcctgggcagcaggacttataagaaaagcagcttaaacaagacagttaaaactgacagcagtattaaatggtgcaccatacccagccctttccagtcactttcaaatttggaaggtccaaaaatgaaccatttagcctgcagttgtttgtcaggatcaagctaaaaaggaagcctaagtgagcctccataggtcgcaagagagtacagacatccagaagcactaaggaaaattcagataaagcagcagttctacaaatgtcatctgcagtctttttccagaaagagagggggcacaagatccttttaagggtctgcaaggttaaagctattttcttaataacattaaaacgttaattttttccctgtattgataatgtgcactattcatactaaaagcacggttgggtaaaattgctggcattttacaaaaatcagacaagtggcaccaaactatactagtagtcattgtattcttcaccaccacacactcacagtaaaaaaatagtttaaagccagtttcatttaagattgtccatcatggctaggtgcagtggctcacccctgtaatctcagcactctgggaagctgaggcaggcaaactgcttgagtccagcagttccaggcaagtctgggcaacatagagaaatcccatctctactaaaaaatacaaaaaaaattatccaggtgtggtggtgtacctgtaatcccagctactccggggactgaggtgggagaatcacctgagcccaggaggttgaggctgcagtgagctgagattgtgccactgtactccagcctgggcaaccagagtgagaccctatcaaggagggaaggaggaaaggaaggaagggagtgagggagggagggaaaatgtccatcattacttttataaaattctcaagcacacatctttttaatgctctgtgacaaaatgagaagtacacagaacttgtgctgcataccaaagtatgatgtttgtctcaaaaactacttgtgtgattaagttgtgagttgaactagctactattttcattggacaccatttttattgtatatggtcattcggttttgggtatttagaatactttttttttggaaatgaatgaagtgaacctgtcactttaaggaaaatgactgacatttgttgccaatgataaaatctgagctttcaagcaaaaattggaatttttagaaaacttgtctctgctactttgaccttgagatcttcctaaaacttaaaaaatgttgttgatgagatagggagtattaataatagtgatattttgatgctctataatgaaatgtgtcaatatatagaagatctgcataactcagtgaaccaatattttgtaactaaacaatgcaaggtatttcaaaatcatgtaagggtaaaagatccatcctaagtgccaagatataaagagtacaaaacattcattgatatggtttcagattccacattgcaactcacctttaagaaacttctacgtgtcaagttttgaagtggtatcaaaaaagaatacaattatttgaaaagtctattaaaatatgcctcccttttccaactacttatctgtgggaggttggatttccttcatatacttgaatcacaagacgtatctaaatagactgaatggaaaaacatatatgagaatccagttgaaaattattaagccagacattagatttgcaaaaatgtaagataatactctgcctggtaattttttgttactgttttagaaaatagttatttttcattaaaatactattcattatttatgttaacatgtagcgggtttattacatttaagaaatctattagttttaatttcaaatacagtaaatattgataaatacagcctacataagcaaaagttctttggagtcctcaatgatttttttaagagtgtaaaagggtccctagaccaaaacgttgctgtggaaataaagtaagttataatgccacctgctggcaaagcctgaaatcattgctgctcctgaaagcagcagctaccaaactgtttcctcacgtatatccagataggtctcaaagaatgctcttctttgagactcagccaggggaaggcagctggggtgagtgggggagattttgagacagagttctcttactgagtagtagtaataatcctccccagtagcctgtcttaacttaaaccacaggttactgaagttggcacctgtagtataagagatttacttctgttttcttcatttgactccttgagctgtgtctcttcacagcttgttaactccactttttcttcttcagaaatatctgtcactataagatgttttattcccttataggggaaacgtctagctgggctcattgaagtttaggcattggtcctaaagaaatatgtgggcatcatgattccaggcagttgaatgctcttgggattttattcagcctttaagttgcctctgtgggctcactaaaatggagagaaaagaatagttcgggggagaggttttttcttactctgaccatgtctgtctaacagttccttgtttgaaatcatccaatagaaaactgaagccatttgaagcttctccccaccccaccccatgcttcattttccttttggcattgctcataatactgattcaaacttcacacttccctccttttgtttgtagattttaaatggagggactccagacattccttccagtggcctactatcaggccaggctcaggagaacccaggttatccatattctgatagttcttctattcttggtaagtggcatcattattcgtttccattgcaatgagcttgcaaaacatcttacataaagtcaattttaagaactgaactgtgtgaaacaagctaatcctagataaatttgataggaacagaataaaagtttaaaatttgtttaaatctctaaaaagttgaccagtatttgagttttggtggaggtccaagtttgtgcctggaactcaagaggaggctacagctacctagacataggctttctcccatgtggggcataatctcttcagagagagaaggctaatgaaggttcagagataatgcctagaagggtgattagtaagcatatcagaaggtattaaaagtcattaagtgaaaagagtttgcttttcccatcacatccatctttttctcccctgggctttctagatctgtttttttcctaaactctcccttcctatttgcctttctttttgtaactcctcttaactggttacatcagattattaaaataagcttgactcaaatatttttaacatttactaaattttaagcgctttgtacttatttctaaaatgatcatttgattccttagagctgtctcttcacaacgtaaccccacttatttcttacgtatttttaaaaaattggttctttcctctaaaaaacagcgatataaaaaaagatagccatgcagcccaaaaagcagcatctcaccctaccattaaatgtaactttcttattaaaaatgtgcttaggaattgcttacttaatctgaagatgctttaaaaaagaaatcactgaccagtctttatctcctcccacaggtgagaacccccacataggtatagacatgattgacaacgaccaaggatcaagtagtcccagtaatgatgaggcagcaatggctgtcatcatgagcctcttggaagcagatgctggactgggtggccctgttgactttagtgacttgccatggccgctgtaaacactacatgttgctttggcaacagctatagtatcaaagtgcattactggtggagttttacagtctgtgaagcttactggataaggagagaatagcttttatgtactgacttcataaaagccatctcagagccattgatacaagtcaatcttactatatgtaacttcagacaaagtggaactaagcctgctccagtgtttcctcatcattgattattgggctagctgtggatagcttgcattaattgtatattttggattctgtttgtgttgaattttttaatcattgtgcacagaagcatcattggtagcttttatatgcaaatggtcatttcagatgtatggtgtttttacactacaaagaagtcccccatgtggatatttcttatactaattgtatcataaagccgtttattcttccttgtaagaatcctttactataaatatgggttaaagtataatgtactagacagttaaatatttttaataaatgtttcccttgttct

SEQ ID NO: 15452 - DNA, 109433 bp, Homo sapiens
acggaggtgcctgtttacccgcgccggactcaccgccgccgccgccgcgggatccgagtgcgggcgcgggcgcgggcgctcccggcgagccacggtgagtgtcaggccggcggcggccagcgacgcgatcccgcgcaccccgtcgggggccgttagcaccctcgcgggcgctgcgcccctgccgccgccccgggggcaacccggccgccgaagaaccctgcccgacgtgcccgctgccggccttaaagggcccgtgaccgctccctgcccccacccgggccgtggggaggctgcgccccttaaaggcgccgcgcccgtccgcccccatcctcctcgcgggggctgccgctgcgggctagggcaggcagaggtgctgcaggagcccttaaaggggccgggaaagtgttcgctggagtacccaccgcccttccgcgggcatcgctacctggcggggggagggggcagctagctgcctcttaaagggatagctctgcccttgggggcagtgactcggccgaagaggactcctagatgtgtccccgggagcttcggggatccccgaggggaccatgcctggtggctgcccctcaagggcgttgggcgaacggtgccgcgtctgcccttcctccccgcttcacttccctttcgggagcccgcgaggctgggtgggggcggggagggcgtctccgtcgggcttggggagtccaagtccgcccgccccttcggccctgtagccagggctggcgctgcacccgggaatccccggccggcacggggccgaccccagcctgcgaactttcgtggggcctgtgccgtccaggtcctgggcggccctcaaggatgccccgtgggtctgcgggcaggtgcgcgtcggcctggggatgtcgcccggagcccgggtgcgggccggccttggagtcccagagctccgcggagggcgcagcgagcctggctccagctccgggtttgacagatgtcagggaagaaaaggttcccgctcggctattgccgggcgttgacatcccagagagcttcccgtttgcttggaagaagacgaggaaggtagaggtgaacgtcgaccttgtggggcgcatgttagcctccccgaggggtcgcgagagccggcagcggggtgagctcaggtgcccgccggcaggagctggggagggaaggggagtgctggacaccggcgcctgctgtcaagttctcgccggccggtgagagacccgctgccgccgcgcaccccgcacctcctgacccctctcccctctccgcctcggccccttcccggtcacctagcgttgttttggcgctttggcgcttgcggtctcttccttcttccaccgctactcctcagcgaggaattattagccaagttttctcacccagcttccaaaaatcagattccgtatttgtgaacaagcttttcttgacactacccgtatacccgtatttccagcatcgtcgttttattaaacatccataaaagctgccccttagatgcattcatttcccacgacacctgcttgcttgtcatttgtccttctgacatctgctgttgttcacccctttaatctattattaaatgacaactattattttaattcttctggtctcattgatatccggatctgtgaatttgggttggtggagtttttaattaatgtacccgttgaatcatgagcttaaaataatcattgctgctcctgagcagttttgaataatatcatgctctctctgcttgcaagacttaaaaaaattcgctggtgttatatttgatttccatatcaatggaattcccaaatatttttgaaaatacaaaattcagtctttcagtccatgttttgttactcagatcattttactgataagtctttaacgcagcttatagaacatatttagaaggtttggaaatttcctggacaggatttgaaattgcctgtatcatctgaagctggttctgtagaagcattttggttttgattgtagatgcagccagtgaatgataacaataagttaaaactgtagttaaatttgttctttattcaaccctctgaagaacgaacagatctggtagaaaagcactaacctgggagttaggagctggacatcctggttctagtttaggcttgggctctcatggccgttccagtcggggcaagttattaaagatttctaggttgtgtttgcctctgatggaaagtaagacggttgaactaggtgatctcaaaggttcctctcttttgaagttctgtaagtctctaaatatttaatacatttgaattcaggttggtatttacctcctggcacctccagaatatctgagctgaagccctattttcataagaaagttaagcagatcaacagatggtgttttgaagaatccatttcaaatgatttataaaatgatgactacttacgagtttgtctgctatttgcagaagaggtttgcatgccacagggcaggaaaaggaagtggccatgttttcagatttatcccttcacaccaacaatctctgtggaatttatatgctaaaagatggagaagcaccatagaaagatttggctgtattaacaaaactgcatatgaaaaggtaaaaactagatagttaatatctctctttggtgtaagggttataatgtatctgagctttctttgtgatttcatcatcaactctcactgtggtaggaaaatcaatattaaataaacagtttcagccccgtgattacatgcagtgattttaggaagcatcatgataactaaagtaggtacttgcagggaagtaaaatatcctttctagaccttgaggtttcgttgggagctagggacacaggcatgttatccttctccacagtcttttttcattgtcaccttatcacaagactcagatttatcccaaatacccaccttgtcttttcttctccctctcatgaaataagacctgctctgactcaaccccctcagcatctcttacttcccacccaaaatgtcctgtctctatccccatcgtcccctcatctcctcccaattcagagaaagcaagtggacctctcctctgttccttttcttggcctctcaccatgggcaagtgcctgggctctggtggcagaagaatccatggctcaggtttgggctttgtggtcttggatgtgtgcttgactcctctgacctcaggtttctcctcttggtgtaatggcagtgcctgcctcgtggagtctgtgtgaggattaagggagatggtgcatgtaaaaggcctggcacacaggaagcctttcctttgtgccagctgccattccttctcacctctacccgggtcctatcactagaatattatttgtgctgtttgtccttagtctcccctgccccaccctgaaaaccttaggcttgacttaggagaggaaggatggaagaggcagagtcagacttgtggtgagcctgctgtgtaccaggcaatttacatgtgtctttacttggtaccctgggttcgtaagcctctctttcctccctcctgccagcctcccccactctcccatctcctgctccattcttagtacctgccctctggcttctctcgctaccacctttctttatatttcttctcaaagttttctccaaaactttgtcgtgagttcctggggcccatctgcccatccttattcctgagtggttgttcttggcccctttgcagtatttcttttatttttttaaacatggtctcagtcttgcctggttggagtgcagtggtgcaatcgtggctcactgcagcctcccaagtctcaggtaatcctcctgcctcagcctccagagtagctgagcctacagacacgtgccatcacacctggctcatttttgtatttttattagagatggagttttgccatgttgcccaggctggtctcaaactcctgggctcaagtgacccacctgcactggcctcccaaagtgctgggattacaggcgtgagtcactgtgctcagcccctttgaagcttttacctcacttgttttttgtcctttgaaatcctttcctctctcagcctttgggtcatgctggtttcttgattctcttcctgcacccctgtaaagataaatgtctgtcctagcttctgctattcacactgtccgtggcctggggtcccctctctagccctgacctgtctctcctgtgttctgctagcaggtccgttgtggacatgaatggcagcctgtaatctgcatttgtggtctcggagttacaggtttgcagactgcttgcaagcactgtcacattgagtcctcatgacacactggagcctacatcccttcattccccaggctgtcctaaaaggcagtttggttgggtagtttagcatacagactctggagccagatttcacatcctaagtattccctactggcttcgtgacttgtggtcaattttcttttgctctctatgccttggtgtcctcatctataaaactgggatcatagtagcccctacatcagagagttgaggtgtggattaaatgagttaaagcattggaaaaagtgtgccagtctattcatggcacattgcaaacactcagtgaatgttgctgtcagtcttgctgctcttcgttgccttgccggggtgccttggcctggtttgtagtggtctccacattcagcctgcctgtctgccagaccttgccatgtgcctggacactgtagtcaagctgaggggctgtccattccctgtaccagcccttggcccagtccatccctcaattttcacgtgtccaaatcctcctctgcttttaggacccagggccttggtcctgcagcactatttcttcattttgttttccttcctccccacacctggcagcaatgtccacattgatttttctccaattctcttaggttctgctgcattccatattgtgttgggctgtctctgaaaatatctcacctgctcgctcagcctgagcattctgggagaagtttatcttgctttttccaaaatgacaggcacagggagcctttaggccatggttgtccaatgcacattgatcttgtggaggaggagatgggatggggtgggcactcagggacggagcaggtggagggaacaggatgcacactgcatagaggtgggggtgcaacagggccataagtggacatggccgtaagtacttaggtctgcatggaaggagggtttgaattggggacttaacctcagggggagataagattggataaggtttagtcatctttgctgcaggggaacgttgagtactggcatgtaatggagagtggtttttaccttagtatgtgctgtccttttaaatagtgtaaactaattctttatctagcctggttaaagaaggggatggctggtctgcctaatttaatatttggctattgctctacccactgggttttgtgcatatactgaatgaagcattggcttgtatttattccttcaatcactgtttgaaatgtctgacctgggcaagttaattagcttctctgagtgcaaaataggaataataattattacgataatagcagctaacatttattgaacactttctatgtgccagcacatatgtgagtcacctttgcttattaactcatttaaaccccataacaactacatgaggcaggtactattatccttacttcacaaatgaggtggttttataaactgcccaaggtcactcagctgttatggcttggggcagaatttgtgctggtgaactccagagtctgccctgtaacaccctagtagattcctactgggaggaaacaccccgttatatcccttacctcactcagccgcaccatgccaggagcctagtaggctgacagcaattgggaaccagtcttattgttgacaaacatggtatgagcctcttttagagcggagctgcctgaaaccctccgcataagggatgcggacctggatgctacctgagcagcagctccaggggcttgtgaacattctcctcacatcctgttatgcatggctgtctctctggcctccccctgctttctctgcagcattgctctgacccaggccccctgtggctcagccagctcctccccaggcagctccttgtgtgagatgaaccttttaacataactcactaaccccacctcccaccctcatctagccatctgcagagctcctcactggggaggggaccttttcaaaggtccctcaccttcgtccttttctccctgaagaccaacgtccacaactttggtatatccacagtgttggggtgtgtgtgtgtgtgtgtgtgtgtgtgtgtgtgtatatatatgtgtgtgtgtatatatatatatatgtgtatatatatatatgtgtgtatatatatatatgtgtatatatatatatgtgtgtatatatatatgtgtatatatatatatatgtgtgtgtatatatatatatatatatatatatatatatatttttttttttaatgccagttgttccccaaatacatttagatagtaagggacacattgttttatgtcaagaacctgttacataaaaatgtgttatataatgttcaaatatatactgcacagtgaaattagataccactttttttttttcaaagaataaaaggataataaacacaggccgtcctgaatataattaacctcagatttgggaggcatggaaggacgtgccctgccctcagagctctcgtcctgagctctgcctttcttgagtgcgccgggagcaggatggatgggaagttggcctgaatctgccatggtgtggtactgtgagatgctctggaaattgtcttttttttttggcggggggtgggggatgccttcgcatcttgctcacttgtatctttctcacacctaagcagagggaagaagctctttttgccccctcgtacttagaccacccaggtcatcttttgaccagttttctgctctgctcaactcctttcaatcttcccagatgacaggccagctttgcctgctaagaacagccctggtgccagtggcatgcaggtggcacccctgtgtccagtcttccaggctctccagggtctggtcctgttcctcctccccagccctgcttccccgctcaacctccattcccagccacagccctgtgcccgaggttcagtcctccttgcctctccgctgtcctccctaggccacctcacttcacactctccctctggctagcggggtctttgcttaaattgttcccttgaggcctctcttccttgcccgtgcctgccttggatctcacttctctgtgaggtacctctgataacatttgttccctttgtgtgtgctctcccttttgctcttgattgccaaccattcattcgttcagaagcaggggtatgtcataatgagcaaattaccatatcatactgaatcaggatggccagttgtctcattttttaattgtttcatggttaattatcttacgctcacttcccactctccagtttcactcagttactccgtcagtgaagtttattggatgcctagcactgttgtgggcactgaggatacagcagtgaacaaaacaaggggcccgcaggaggggacagatgatgaatagtgaaacacgttcatgccttgttgtgagaagtgctaggagtgctaggatagcaagcaaatagagtaaagcagtagcgatgaggtatggtgggagggagggtaccttatctagatcacaggggagacctctctgaggaggtgacatttgaacttagcttcagaaagatctgggggaaagtatcccaggaagagagaacagcacatgtaaaggccctggggttgaaaggtgcttgatatttttgaggaaagtaaaggctagtgtgactcgattatgagctgcttgtgtacagatgttttctgcctcttttatactccctttaaccctgagcccagtgttaggaaggccttgtaaatacttacatacagaattatagcatttgtcattggttatatattataaaatagtaattttataaaataataatttatcataccctgcttagaaggcttttaataaaacattatattgcatataaacaaattaagggtttgaagggttttcttataaatgcactcctagcatgtttcaccaaatattactgttttaattgtgtttagtgcagaactttagacctcataattctgcttcatgtgcacaaccatcttaaaaacaggttttgttccaaaagtttatttgtaaggcactaggtggaaacttgggataaatttttctataagaaacaatgaagtaaatagtgatgtagtttctaggcgagccctcaaaagctatttagtggtgactgtagctgaaaacatactggttggtatcagcagtcgtcaagccttctgctggtagaccctcctctcagtagcattgtacctcatttgctgttagcaatcataggacccatttacctcagtcacttctcctactgtattttcagtctgttaaagttttatagaagggattttttacctttatacctttaagatttggttgcatgtgttataaatgagacagtagtgcagagagtggggaaaactctggactgggagctgggagaggcctgggctccagactgggcccagccactgactggctgagtaaatttgagtaagttatcctctttgaactttgatttctcaggttcttcttggctgtaaaatcctattgttttctcaccatagcagggaaacgtagatatacttcgttgttcaaacctgccctcaaatggctgcctctgatttcttcttgaagaagtatatggcactcagcaatgaggaactcaagcagttccccatgtgcagagctctgcagtgacattctcagtaggaaccttgattttgatctgctatctttcttgatgagttgaaagaaattttgtcccagaacttttggtccagataagatttctgtgttcttggccaacttatcttccatataattatgtaaattgttttttctttttaactcttagggataaaaatggtgactctggcttgcctgcttataaaatatagttataagtgcccttagggaatggaatgagtttgcaggagagagcagagctgaaagagtgtgggatcaaaaacaactttaaatgttaaatgcaaagctattttcagtaccctgctggaagaaaaaatttttttcaaggttttagaggatagaagaggtttttgctccaaagaagaaaggaacctaaggttttgcagtggtgaaaagtacctgatcctttaaccaactaccaccctcccttcccacctctgagttttgttttcgacatcatgaaccacatttgccatttgagaggtttgatatttaagtgacgttagtggcagagctcaactggcagtgttcaaatgacttaggtgcagagtgctgtgctgcaaacttccccagtgcattctagggtaagggatgcctcatagagagtgacagagcacttttagctctgcctctatttggtcagttgtgaatggtgtgttcctttttttccttacttgaaggcatagcgaggagttggtacaagaagttattgcttcatggacttcactttggagctagagggtggcattagacctagcctgccttcttggatgctggaataccagtggcaatgtcatctcttgttctctgctatacccctagcaatgaaaacagtgtctgtacagaaaagtctctcaataaatacttgtttattccttcaaaaagtgaattcagctttggataaatttttaatttcctccactctctagcagtataggcttatgaggttggtcttgcaaggtactttggagtttaggttgccatttctttttgacatctgtgtttttcttattcttcaggttggtcaggtatcagtgtcttttactgatgatggttgtccctgccctgctgatgttcatcttctgttatctttaattggctccaaactgcagcaaatctatagctgagccacattaactaaaagaaaacttgttgcatatttatttaggcatagtactacacatgtatttattcagtcaacaaatatctgtgagtctatatgccaagaatgttactagacccaaaggaagagcagaaattgttgttgtgaccaaggagcctgcagtttgattgccttgtggaacatctttatgagcattgtagaagggaggaggcttcatagaactggtcaggttttcacctttaaggatggtaggatttcgattcacagacaaggtgaggacaggtatttccaggaagtggctgagcggaaacagcataattaaaaacacagaagtaggaatggaccagtttgcattcatggacacagacttgtctaaaatggaaggttcttaaataatggtgggaatttaagtatggaagatcactgaaggcccaaacctgaagccattttagacacctagtgacttgcctaaagtgacagctgataagtggtagatccaggcttaaaataaggccatgggagctctcgaccactggcactggacttggctgtttcccagcagtctctagatgcaggatttgggtttgattggggattttcttttttctttctttctttctttctttttttttcttttttttttttttgtgatggacactgagattgggggttttagagtcatgagctggaaataggcaaggctctatttagcccactctttcattttgcagttggggaaactcagtgaggttaagtggcaagtcggagtttacctagtgagtcagagactgctaggcaatggataaccactggatttgttttattatgattatgattttagtgacatgaaatatttctctctaaagcatcagtccagtgttagtgttccagttggattggagcaatgaaggactaaatgcagcagagacctgacaggaggctgctagatgaatccaggaaggagagagagaagccagaactgagaattaattgtcaattatgttaatcagcatggtgttatcagtcaccctttagatttctagagtgcggtgaacatctgcctgtgtgagtggctttcaagtgtgtgaatctgcactgtactgtgaccaagataccttaatgaattctccagacagaaagtgccactatggaagtcgaatgttttaaaacaaatgcccacattttctggaaagagcaccagattaggagtcagatgacctgcattttaggctgcttctgctgcttagtcaccatatagccaaagcaaatcacttaatgtctcaaactgagcctgactccttatctgtggaacaggtataacaattcctgttgagcccttttcagtgtatgtgtgatgcttgtgtgagctaaggaaagaataggcattttgaagctgtaaagttgctttctggctgcagggagcagcagtgcagttttaatagtgaagatgtactggcccttacaggaatagcctaggagaaccagaagaaagttcccctacctccagggcatgtttagggaatctggcgctgtccaccaggtgggtgctgatgtgtactactttattggatagggccatgttttttgtttatttgtttgtttttattatactttaagttctagggtacatgtgcacaacacacaggtttgttacataggtatacatgtgccatgttggtttgctgcacccattaactcatcatttacattaggtatatctcctaatgctatccctctcccagccccccagcccctgacaggccccggagtgtgatgttccccgccccgtgtccaagtgttctcattgttcagttcccacctataagtgagaacatgcggtgtttggttttctgtccttgtgatagtttgctcagaatgatggtttctagcttcatccatgtccctgcaaagaacatgaactcatccttttttatggctgcatagtattccatggtacatgtgtgccacattttcttaatccagtctgtcattgatggacatttgggttggttccaagtctttgctattgtgaatagtgccacaataaacatacatatgcatgtgtctttatagtagcatgatttataatcctttgggtatatacccagtaatgggatcactgggtcaaatgatatttctagttctagatccttgaggaatctccacactgtattccacaatgattgaactagtttacactcccaccaacagtgtaaaagcattcctatttctccacatcctctccagcatctgttgtttcctgactttttaatgatcaccattctaactggtgtgagatggtatctcattttggttttgatttgcatttctctgatgaccagtgatgatgagcatttttttcatgtgtctgttggctgcataaatgtcttcttttgagaaatgtctgttcatatcctttgggatagggccatgttttaaagatgattacatttcacccccgtaagcctgggcatggacggaaaagttaggcatggatagccatgtgaatctattatctgtagacacctttcaggatagtgacaggcagctgtgaaccagaaaaacaagtgtcagaatctagccagctggccagtctggcattcttggatgtttcatctgtcctggggcattaggcagcgatccagaggaaccttgattagcctgggggattcatggctgagccagcatgctgtccaggtaatacctggctgcaaagcctgactggagatctgccaaatctaaatttctgccagcattacaagtgtatatattattattattattattattattattattattaatagcagtatctaaccttgactacctaccatatgccagcaactgtgctaagtgcttacatactttttctcattcagtcttcacagtattcatataaggtgggtaatgtcagttctgttttctagttagagagactgaaactcagacgagcttcagctgatacatactaagtgtaaaagccatgattcaaactcagaacagtctcagtccagtgcccagctgcataactgctatgttcttctttctctcttttcctggtacctgaaaatacttcttgtctctggttttgaggtttctgactgtgttattggttgatggatgggttgccacacagaggctcagctcagcacagctcttttttcttcatagcttatgacggacatcctcctggatactctggctggtgagcaaatgggtgccagtggtgaatgcagcagaaagactaactcttgccagctagtgcatgtgggtgaattttaaagacaacaaaagaaatttctgtaggtcagtttttcaaagagtaactggtagcttgtagtctacttaaaggccaagtttgatgttcatcaaagtcaccctgtaaaaacctttccaaatgctgtgattctgataacaataccatagaacattcctgtgtaattgacaagtagtttttacatacaatgtcttgtttagtcatcatcacaaccctatgagggtttgcaactacatatagttgcaaagaagactgggagatatctttagttgggaagccatgagtctagcaaaatctctgtttttaagggtggcgaggggagtgaatgaggggagctagcaatctgatgtgttgtggtggtgatggaagggataagtagagtttgaagctgttgtcagtagagttgggaggatgcctcctagtctatgacatctcctagtgttatgacatctcctcttgtggactgggaaattgcttagagtttaagcaactgtccagggttctacaactggtcagcggcagaggcagcacttaagtattgcttttgtgacttaattcactctctattcaagtttcatctttgctttctctattgaagttcttaaatattctgattcactgtatttagaagtcggcaggaattattaaagtgaacttctttgtggtatacactgttactgaatcagagtaaataaaaggtcacatgattggttgttgtgttaggtttaattgacgtgtactctgtatgatacagaatactcacatatcttttgtgggatatcattggtccaacagctttaaaaatcccaaggctttaatagatgataaaacacggagtttgtgtaatttcttgaaaaagttggccatcgagttcttggtcaggaacacaagcttcaattgtaacagtttccatggagacattagccttggcttgcatcatttcagctttcagtgcctttcctaggaatggagtgaactgctaaaagaagagctctggttgtggttgtcacttagagctctctcccctactgtttctgctggaggctgatttgcttttctgggtcttctcagttttttctgtgacctaagcataaattgtctttgagatcctggtaatctcatattttaaaagttttccacaaaagacaactgaatggaacacttttttttttcacccctttaaagtatttaattggccatcaacggtggctcacgcctgtaatcccagcactttgggaggtcgaggcaggcagatcacgaggtcaggagatcgagaccatcctgctagcacggtgaaaccccgtctctactaaaaatacaaaaaaaaaattacctgggcgtagtggcgggcgcctgtaatcccagctcctcgggaggctgaggcaggagaatggcgtgaacctggggggcggagcttgcagtgagccgagatcgcgccactgcactccagcctgggcgacagagcgagactccatctcaaaaaaaaaaaaataaaataaaatgaaaaataaagtatttaattggtggcaaggggctttgctagaagaatggacacctggtctcactcaagcttcttgtattagttgggataccaggtgagtccctctgttaaagagacccacaggcacaatggctgaaaccaggtagaagttttctctctcatgtactagtccctagtagatagtggtccaggcctagtatttttaacacatggcttccatttgatggttgaaggtaaaaacttaccatctcccagaggaaacacccaagggggcacacatccagtcatttttaagggaaagacccggaagcagcacattctctttttccagtagccggaatttgcaactacatatagttgcaaagaagactgggagatatctttagttgggaagcaatgagtctagcaaaatctctgtttttaagggtggcaaggggactgaatgaggaaagctagcggtctgctgtgttgtggtggcgatggaagggataagtagagtttgaagctgttgtcagtagagttgggaagatgcctgagtcaagggtgagaatctaagcaggcacacagaaaccagggcatgtgcagccatctagaggtcagggaagctcttggctctgaaactaagcagtggggggcacccaggcatggaagggaatgtgaattactcagaagacattaggttgtcagtaaaaggaaattcaccagtgtgactgaatcagtagaaagagcacttagactaggagtcagaagacctaggtttgagtccagcccttttacttcataacctggggcaaaaaactcccataaatatttgctttattatttagataatggcaataacagtgatggcctttcctgcctcccaggcttagtgtgagaccaaagggtgaggaagtactgtgtagactgcagccccatggagatgtgcacagtgtctgcccagcccagggcctgccatgggtgtatttgttgaatgaagtgtgaactattaaaagagttgggaaaaatgcattatactaaggagatcttaatcctggacagtcttctctaccaggcagaaaggttctgctctccactggtcaaggccttgggcctatgtgtaaaactgggtacctaacaaacacatgggcagacgcctgcagctccttactgggtagcacatgacacatagtatgtccttggcaaggccatttgctcattcctctgtgtaggtaaccaagtgcaacagaagtggaggtatagcccatgaatgtgaactaatcatttttaaatgatttggtccatgggcaggttagaagatgaaaccttcccaaggccaccaaaacttgatttcttgcttgaaaatgataagatgcagttataaaatgcttctgttgatttggaaaaaatgtgtgacttgttcaaaacaatatgtattaatagaaaatgtaacataaataagaggatacaaaaaagagcttaatgtttctatcttctgggcctagcaatagtgatttttttttccttttggtaggaaaatgggggctcagtggaataatcagttttatttctttttcttttaacttcatgaagggtttgtattgttcattttgttatttaatttgttcatttgctaaggaaagaacttctttcttggaactctgcggagtgtttttagatggactttactggaaaaaaacaggaattgaaattatattcacagtgcgctctaaactcttttaaaatctcatgcatggatggaggaaaatgcactgaaatatcaatagtggttctcacctcatggaattagaggtgacttttattctcatctccttctctgtggtttcctatttttcaacgagtgtgaattacttttatcatcatgaaagaccagttaaaaattaatctcacaaattaacactctcaagccaaaccacgaatttttgtttttcacaacctggcttggactataaactgtcacactatctcagacctatgcagattcttttctgagtgaggcattgaggaacttgttataaagatgatgctttccttctggaaatcaagaaacaagccaagggcttataatgtgttaggaaagatgtcctgagtaactttcctcctggaatctgactagcctttattacagctacttaaggaaatgagttttgtgggttccctgttcactgtgtcaccatttttttctttatcctgtactcatatgtacctcagggtccccagattttcttatcctgggattgcatgaccttgtccttggctctctcgggcccctgccgtttccagtgttctctgttcatgttcacaatattgttgatttggctgtggcttcttcccgcagtgttcttgtagactgaagagagcacattgctgcccttgtccctgtgcagcttcctcttcctctttatcattgctcaggtgagtggcctgagcagtgctcctgggatgaggtgaagagaagcagtcaagactgcagggaagggctaggggtgctgagctggccgagcttccctgggggaaggcactgggccatctgtccagcagcagttggcccacagctggcagggcaggctcaggagtggctcttgaagatggctgcttggtgtttgaagacagttcccagggcatgcattcatttgttgagcaccttcaatctggcagcctgtgttctagatgctggctgatgaccaaggctgacatggctttggctgtcatgggagtttcattctagtggtagagggagagagagagagacgatgtggtagagggagagagagagagacgattagcaggggaatcaatgaagaagataattacaggttgtaagaacagccccagaggaggttacaggtgcctgtttgtcgagaagtgggagggccagagttgggataggaacctatgtccctgattgcaaggtctggctccttctgtgtcctctgggctttctggtgggaagggaggaggtggaggagaccccttgcgagggccgagcttctcccattcagccagtctggaccagcctggggccttcagatggagatagcaaaagttgagggcataagctagggactggctctcttggtcactccagttgcccatctctgtacttccccaggtgaatagccatgttttttaaagaacacggagcaaatttgcatacaagagtccagatttatgcatgctgcagctttgtctgaaggcaagcttatattttctctcctattattttcaacttttaatgagttaccagcatctcagtgcccctccagcaaggatattgggctggtgttttcagggaacaattttaattaactcctccttgcctccctctcacccagccacccccagtccccttcctggtggctcagagtctggctttggcatgcaataagaatatttttgccttggtgttagcctttctgaaactcttgattaccagtgctcacaggacctttctgcagcactgtctgcttggctgtggactacccagaggagcttggtgtcaggcaaacttaggcgatttccctgagcatccttgttgagtctgcctttgtacttctttgtcaggtctagaggcttggccgtttgtcctgctcttttgtcccctccttctgggaaccctcaggaccctcactccatggagactcagcacccttcctcctgcaaacatcagtgatggggctttcccagccctttcccctatcttccttttcaaagaacaaagcctttgaagcttgtctcatacctgtctgatgcagtatgggaatctgtaagttctttgcctcctgaaggggtctggggaatcacttggctttcagagctttcctcgctcctctcccacccacagaccgattttaaccagagagtaagtcattcatgctgtgcttgaatactccttccagtcccactaggaagactctttgttactaaattctgttttcttgggaaaggggagcttattactatctcattttgttggttgttattaccctcctttaaaaatgtatctacatacacgcatgtgtgtacctacatgtttctatatttcccttgtgaatgtggccctcagagggcctggatttaaaccctgggagtggtagtgaccctttgggaaatgtatactttttgttccaaatcttctctggcttaaatttgtgaagttttgtttcagccttggtttcatagtttttcccagtttccaagataagtttggggctcactgtaatcagcatgtaaaggagaatatggccatcagctctgccccttaaattcatagtcagactcagtggggaagccgttcctgtcccatcttgcgctcgtggctctgtcagcctcaggcagctcctgcaccgtcctcctgcctgtgacagtgttgtcaggagttcttggtacctgggtgctgcttggcctcagggtgccagggctcccatgtggagtgtgcttgctgcagtctctacagcccaggtgtctctgcagccctcctcttacatagccacagcgtggtaaagtacatccagtttgcgctgtagtaagcaattttattaaaaaaataagtttaatatgtaagtggtcccttagttcgtttgaatggctcccctctctggctttggtttgaatgagctacacctggctggagccctgctgctcccctcagcatggagtcacctccctgtgctatggaggaaaggaagaagttattcttaccttggttttgagacaagacaagcctggagaaggctgtagggatgaaggagttgcccatttgtccagcatcagttgagagtctactgtgtgcctggcatcataggaagcctctggagtgctgtgagcaagaaaataatacttgatttatgtttttaagggttcttctcgctgcctgtgggccggcagtgaggaggacaagagcgcagcagggagatgggttaggaggcagttgctccggtgcagggagcagtgccagcttgagggctgctggtgggtattggtgtgagggtgggcaggctgcagataggccttcgcccattgcccttgccatgtgtccccatgtgtccccaggggaggctctgggcatcccaaactgtgagcctgccctttcccaagtgtgctaggccctgccaagctcctgcttcatggcctatgctgttcattccatctggaatgctctcttccccctgctttccatcctagctgagtgacattgggcaagtgaccagatctctcttgagcctcaatctcttattctgtgaaagagtgctcatggaacctactgcatgggaccatgaggataagactatagttgagtgtggtgattgcagtagcctccaaagctgtctcctgcttccaatttcatcccgctactgtgcattctttacacagcgatcctgtgaccgagggtcagatcagggcaggcctctgctcagaatcctctccacagtagcttcctgtcccagtcagaggaaaagccaaatcttagcatggccctcagagcttcctggtacttctgacctcatctcccaccccaaggccatggtgtatggttgatcatgctgggttctgcacagctcattgtggtgcatgtaagtggcactcacttcctccccaacttatgcattgcacaacttgtgcagctgtacatgctgctcctacctgcgcctctctagctccactccagccacagtggaatccgtgttgttcttcaaacacaccaggcatgcttcctgtttaagctctccctactgcctgctcccttggcctggaccattcttcccccagaggtgtgtatggctagttagctcaccttcttcaggtcttttttcaaatgtcaccctatttaaaattgttccatctgggtcactgccccccaaatgttccctttttcccttgctctttatttttcctcctagcacttatcaccatctaatatattatacgttttccttatttatttggtttatttttatttatttatttatttctcaacagaacataagcttgatgcaggcaggcaccagtgttaattttgttcactgctgtatccccagtgcctggattggtgcctggcagtaggggttcagtgatgcatgagtgaatgagtttggatgcacaaaggtaaagtattgggtacggtgcttagcacactggaagcacctaatacatggatgccagtattttcattgtctctgttaactctccaggccctggctcaaatgtggctttctctgagcctttctgcagtcccttctcaggctgaattaagtcaccaccacctgtgctctgtgttccccttcattttgccttctctgtctgctcggcatttatcacactgcagtagtgggcttatctcacactttttcctgttccaattgcaattcctgtggggcaaagactggcctgttcagatttgtatctcaggcggtctgcgcccccagctggcatgtggtaggagcttaggaagtgcttgctgctggtggctgtgggaggtggaaagagctttttaatccatcaggacccttacaagggggactggctccagcatcactgccgtctgatgtttgtgccccctcccaaggggtgtcaagggagagcttggcaaccacttaaatgagagtctccagtggtatatttagagcaaattttggagagaggagtctcttggataacagcatctgggtgacctgattgtttcacatataagagtttggctttttggctactcaggctttgagaggttggggtcattcaagggaggcagtgtaatacccatgtgttcagaggtggctgggacgagagggtgcaggagaaaaggcttgagctggcctgtaagggatctgagttggtgaagggagcacagcttctgggggtggcagaaggaataggagagctgcccctgccatacctggggaggggtggttaggtaggtgccttgggaggcatggttaggtaggtggtttggggccatggggggaaaactgtaatgccagggcaattactttggcctcttgtatttggcaggaggggtccacactggggattgtggtggcgtgagggagagggccctgggagagaagctctagagtcattttcttttccagaggtggagttgtcttggggacctgcacgtggcacgcagagcccatgctctcaggcacctttggggtggcagagtttcaactgaaccaacagaggacaaggggctgagaagtcggaggccttggctgaggtgcccagtttcttggttcactttctttacctgccaggttagcagcaagtgagcaaatccctcctgcctttgctcagcattagcctcagagacttgaggagagctgggccttcaggtgggagcctggtggccacactggagaggaccaagcttgacattgagtgtccgaggggctgaaagttgttcgctcatccagagatggattcgttctgcaaacatagggaaagttcccttcccattcctcatggctgtttgaggatggaattcctgcattgaccttggcctttccctgatcttggcctttcccctgcactatggcctctctactcttaacattacgccccagcccttttccatgggcccctcgtcttccctatggccatctaaaatggccgtataatattctatcaagggaatgttttcagtaagccatgagcttgatatggagcatttagattgcttctaatttttgctctttcagctaatgctacattaagccatctctgtgtattatggaatcatttcattagttggcatttgtctagctaatggcaatggcccaagatttaatagcgaatcagaatttcttttttcaagaagaatgtcatgaggatatataaaaaatttacttaaaatgctaggaatcatctatgttggggttttcatgaatgaggaagcagggaaacagtaacatgaaattagttgtaagtgaaagactgtgtgtataaaagtaactcgtgacttgtttgttcctgagtgtggaggggagccaataaatccttggaaggagcaatctacctgtgaaaatcaaagagatctgtattcctgcatctgatgaaaacataacaaacagtgatctcttcttaaggatatttttagaaatgccctaaaacaagaaaaagtaaataagatttccgagaaaaaacatgtctccttaattccaaatgagcctctctggaaatgccatttagtagtggaagcaggttgtagacttgctgaaaggatttggttctttggttattaggaaataactagaatgaaattgacaaacagacaacactgacttggtccccagtactgctttgagcctgaggtatgtgttggctttggaatgatggggaaggcttcctctgacttgctgatttgttgtagttgttgttgttattgttttgagatggagtctcgttctgtcaccaggctggagtgcagtggcgtgatcttggctcactgcaacttctgactacctgattcaagcgattctcctacctctgcctcccgagaggtgggattataggcacgtgccaccacacccagttaatttttgtattttcagtagaaatggggtttcaccatgttggccaggatggtctcaatctcctgacctcatgatctacctgcctcggcctcccaaagtgttgggattacaggcatgagccactgcgcctggtctgttgttgtttttattgtttcagtctctggtggcttattatgtagacttgggctgtaagctttgcatttcagtttaaaccagcaaatgtttacactatataaggttgcaagggctaaaactttagggagaaagaacccagtgcacccctgtttctgagaagctcatgaccagggagtgggaaggataaagcaatgttaaaaccaatggttattcaagggagattaagaagggggccctgggagagtcagctccatccttttagagaagggaggagttctacctcactgctgggcagggtggggctaaggggcaggagaatcaagaaaggttttatggaactagttgcatttgtcaacatcttgaaggacaggctgaaatggaggctggacattctcagcaaaggtaaaaggcctgagtagaggagatggagatggaaggacatggggcaatgtttgggatttggctgaagaattgcatgcctgtagtaatggtcatagtagcactttatggagagtatcaggtgccaggcatggttctaagagctttatatgtagtaactcacttaatccatgcaatgaaccaaatgaggtactgttattatccccattttacagatgaggaagctaagataaatagcaaggaattaattgcccaggatcacactgctgtggagccaagatcagaccaagttcatctggctccaggctctgtgcttacgaccatgaagctgtcctgtctctgatttggggaaagaacagtcactagaatcagacagatggacagatgccgtatgtttagaggctgggattatcaacattcaggaatgcagaggtggaaaagagaccagagatggagatgaggggcattggagaggtggggatgggaggagggtttggtgagagccgtgaagggccacaggaagacagagctttaaggagaagtttgtcagtgaggcccagagctgcagacaatcccaggaggtgagacctgaggaataggtctgggctgaggagaaagctgtgagggcctcgggagaggggcagcagggtgacccaggctggagctgctgtggtgtcctatcctggctgcagagtgctgcgtgttcctgggggatcatagctgttgatgagtatcactgtccctgtcctcttatctgtagaaagaggtgagtgtgacagagggggcaggtgagagctggcactgctaatttggcaaacctggtgacttttctgcagcctaatgatttttgaaagctgtttgctatgctgaggcacaagtgtgacttcccccatctaaatgctgtgcaatcgctattttccctggaaaattgggcccatgtgggctctgtgtgtggtttatttgagttccatttttatagccttattaccttgtccccatgatgcaagaggcctctctcttttcttgagctttgctgtgaaaattgtttcttaaaaggcacaaagtgatctctcgtcatctgggtggtgctcgctccacaagcagcacttttctcagactccgcacacacttgtcatcgcccctgcccccacttggcaggttcctctgattgttggcaatttactgagaacttttaggcagctcttgaagctcactacctatgtgtttgtcttgatttcttccggaagagtttgtgcatgtaaatatccattcagcctctttctctccgagatgttgccctgccactgaccgtgcttggggctgaaacccagtcttgtcctctggcctcgagctgattaacaatagcagtcatcatgtacagagcctgagtggttatcaggcactaagctaagggatttacgttcgtgatcttaattattcccaatttctttgaggtaggtactattacttcccccattttacagataaagaaaatgagccttcaagggatagagtaagttaccccaggttacatagctagtacatggcagagctgggcttaagcgggcctttctaaccttagactccatgtgctccattcattcattcattggcaacaaatgattgtctgcaacaggctgagaactgttgtagacccagggtgtacagcaaagggaaaaaaggccaaactcccaccttcagcttatattctaacttggggaggtagagatcatataataaatgacatatacattatgctatgtggtaatgagaactatggagaaaaatgaagcaaggaggtcagatgggaagtgggaggattttgaggagtggtcaaagaaggcctcattgagagtacaacaaattgttaggttaacaaacaaacccccaaatctcagtgtagcaacacaacaaaactgcacttctctgcagaaaaaattccaaagtggctgctcctggttagcaggcagccttccttgcagtcatccagggacctagactccttttatcctgtgtctctgccttcttcaagggccttggtttcctttgcattcaaatgctggagcgtgaggaagaagaagagagggtagtttgtgaggaaggctttatggaccagtctggaggaagcatacctccctcccacccactggccagaattcagtcacatgttcactcctgactgcaagggaggctgggaaaggaagtctggccatgtgccgcctaaaaaaaggaagtgggttctggtgaactcatggcatggtgtgttgcagcgagtgaggtgaagaagtgagctatgtgtttagctggaggaagagcattttacacaaaaggagcagcaagacaaaggctgctggaatggagtggggaggagagaaggagagtgggagaagatgagggcatggagttgtgggggccaggccactggggtcactgtaaggatttggttgccttgggaatgacaagcagagccagaacatagagttttgaaggaggaacgacaggatctgaggcacgtctcacagggctcactctggctgctgtgttgagagtggactgagggagcaagggggatgcaggggagaagcgggcgtttgcgggtgttatccaggtatgtgaccagaagggctggccctgagccggggtggtagaggtggggagaagccgttagatttgagatcagttctgaaggtgggccagcaacttttgctgtgggattggtagtggggcatgagagaaagaaaggagtcaagattattctgaggttttggctttgcctaatgagtattagtctcacttcctaccctcagaagcaagaggggaaattttttggaaaaggatatctgagtgttctctgggccctgacctgtcctccataacctctttcactctgtgatacttttttcagcacagatgggcaattcccattcatgactaggctttcagacatggagagggcacttggagtccctcctggcacacagcagaggtgaggcagcactgggaattgtctcactttggggtctttgggtcaaaccttgggacccctttagagtgacatggcagggactgagtgtgccctctaggggggtgagatatgcctactggagtccacttccaatgcctgccatctgcaaacactggtgaggccctggctgaagggtaacaacccacaaaagtgcacaaaaggaggaagttctggaatgcgagttgatgctgccagcggtccggttggctccttgccttctgttctttgtgtgttgacatcagacctctctactgcagacaggctgccctacctgagggggcacagctgccagcagcctcagtttacaatcctagcaaaggaggagagcctttctctacatctaggtatcagtttaagggaaaagcctctgtgtttgagagtgggagcggaaactgtttcccacgtacttccttggcagtcatgacctgtcaaggctgaaactggagatgggactttttaatagaccatgatctcactgggagcatatggggaagaaagttcatcttagagatggcagggcgtgagctgtgaaaacagatagtgcacacctactagatgctgggcccccgctaggtattttatttcactggagagcaaaacaatatatcatccctgccctcatggcacagatggcctcaagtggctaaaccatagaatggctagctgagagaaatgatagttctttctttttttctttactgattgcgaatggggttgtatttttaattttggtatccatgtgttcattgctagtatatagaaatccaattgatttttttgtttttatgttgtatcttgcatgtttgctaaactcactaattagtcatagaaatttttttttgtttattccccaggattttctgcatagacaattgtatcacttgcaaatagggattgtttcatttcatcttttccaatctgtatgttttttatttctttttgttgcctgattgtgtggccaggacttctagtcctatgttgaacaagagtgctgggagtgcacatccttgccttgttcctagtcttggggaaagcatcagcctgtcaccattaagtgtaaggtcagctgtggatttgttgtagatgccacttgcactttgctggcatggttgtgagtaggactgtgggttttgtgtgtttgtgtgtgtgtgtgatgtttggctgaaatacagtggttattatctacaagttttctgtcttgaaacagggagatttgttggggcattttctctttgtgctccttggcatttctgagttgctggtctcctcagttccaagtctgagctatatgcagaaaaggaaatgcaggaagctcaccactgtgttgttccttggatcctgaggtcccagctggtctgccttcttcagactgccatttggagtcttcttatagtcatctagcatagaatgcccaggggttttcattgttcttagcaggtggaatcagggaaagtgcacctgctccatcctgctgggagtggaaatggttgggggaaattggagcgtataggtcggggctagtttagatgcaagggctccgttctgtaggtgcaggagggccgtggaggctcagccctgacagcagtgggagggggatgggaagagggggagtggagagagcctaggtggctgctgcctgtgtccaggcaggaggtcctgaagtcctgaggtcctggccgtgacagtagaactgcagcagaaagaaggacaggaagttccatgaggacagtgaggaagtgcaaggagaccaggttggtctgaggtttctagctagagcagctagctggttctgagataacagagacagagggaggggtctaagcgtggcagaggggtgtattctaggcattgtagagcagatctggaagactggacttactgtgcttcccctcaggggaggcttcacagaggaagtctggctgctggggaaaaatccagggagtgtgcattctgggcagaggaattctggctgctgggtaaaaatccagggagtgtgcattctgggcagaggaaacaacgtgggaaaaggcacagatacagaaaacggcgtgatgggcctgttgggactccagctagctgaggcataagtgggtagttactggttccatgactgggaaggatgctgtaggagtgcacaaaaggaagaagttctggaatgcgagttgatgctgccagcggtccagttggctccttgccttctgttctttgtgtgttggcatcagacctctctactgcagacaggctgccctgcctgagggggcacagccaccagcagcctcagttttacaatcccagcgaagggggagagcctttctctacatctaggtatcagtttaagggaaaggctctgattggcccaggttggtgatgtgcctgcctttggacccgtcactgttgcaagggagtggagagttctaatctaggccggatcgtctgcccacccctgttggggcaaccagagtcttttaaaggagaaggcagacaaaatgcatctggggaagataaaaaagactgtttaccatggcttactgtaatagattttgaagaatatgtagtctggcagtgcaggaactcttcatggagattaaagcaggggacttgatcaaagttaggttttattaaaatcattctggacactgtatggggttgtgattggaagtgaatgacaagaggtgtcaaggcgggttcgtaggccactgctttagctccaaggagcactgatgaggcctaagctagcttagaatcctgacttactttgtttgcacttcacctgtagcgacagcatcagtgaggtggagaacagggatagagtcctagagatgttagacaggcaagacttggtggccagatggaggcaaggagaagggggtcttatggaggattccccactgccaccaagggcataaagaatgagtctctggagggctagccttatctttggaaacactattaagtgttggcagactcgatgtaccttattgcttcttcagaagtgttagtgttgttggcttcttgtggtatccagctggaaaaggaagctgattgattgcatttccctccctttaaagagcttccttttttgagaaatcagaagataggtgatacagtcaggactgccagtggagaaataggttggggagagggagacactggcttggagactctcctgcccccagcctgccccgaggcccgcgagtctgctttaggcacattcgtccttttggcatcatccttgctgggaaggcttttaagggatttaaggaaagaaatgacacaatctgattcatattgcaccagatttcctcctctgttcagaatagactatgggtggaggtagagtgactccaagagtagcagcagggaagcagggcaccaattaggagactgtcgcagcaatctaggatggggacggtggaggtggtgagaaatggtcacattctgaatacattttgaaggtaagaaccagttttagtgaggattagatgcggagtgggagagaaaggagatgaaaatgactccaaatttttggtctgggcagctggaagaacattgtcttaaactgaggcggacacaacgctgggaggagcacgtcaggggtctgtgttggacatgtttaagtttgagacacccaccatgtcttacacaaagctcccatctacttcttacttgacacaaacagttggatgtactggtcaggagttcagagcaggggtccaggcttggagagaaatctgagcattgttagcatggaggtgatatgtgtgaatccaggagactagttgagatcaccaagggagtgacagagaagagatgaaaacaaggactgaacacgctgacataagaggtggggagatgagggagaataagcaaagataagccagtgaggtgggcggaaaaccaggagagctagagggcatgattaactggtgtcaaagctgcaaggtaaggactgagactttaccaatggatgtagcaaaatgcaagacaggccaaatgcatatgctgttggacctaagcttaactttgcaaataagtcatagttccttcccagaaggagaatataattttgcaaaaagggatcatttaagatttattaaaataaatctgagaaagatgtgaagatagtaccgtaggaatccagcagaaggaaacagtgcttctggcttttgtggggaggattgagtcagattcattcataccttcattcatttgtgtgttcattcatttggcaaaaacttattgggtgccaggggttgcggggaggagggaagagagagttgttatctagtgggtatagagtttcatttttgcagatgaaaagagttctggagatggcttgtggtaatggttgaataagaatatgaatgtacttaataccattgaactgtacacttaaaaatggttaagactgcaaattttatgtgacatgtattttctcacaattaaaaatggagagagattaaataaaaaacagagcactttttggggccccatcatgaacttggtctgggatatgatgtttgaaatggatgcgccatctcagtagatggaggtaatgtggagaagagtggaggaagacgtccagctcagagggttttgggaactatcagtcctgtttgtctggatggtagggtctatcgggggaaaccatgcaagctgagactgcagccgggccagttggtgcaggcccagcatcctggctgtggatttgggcctgccttcttagattctgggagcctctgatggtttctgcccaggggagtgtcattccaaaggtgtgtatttagattaatttcattagtccttcctgttaaaccattgcctattaaaagcagtggggttgaggcattcatttttatggtgaaaattctggcctagcagaattttagatatccaagcatgtgtcaatgaagtgagtaggttatttttccatccattttacaagtatttattgaggatcatctaagtgcccgtagtgttctaggcagttgggggtatgggacggggtgaatttaacaggtctcttctcttaaaaagcctacagtctagagaaaccccctctccttcctaaacaagaagttatgccacaacgtgccatgtgttaccataggcatgccgccacagttccatgggtactgagaggagggggtgcctggcctgcctggaacactggggaggcttacagggaaaaactgtccaatggatttaaaggacaagcagggattttctaggcaaagaagcagaatgggcatcccaggagtatggtaaatcaaaacttattgggtgctatgaatttaaagctaaacttttatttcattggcttttaggtggtgctggctagagtgtatacgtttggacccaagcttaacttttccaatgtggaatcctgggccttcattggtaagtttgtttgatgccttcttaccaaattatgctatcaaggattggtatttggaatgaaaggcaaggtagttatcattggcaagttctctgtggaggttaccagccctggacctggagaagcctgtagcacaggctgaaggggtacataggaaaagtgaaatctcactgtaggtttctgtggtagatgcagagagggaggccagaggaggggaaccaaggggtgcgggggatggatgcagcgggccttatggagaggtggagctttggctctgttttgaagggcaagctagattgaaaaaagtccggggaggagtgaaagaagattttcgggacttgagaacatagaggtgaggtgtaaacaaagtgggcctagcagcagtcccataggagcaaaatcttcatcgaaaggagtcacgggcaagaactgtggtgggatctgctggcgtctgatgattctagtccatcagcaaactttttctgtagaggaccagatgctaaatatttttggcttcgtaggccatgtggtctctgtcacagctactccactctgctgtggtaacatgcaagcagccatagataatatggaaatgaatgggtgtggcagtgttccagtaaaactttatttacagaagcaggtggtgggctggatttggcctgcgggatgtagtttgccaactccttttctagaccctaaatgcccggctaaggcacatagactttatcctgaaggcagtgggaagccattgaagttattttggataaagaagtgaagtggcagaagtgatgtttacattttaggaacattcatctgatagctggacaagaggcatgggccccttttggaaggcagcagcagtcatccaggcatgaggtcttgcggtgaacagtagtgaaaatggaagcaaaggatcaatggaggagatactgcaaagggagaaccaatagcgttttcagtcttcttagacttaagaggcaggagtcaaagaggatgaaagtttaagcttgcttgtttacggtggtatctttgacagaaatgtagatgttgggggtggaaaggatagctgatgcatctggttttagatatgttgaattcaagataacagtggttcatccataagaaatgtccagcagagaattggaaatgcagggctgaagcctggcctgagaagattaagtctagagatgtggaatggaagccataggattaaacacggtctccccaagatgagcagtgggctgagctgtggggaatatgcgtaactgtgggacgggaagacgatggaagagacccagaggccatggaggagagtcccgggaagggaagagaatggggcagcagagaccagggagaacggacctgaagggaggctgctgaatttgtgacaaggtctttgcagatggccttgagaaatgtaatgtcacaagaggggaagggaagaggaagccaggttacatggagttggacataaatgaaggataaagaattgagatgttacaaaaatagaccgctcatagaaggtttgggtagtaaaagaagggagacacataagatttagatacttgcttgtcagaataacctttgctttagctttgaggcaggcaaagcatgctgtgaccagttttcatttccttctttggagccaagctgtgtttgggagtttgtgtgtaccttgggcttgtgattgtgttcttatgctcccttttgaggtgtggtgttcgtaactctgccacaacttgcaccacggaatccagcccgtgtttggacccttgccatgagacaagatgtgatctgttggggaagtagttgcatttgtataagttggaggagaaagtagagtggaccaaaaattgaaataaaccttcttactacagagtctatccaagtatggggacttgaggataattcctccagtcatgatttaattatgtatcaatttgtgctctgagtattttgagtgtaccttctttggtttgaattctaagtagtttttgacttggtttgtgtgaatatagcagttagagagctggtaacaaaagcaacagttgtaactggtttagagccatgatttattgaacactcattatgtactaagtccagtgctaagtgctattgtgtatcatcccatttcatctttgcaatgacctatgtggggggaattattaatagtattcttatttcagccagaaataagtcatagatgagtaactatgcaaggttacaagggatttgaacccgggtctgtataatccctggcttatgctgcttcctactttatcttgcctgtgtctggaatttttcctcctactaatgtagaaggactagagatagatcgagtccctcaggttaaatattcagaggctgtagtgggtgtttccacttcttaggagtctattgaaagggcagaagaagtgtgggaagtctggaagagactaaggccaaacctcaaacacttactttaactgtttccccagataaaatttagttgaaggcagcagccttgggcttggaaagaaaatagcgctagaaggcatgagagtcagattccagtcctagcattatgacaattataatgtcatttttgtttaaactcttggcatttctctccaattacctccagctttgagctccaaaggcaggctcctattttgtcttgtttttcactgtatccccagcatcgtagcacagaatctggcatgtagtatgttatgtactcactaattatttattgcttcgaatgcaccaagggacttggtacaagacacttagcctctcaggcactgctcttggcatcatggttatagaggtgaaacaggacaaggtctctgctgtcgtgaagcagacgtctacatgtgtgagatgtagaatgtgacgtcaggtatgatcatgctctgaaataaaagacagtgagaccggggtggagagggaagggcctgtccaagaagtgagacagtgagctcgttgggggtaaaatccataaaattcctcttggggtgactacagattgtcagctgcgctgtcagcaccttgttttaattgttttacttggctgccattgccaatgcccagctgactgctccctgcagcgagaactcccacctcaggcctcgctttcttcagctctgctgagcgtgcctctcctgggtcggctcccggttctcctccagctgctgagattccagcctccacagcctgctctgctggttctctgttctttgtccttagcttctggtttggcttggtccctttcacgtcatccttaacgtcctccctgggtgagctcatccaccactcacctctgtcttgaagacacccggatctccatatccggtctgaacctcctcccagtccacactcctagtggtctgccccgagggcacctcaacctgtctgtcccctcctgagtgccacatgcgtctttctccctgtgctgcctgcttggtccacgcccctcagttgcttctgcttcatgagtcgtcctggccttgtcttttccctcatattcccttggttaccacatcctgaagagctcatcttctaatttgtcaactcagttcttctctgtctctccactcctgtgtttaggattcatcattttgttctatgacagcctcttaattggtcatcctgtgttcatctttttcctccctcattccactgcccacattcctatcaacgtgatctttctaacacatgtctgatcagagctttcttttgcttaaagctctccaagagctcctcattgcttagaaaataaaagctaacccccttcagcggggcctgcagtcttctcatcatctggcccttggccccctgcagcttttgctcccccacccccaccccactttgggttttcctttttccctaactcacatttctaacctcagcctagctaccaacagccatcacctcctagtgcctttgcaatgctgggccctctcctgggaatggcgtggtctctgttcaccctcttgggaactcaactccagtttcccccaaatcttcaggacaccatccttccctacccagcacctctccatgacctggaaatgaccttcctcctggctcccagaacaccctcatgtctctcttgcaaagcacttatcggtgttactgttgatttacttacctgttatgctcagcaacctgagctccttaagggtggagaccacacacacacacacacacacacacacacacacacacacacactctgtctctctctctctgttccaagtgccagcatagtttacctggctcaggaagtttttgttgtaagagtgaggagtggtctgtttgtgcagccaagcaacagattcataatgtgataaaatgtacctgaaatgggaggttcattggccattgggtttattggggtgctcttcttgtcagctttgagtgcaggacaggttgtgttgggcttgagtttgtgacgcctgttgtgtctcccagcatgctgagacctcaggaatgtctcttctctatattctttgcccctgactttttatttttttagctcttgtttttgatggaccgataatagcaattcaaaatgaaaaataatccatcaaggaattctcaggaatgaggtccacccaccttggtcctggatgaatcccaaatttcctaaataagccagaatatctattcttgcgaactactgtctgacagcctttttcccccttaatccagctgagaatgcttttcttgaagggtaaggatacctagtggcccttcatgggggtgcctgagggcctctttgtcttcattttaaaccttgtaaagtccccagtgaatactgaggagtctaacaaataggaagaagctctgaccccaggggtcccaagtcagcatctgtactttgcatgggagctagcacaatgcacctagccaatagcatataaactctcctgttttcattcagtgccttaagcttgttgcttgttgtgtcttcttcacttcctatctctgccagagacctgagaagttgtgccaagagtgcagcttttatttggggcctcacagtaatctaggaaagcttttcagaagagagccattctcagcaccgaggtgtcctgcagaccaggacactccagcaggctcttggaactgctttcctgggatggaaatgcttgtgatgctgcctccccttgtagggactttccatatgctgttccctcagcctggaatgcatttttctcctggtttgcctagctcatgcctgttcaccctttggaactcagctgattggcctgcctcctcctcagaagcctccccaacctccctgataagaaggctaggtcttgtcctcaccattcccatgccagcatctagcgcttatggactgctcaccttgtgtcaagtactgttagaatgcttcatgcgtagctactttgtattaggggcttggtagatgttggctgaggtaagtgtcatcattgtcccaaagacactgtgtgaggaaactgaggcctcgacccattgagtaggtgacagagcaggagtttatcccagatgctggactgtgggtttacgctctgacccttctatacgccaccgttccctctgctccaagtccttgcagtctgtccttttccagcacttgtcatggaggtcatgacctcggtttgtgtggttatttgattaatgaatgtttgttccctcactgggcagcccttttgagccccaggatggcaggagtacctaggactctaggcaggtgcgcagcctggagttgaccgagagcatgtgggactgcccacttgcccacagctgcttcttgccttttgcatcacaggagggtgggctaggaccataaaagagccagcccaggcctccccctttctggagctcactgagtgcgtgcatggggtttggccgtcaccctcacttccatggttctgcatcagaaccagctgtgctgaggaaacatctgtgccttgttaaggtctgttccttctgcccactccctttgcccttttctctaccttacaacccctttgttgtccttcttcaaggaaaggggccccctttgtctctcagggcagagccagctgcccttctcctggtcctcttgatctgcacacactctgaggatgactgcccatggcaggtcatgatggtccgtctgccctggactgtggtttctgtggcagagcaatactttgtacagtcagggcccatggccctacggaaggctgagggagagcctgaggtcattgccttaagagaagctgcttcatggtgcagttggtatgtgtgcatgtgtgtgtggatgtgtgcttttttcatgcatgatgtttttatttgtgttatttatccccctgctatatctccctctctcaggggtctaacatggagctttgaatagtagatacatcatagctcttggctaaatacatattttctcccccgctgatctgaaggcacctcccttttcccctacccctcactttggtaccttggtgacttcacagggttgttatgacttcccagacctcattgagattgcagtgatgtgaaaaccctacctagattccagccagctgggcaggggccttggcagcaggggaagcccagttccctagggcaactcaccaggcctccagggctctctagggccaggctggctgagcttcaactgactcatactgtttttgactgggaaaaataaaaattttaaaatggcttctgaccaaatggggaaagtggatgtgggaggaggagaagggggacgttagccacaccctaggtacatttgccagcagcaaactgagatgggcttaaagtgtggctggcctctaagacgcctgcttcaaagggcattcggcacactggtctcaggctttggaggcccacctgcttcagaacatcagctccctgtctgtctagcgttgtgacttaagacaaacccaccaagctcccttagcctccattttctcatctgtaaaatgggattgtaatcattagaataacctttataaggttcttgtgagagtggaatgaagatgtgcttagcaccgtgactggcgtgtagaaagcaccaaatatttattatctgttaacattgtttttgtttgtcaaagtattattgttaataataattataagaagactttggaacagatataaagtctaaaatgcaggctgtgatgaaagggagatggtatataagaaaagtgctttttgaattgcacattatgtccagatattattattagcacaagtatgtttattattgttttgtctttgaaaaaaatgctggagcacaattttatgatgttgagtctatgtcctttgttgttttgttttttgttttggaaaaaggtttgtcacattggcctttattggaatcttgtccagtggatgtatgacccacattggtgaccctgggtgccaaatgcctggacagcacctggcaaagaagagccattatttcaatggtcactattgtttaaaatcgttatggtaaacaatacctgacagaagttcttagaggttcattgacagtaaattgtgggcaatgcactgagttattatttactctagacctgagaaattctccctctccaagttttgtgccttgtatagctaaataaatataaacaatttccttagaatttgatacaaacagctaccattgtcttcacaagtatgttagaaatactttcttaatagcaactacttgactgttttgttttttatctccattccctgccattactctgcctcttcccatctttctgaaataaaagtgagccaaattagccatttaaaaaatacgtagatactttcaggcagaggttgaaaactgtctaccccctggctgcatctggcttgcagatgtgttttgttcagcactcatagtgttttaagatgtttaaattagtggccaacatttaaaaatgggtagatttttgaatcaaaatccagatttccagctcttcataaaaaatcaaaggtctagtgggcctgggcccgtcttccttgtggcagtgcggaagagtggtggtccctcccctgggagcttgtttctccagcctgcctccggctggcccagcctcactgtacctttccatggcctgcttggcccctgtaggaatagagtttgtagtctctgcttaatataactaataccccttagatactgtgtatcagtttagaattatttccactagcaactgtgaccataggtaggaaggatattttacttgctaagttgtcattcttatgatagcccaaatggctataatagtattttaggctcttttggatttaatagaattaccttctctcctctctgtgggatttcctcattaacaatttttaaaaagtgttcagcaaggcttatatagcaacataaaattttaaataatgcaggatataaatttctatagctgctattgaaggggggttgcaatcaagtgaactgctttaattcaacaatttatggtgttgtaaatttgaaaaataaaagacacttagttttttttttttttttttttttttttcagaataaaataattaaatagttgacctttggcagagtctttgttgaaataggcaagggttttgagcttctcagaacttgagaccattgccttctggagtctttcctcagatgagtctgtgcctccttctagctagtgcactctgagcactgtggccacatctggagggtggagaggagacttagcttccaatggtggtcactctaggggaggggggcccttgcaaataccaaaatttttttaaattattattttatgagcttttaaaaacttttttgtttttgtcatcacaaaagtaataaacacttgtgataaattcagacaacactgaagtgctttaacataagcaacaaaatcttctgtgacctcccccaaccttttccaaccattccccaaacataagcacttttgagagtttgcttcttatactcctggacttttgcatttgcttgtttctctccacccctaccctttgccctcaaccacgacatagatactttcccttttgttttctaaagatagactgtccctgtgcatggtgttctgcaactttctttttacagctgtcaattattatggttatttttccaagtccatatgtacagataaatgtacttgttacttttaaaagttgtactccatgttatggttgtatgttaagtaaatttcgttttgtattgatagacactcaggttgtttctgaccttttgccattgcagtcattgctgctgtggaaatttttgtgcacacgtgtgaacttttgcctgagattttctttggtatagatacatagaagtaggacttttggtttaaatggtttgctgtttaaaatttgaatccataatgccaaattaccctccaaaaaggctgtaccaattcatgctcttcctaggagcatcccattatggctttgctaatctagtttttgcttacacatgtgtaagaaagtaaatcttaaaagcctcacaaataatgccatcaaaattacacgtttatcttagaaaagcattcagaatatatgtctgtagatttaattatatgatttttatatcttgactttgatggtggttatcatcctgcaaggtgacaaaaagttccctaaatactgtacacaattattaaataattattaaggatatcagttgtgccaggtagcctttggaagaattacagccaaatcacagcttccttttccacagctctgccaggctggcttgtctttcccaccaagggctgagccattaatactgaggctgggtcagcatttgaaggggccctgccagggagtgccaggccttgggccccagagacctggggagtgggagatggcaagtgactgctgtgaggctgagacaaagtttttgcctacaacaccccatggctgtttcctttactgagctagatgaggaaagcaaagggaagtgatggtccaagacttctggtggtcacttttgttcatagatttctcacaggagtgctaacatttaggctcatgtttacgaaggtttgaaaccttagcatttgggaaggatctgcaaattctcagccaggggccttaactgatcacaggtagttgtgaactcttggtccaggctgtatctcaaggcttcttcttagaaggacaggtcagcttaccacctgctaactgcatgtgaaattttgaattctgccttctctagctctcctctctggctctgagctggtatctggcatttgcaaacagtttaccctttgttgacttcttagcactaacctcacttttatgagtctgagtagacttgatacccaggccatttatcctttgagggtgccctcagcttcatcagacccatgctgggcagtctggcatagtggtaagaggcacttggagccagacagacctgggttcaaatcctgacatcatcacatttactaacagtgtgaccctttggctgatgacctcacctctttgagcatcagtgtctccttctacaaagtagggacagtaattctttcccaggggtattttgaaggatatacgaattaatatttgtcaggtgcctctcagatgttcagcacaaaataaacagtgtataaatatgagtcctctcttatcttcctgctgtagagagaaagttcgttggggatgctccaagttggtggctactggctgaggatcctggagtaagaggaaggctaccatgtaaacccagagatgaatcatgaacaatgtgtattctcaggagcttagtatttgatatgggagcctaacaagcaaatagtgtgtccagtaataggaactgattaatagaggaaagattaattaaccttctaggtgggtggggtggaaaagtaggtggggtattgaaggttcaacaggagttcgacagagaagatagaccataaataataaatatacggctgtatccactagagataaagttacattgttttttatgtacatgttgacttcttttggccttgccaatgcactgatatattcaaattcagctcctctctttttctcttcccttttcccttcactctgcctttcctccagccctgccttgaaatactcagccactgaaaatttcttaaagaatttctttatactttagtaagtcctcagaggataccagttcaccctactgagattttacaagaactttggtgtagctggggttttttttgcattcctttttctacggtagatataagttcttttgggttgcccatcaatgaacaaactaccaaccatttgatgtttactgcgtgactcctgtataccaagcacatgtgccatttcacttagtccccagaatgtcagagcagctttgtgaaatgggctgcccgttctttcttatggatgaagaaactgaggcttaggtaggttaatatactgaatattatacatgtagtgagtgggaaagccacagttcacctccagggtctttttctccctctttgctgccttgcttggggtcctgctcatagtaggtggacagcagatgtttgtctgaacatatgagaacactgcctgccacgtgccggtcagtttgatttgtgctgctggttttgtaacccacatggggcaatgacagctgctcaggtactttcctacctattagtggggccccagggtcacacatcagtcataattgacaaaaaacacaatttccctttcctctcaacttttatttctaaggtacttgtaagcaggtagattagattgttaacttttcattttttgctttgtctctctcctttaaagactatgtgaaagaatacacagtgccctgagagcctggcctgggaatcagaaacttagattccagcttcggttctgctggtaactcctcagtcattatgggtaaataatattccctctccagaactactagattgtgtccttggtgcagtctggggttcgggtggtcctagggaccctgcctactgcatgaacctgttatcaccatgtgaggctggaaggatctcagcgttggtgttgggcaggcctgagtgagcatcctggctcctgtacttcccagctctgtgacctcgggctaatcacctgactccctgatgcttgttcttgtctacgaaggagggctaagaggacctgcttcccaggatcactgtccagattgaatgagaaggaacgtcggcttccttccttctgtctccaactcctgagtgcactggttttagactaactgggtgtttctgcagttgaaaccaaaacaccttcattaggtacaatgttcattatacctcgcaacaccctgagatactcaactcttagatttcttgaagctcttttttgttaagaaactcctcaaaggaagatactcttctaccccattgagctttattagtgcttcaatgacagcaccttattttttcacttttttcccccttgcagacagaagctgcagtgtgaatcagtttgcatttatataatttcttttgcatttctttgcaaagaggaaaactccattcatttagcaaatgtccgtcatgcccaggccttatgttaggtgaagggatttggagagaaatagagtcactgacctcaagaagcttacagggaggaaaggtgtaaatacataaagtgacacatgggtttgtcctgtcaccaaggtatgcagtagatgctgtgggagaagagaggatgacacaggttctctcttggaagacctcatagagaagaggtgacttgtgagcaagtctttttttttttttttttttttttttttttgagagagggtcttgctctgtcacccaggctggagtgcagtggcatgatcctagctcactgcaactttgaaatcttgggcttcaagggatcttcctgcttcagcctcccaagtagctggaactacaggtatgtgccacttgcctgtctgatttttttttttttaattttttgtagagacagcgtctagccatgttgcccaggctgatcttgaactcctggcctccagtgatcctcccaccttggcctcctaaagtgctgggattatagacatgagccactgcacccagccgttgtgagcaagtcttaaaagatgagtaggaaggagtctgtcagctgtagaagtaggaagggcccaggcagaaggagcacagggcagaggctagagccctggtaggaggtgacacactgggtgcatgtctggagctggagccaagaggtggaggacctaagtggctacatcttggcagtcacccatatattggcaagccccaaatctttgtaaccagcccagattgtcttcctgagcccccaactcccatacccactgcccattcagcagctagctgcatgttgaagtgtagtggtcttcccagacctaacataactaaacagaagtcttgatttgttccttcaaaaacaaacaaaaaactagccttgctcctcctcagtcttccccatgttatgaggtccccatcatttttacctggctacccaggcctaaaatgtgggcatcatctttgattctgcttcctcctgtgttcttcacatcatctgtttgcaattctttttttgtttgttttactggttttaaaaattatttatttattgagactgagtcttgctttgtcatccaggctggagtgcaatggtatcatcttggctcactgcaacctccgcctcccgggtttgagaaattctcgtgcctcagcctcccgagtagctgggattacagtcgtgcgctaccactcctggctaatttttgtattttcagtagagatggggtatcaccatgttggccaggctggtctcaaactcctgacctcaagtgatccacccgccttggcctcccaaagtgctgggattataggcatgagccactgcacctggccaatttatttatttttaattaacacataataattgtacatatttatggggtacatagtgatgtttcaatacatataatctgtagtaaccagatcagaataattaacatatctgtcatttcaaacattgcagttcttgacaactcttactgtatgtcctggaagccaccactgctccttattattagtttgtttctttatcaaccaagcaggccagaccactgctctaccctcgttcaaacctccactgtctttcagcaggtctcttgtcagtttgctacataggcaaagaggtcttttaaaaagcaaatttgtgtcatttccctgctctaaactctccagcggctttctggcatctttggaatggaatctaaacatctcgccttggcctgccagcccctcctgctcatcttctctggtctcatcccttggcactctctgctcactccatttcagctgccgcatcttttcttactgttccccctgttgtctcatgggctttgcacttgctgtcctccgcctgagctgctcttccccagacaccgcctgtctcaccttcactccacgctggcctctattcaagtgttctcccacctgtctgaaaaagcaccgttctgccccctctccccgctgcttcaaccattctgtcctacctcgctttggtttctctcattagcactcatcactctctgactttatatgatatgtttgtttgtcttcttatttagtgtttgtcttaccccacaagaatataaatccatgaagatgggacctggtcttatctattgcattcagcactctagggcctaaaacagagcctggcacacagtgggtgatcctgaaacacgaggtgggtggatggacaaatgactgagttaatgcatgcctgcatgcaagcgaagactttggagtttatttcataggcagtgcaaatctagtagacatctttcaggaggtgagtgacgtggtcagcacttttattttagaaagccagctggtggcagtgtgggggctggactgtaggagggaggcagcagaattactttagcggctgtgaaaatcgtccaggaaattgatgctgagtgttgtgctagagctgtggggatggagaagaggggacagatgacaggacctgaagatctttgagtgtctttgatttctattgggataacttggtatagtgattcctttataagaaaagcaggaggggacgaactggtccagggagagactgttgacactctgtggtgtttttctcaccaagaaaacctaagccctgggatgcatgttctctgtagtggcattggctctctggggagtgactctgctgctccgcagcctcccctgttccattttttaataagagaatagtcaagatggtggtgtcagtgagtgggagtcttcttcatgcagatggatccattgatctttgcatactccaagccacactaagtcattggttcttttctcgcagtgggtacatttcaccttatttgattctgatctgacaaatgctgctttttttcttttctttttttttctttttttttgtttaaagaatacctagactgtgctcaagttccaggtggggtttacagataactggggttccagcatctcccttcttacaaacacgaacaggagcctttgccgtccttgggtctcagggaggcagaccggcagcaggcacacattcctggcccaggcgtagccatgctgtctggtgctgccttttgagaccttttgtgtgtgtgtgtgtgtgtgtgtgtgtgtgtgtgtgtgggcttgaatgattccttctttcaaaaattcaaccctctccaaattttgatgaaaaccttttcatctctgagtaagcacattatttcccatcttgatgaggtgtgtcccctctgtgtccctgagagtatgtcatcccagccttttaaattttattgtatttttttattttttattttttcatactagtcaagtgcagtagtgagaagcggggaaagagtagaacaaggggccgggggcggtggctcacatctgtaatcccagcactgtgggaggctgaggtgggtggatcatgaggtcaggagattgataccatcctggccaacatgatgaaaccctgtgtctactaaaaatacaaaaattagctgggtgtggtggcacacgcctgtagtcccagctactcgggaggctgaggcaggagaattgtttgaacccgggaggcagaggttgcagttgagccgatatcatgccaccgcactccagcctggcaacagagcaagactctgtctaaaaaaaaaaaaaagagtagaacaaggagtttgatctgttacagactgaactatcaatggagataactcactaccttcggaccagcctcatcccagtcttttaagcctggtccagaattcctaatcctgcttgtcaggcccttcaaagtgaaatgctgtaccatctgtatagctggattctcacctcctacctctcctctcccttccaaaggttccgatgtcataggaatctacgctagagggcttcctgtgtgccgggcactgtggtaagcacttcacatgcattctctctaatccttaccacttcggggatgtaaggattataatcttctttttacagatgaggaagctgaagcttgccactgcttagtagttaagagtatgggcttacagccaaacagaccctggattgattctcaactagctggggaccttgggcatgctacttaatttttttaacctttttcacatttagaagataaagataatatatagagagataatatagaagattatataggtattatatatatatatatcttctatattatgaagataatacagagttgtgataaaaattaaatgaaatgaccagacatagtggctcactgttgttttgttttgttttgtttttttgagacagagtctcgctctgtcgcccaggctggagtgcagtggtgcgatctcggctcactgcaagctctgcttcccgggttcacgccagtctcctgcctcagcctcccgagtagctgggactacaggcgcccgccaccacgcccggctaattttgttgtatttttagtagagacggggtttcaccgtgttagccaggatggtctcgatctcctgacctcgtgatccacccccctcagcctcccaaagtgctgggattacaggtgtgagccactgcgcccagcccatagcggttcactcatgtaatcccagcactttgagaggctgaggtgggaggtcacttgaggccaggaattcaaggccagcctgggcaacatagcaagaccacttctcttttatgaaaaaaaaaaattaagaaaaataaaaattaaatgaaataacatgtaatttcctaagtacattaagtacgtgcctactatgcgccggacattgtgctgtcagcaaataatagctcatcgcagatgctgttatcatcatcatcatcccaaagccacagattgagtctgtaggtgaggccctgcctggctccaaagattgtgtttttttctcctgttgctcccaagttcacctgtcccaaactttctagcccctaagtttgcttccttgcgcttttctggttgtgccatttgtccctgtctgggcagtgggctcaagctaaggcacagcagttttccagtccctttgagctactgacctcttttctgtcattgactgaacagtttccggtggctgaatcgtctgtgtaagagcttggacaattttttctgattgttaccatcatcgtgtttactgtgaaagggcttcctgtatagttgtttgtgttagcagcattgtctaaatgaaacaagagtggcaacagaaagggttggtgagcagtcctagtcttttggggtcacagatcactttgtgagtctgaagaaatttatagactctctcaaaaaaataaacgacaagacaaatacaagcccagcatttttcatgagacgttttccctgaagttgatctggaaggctatgtgctcttttgtcattgtgctactccacattcacagccatgaagggtgtcatgtttctgcagggtgtttgtatttaagggttgttgggcaatttggcaacactatacctgtttcattgatactatgtgctatttgcatttatttcccatatctgagatacgtattcacacatgagaactggcctggccattttgatgagatgtacctgctgatttgcacataaacacaagccatggcctgcatctagaggatcgactggagaggcttttttttggcccaaaacatcagactagtaggaattttattatgagttatagactaaaaggggggataaacttagcttcagcagggtttaatattctcaattcaggtaagtgtaaatctctacttttcattttaaacatttttgaaatttcagtctttaaaaaaatgcttgttttttttccttccaagttttaaggtatgggtttgggagaaggcagattccaaacactttaactcttcgacctcagacttgcttatgagcctctctttggaacatttccagtgaaccgtggagcaagcctgccacatccagcagccgtaggcatgatgatcactggtgccgatggcccctccactccctgcctggcttttgaggccccgcagaaagaaaggaacagaatcctttcataaggaaggccccagaatcctttctcctgctgtagctatgctgccagtgtcctctgtagatggaaatggaacttggattttgggtgccagaactgaattcatcacagataagattagttgatataaagctgtttctgatgagcagtttttcctccagagttttcatttttgctttttctaaattatacaaaataatagacactcattacaaagggaggatcataatgctccatacctggttttgaattccacttctatcacttattagatgcagccctgggcaaaacacacgccctctctgagccttgatttttctcattgaatgggagatctaattattttacctcataatactgctgtagggattgaaggagattggtataaataatggttttctgagagtctggtgtgtatttgctttttttcagttaatatgaattgagtacctactaagagctggtcactgttctagttgatatggaaccagtcaagagcaagacagagagggtctccgctctcatggtgctcacattctaatcagaggaggcacaagaacacaagatcacttcagttattaagaaattagaacccaggggtagcatgagagtcacaggaaggacccctttacgtcggatggccagcagaaccctccctgaagagctcaatgctttgtgacccccccggtcccaagttttccaggactcctacttttaaaaacactgcccctccaagtatataggtctcaattttgagtttggaaaatctgaccacatattagttctcttgttcattaatgggcttcccatttagagagtgagttcctggggcaggagccatgtcacaggaccttttgaaggtctcagggccaatatggacgacacttctcttgaacactcacccagttgggctgacatgaaaacctcatggtgggaggtggggggtgattagtttccagccagagcccattttgctccattgctgctttgaacattctggtttctaaggagctggaagtagtttctctcagcgagaatgtggcacactgtcatctcctgattctctgcatgcagttcttcaatggcttgttgaggctgcgtggaagcccagaggtcggggcagttccaactcacacactggcatttgaacggcagagcagtaagccctacacctgacataactgcattgccttcttggggtacggtacggatttttaaatgaccatttcagcctgctgggctgggcaacggtgatccaaactgatgagtcaggaagccactgaacagaaaggcaggctgcatctgactcacctgtcatgtcgatagttgacctccttttgtttgaccttgatttgctcagtgcaattaaagatgctgttgtgagtgcacttctgctacctgatttaaataaagtctaacatgtgacagctcagggtcttaaatgcacacacgacttaggcagacggacagatgggtgagtggttagcctttcacttacctctgaattgtaattctatcacaaggaaagggcttaatttcaggaacacggagtaattatttgagactagatacaatgccaaagcagcaggccttgattccttgctacagggcagcttaatcaggaaatggcctagatggccgcctttcaagtaggtccttgcagtagcttggcaacaggcacagggtcataattggaagaatttggctgtgagtgtctgtgggtgtttacagtgcactatagggcagggcttctcttatttatagaatattttgagcaacaagcagcagaaggctgaaaagccactaaaatctcgatttatttttaacaaattccatttttctcctcatcccagaaggagaactgagttattaaaaaacagttaaaaaatacatcattgcagagcatgccatatctaattatggggttgccagcatcggcctgcagccacatttcaagggcttcgtaaatcaaccatccattcaatctgtgaacttatatgactcctgttctccatttagatgtagagcgaaattattggcaagtgggtgctgatcagaaaaagttcttccctgtctaaattaggagatgggagggataaatatagaatagtatacttatgttctcaaaaggagataaaatcattcttcattgtccattatacttagctgcacaaacatccatcccattgcactaaatagccactttagagttttcacacattgcaatggcagttctgtgccactcaaaggcgcagtattgtgatatctcgctgagcctaaacctgagtgattattgctcacgtagtcatgaagagacataaacccagtgcttttttgcctgtgttgtcgtagtgtactagagctacaaggtgggccttcagagagacactagttttaagtatatctcattgtaggtggggaagcagaggcctaggcaagggagtgacttgcctagggtcccattaagagtcatggcagaggtgggctggggcggcagtctctgtgcttctcttgacagtgccctgctgtgctcactggagctactgtattaaacagatacccttcaggggttcacagtcttagaagacacaggcacgaagatggccaaacaatcagcccatgcataagcagaccaagatatgtgtatataacagattagttgagtggtagagaaaatgagagtggggaattttggaatctatttggatagcaaagcaaaggtaacatcagttgctctctgacccacttgggaaaagcttatagagatgctatgaagttttctaatggaaaaaggtgcagtacatttgccatgtgttagtgggaaggtaagtatgatgcagtggtgggtggtaggaggcagtgaagataagtattgcaactttggaggagccctgggaatggattgttgaggtgatttcataggaatacgaaagggagcataggaccagggcacaggccagagacaggcaatcccaagttccctggagtaccctgcccttttctgggaaagcaagtgggtggcatgagtgctatgttcccaatgctctggccccacccctggtagaagaataataactgatcatggtgggttttttctgagcctctgtatctttgagtagcattctggtagccaatatcagtggactggtgccagcctgtgtggtgaacctctatctctttcttgccctgggctgcatgtcaggcacagtgcctaagccggagtgggctttggggagttacttctctttctgaggctggaaggggcagagggacgtagggaaaactttgctagggagggcaaactgtgaaagcctctggagaagtcacctgttgggataccaaaggccagcggttttagaggatgcgaagaggccgggcggggttggtctgggcctaaactaaggctgtagcggctagcatggagaggaacaagcgacggggagtgattacggatgaggaagacgtactaggatttggctacagacagacaaccaaccagagagtaaaagacagtgacatgctaggatgtgaaccacctactacagagaaggtcagaggtggggagggaggaatcagggctgtgggcagatccagcagctgggatccaaagctgaagcccttgggttattgaatccattctttctgagaagagatggttgatcttcctgcccagggagttcctagccagactggacagtggttctcaaacatggtgccaggtgttgtcagatagcaaacaattagtttgtacacagaatgtccccaaggtcacctacacatatttgtttttcctaatctttgatacctacagccacttacctgctttcgagttctcagagttgagaacatataaatttgcagtaacaagtgcacaggaaatacttggaaaatggctgatgagctttagtttggaaatttcatttttttcttggatctggattataatttcagtacaagctagcaatttttcttgttggtaaaatagtttctagttttaaaattatttctgtagttaataaagttaacactatttcatgatggaggctgccccagctctgaaccaattttcaaaaggcagattctcctctttctctctcttatttcttgctcttgaacatttcactgtgttctagcaacttttcctgtgtgtgactcggccaggagactgacttgagtaagatccaggtcaaggggttgtgtgggtgggtcggtggtaaggaggtgctgaagaacactaaaacctttgcctgagaggagtctgggaagtagcctgcgaactggaatgaccccaggcttcctgtcacggtcatagcccatggagttggcagacttgatcactctatattgtgtgcccccaggtaatggcattagtcatcgatactgtcttttttttttttttttctttgagagagagagtctcagtctgtcgcccaggctggagtgcagtggcgtgatctcagctcattgcagcctctgcctgctgggttcaagtgattctcctgcctcagtctcccaagtagctgggattacaggtacatgccaccacacccagctaatttttggatttttagtagagacggggttttgccatgttggccaggctggtctcgaactcctgacctcgggtgatctgctcacctcggcctcccaaagtgctgggattacaggcgtgatccactgcgcccggccaatactgtctttaaatcgtccagagtaagaaaatgttgatagcttgttgtcacagccctgtcattttacacattccctgaattattgtctggcaccagcaggtgttccagaaacacttttggttctttgagccattactggtcattcctgtcaccactgccaccaccagatgtggttctgagagcattaagtaaaagttttgaaggttgtgtatgttaagactggtgcaaagtccatcctccttccttcgggctgatcagccacaccctggctatcagcacttatttactcattttcaaagtgacagaatggtccagtgggcaggggcataaggggtcacttcctctaaccacccgccagtgcaggaggatcccatctgcgcagtggctgcccatgacaggcagttccctagccccagtcggacatctccgcaccaggcatcctgctcctgctttatggacatctttggctcttaaaaatcctcctttattctgaccgcagatctgccttttggcagtgtttccttagtgacctagttctgctttttgtggcaacacagaacaaaggtcggtaggcatggcacaattccagcttagaagtttgaaggtagtgctcatggacccacatcctttccctctccacccactctatctccctccacaaggtttatgttctccagtgccttcagccattctttctatggcatggcagtcagtattaatcccagtaaaggtaacatgtatccagagagtgcttgccatgggccaggcactgttctaagctccgtacgtgaattgtcttatttatgactcaaaatcaccatatgaggtgagccctgtcatcatcctcattttaccaatgaggcaactaaggaacgagggctcacatcttgtcccgagccatgcagtcaagcagcagagcagagatttggggctaggcagtgtgactccagagcccgtgctcttagttgtggtgcaagactatcttacagcctttcctgcatagtgccaaaaataagcccatggtgcactagacttgggctggccctgctttaacttattttgcaagaaatcattagacaggagccttagttgaaccattttctgtgaaaccttcagagtttgttttgacagaacagactgcagggcagaggcatctgcactgtccccaacaaatgggttcatcctgtagctctgccaggccccacagggttcataaaatggtagctttagatcaaggtgacaaatacagggctcttgatgttttttttttttttcctgaacatggtgcctgagcaataggtttcttgtttaaagtgcttagtcatggttttatggccagaaagtagaaggagagaggtacctaagaattgcaaaactgggtcatctcttcaagtgcctaatccaatattcagtctcagagaacaactccagcagttacgggggtggaaggatgtgatgaccacctaccatccaaaactgggatgtaggtgccaaatacacattctcctgaaatgatccctggtgcctctagccaggctcttccaggagtctagagaaagatggcccatgacttcatccagagtctttgcttcctgtgctctgggatgcctgggcttttctggccacagccatacactgacagggccagaagggctgagatgctgggattgaaccatctttctctttgtgagttgctttccagatagcacgcattccggtcactattttccagagatttaagcagcaaagtgagggaccctcgggcatcgactcagagacctggaggggagcagcttgaagcaatgtaaaaagcactggataaaatctggttctaccaaaaatagggctatgagagttacctcacctccctgaaaggtaatatctttatctgaaaaatggggatgataatactactaacctggaagattgacaggaggattagatgagattctgcatggacataacagtccttggcatgatgtctagcagtgaagaaacataaatatgagaataataacttccttcttcctccgctgtctattccttctcttattctagtcctgtctgctgttgggttttgtctgttgttttgggtaaatagctaacctctctgcctctttttgtctgtagaaatgctactggttctgaatgggtacttcgcgccccctataggacatcgtgggaatgtgtgtgggtgatctggatgtcacagtgacccagacgaggcttttactgggggaagaggggaaggcaggggtgctagatataatgcttggggaacaaaagattgcccaacatctgcatagctgcctaatgctcagtgcattcttgtgggcaaaaccctgcttaaaattatctgggcctagagtctgactccaattaacacataaacacaaataatttttgcatgtttttaatatatactgaattttctgcgaacacagctaccaagtatataagatttacctatttgttatgaataggtgcaagcatttcatatatctttcatgatgttttctggtgtagcggtgccccaatacttacatattgatttacatgttgtcttatttttaactatatttcctttcttctttgtattacagttagggcattatattgattatttttggaattataagtgttgtaaggttatattacttacagatttcaagagagctaaagacatatttaaaatatttttattgcatttttgacaatatgaaagagcaagagagagagagtgtgtgtgcgtgcatgcatgcacatgcttacaaattagctagaaaaatcctaagacagactttaaatgaaaagaaatggtttcatagctcctagaaatgtccttttacataaggatatgtagtagaagtccaaatttttaactgcattcattgtcagagaaatgaggtgttttgatgtttcccctgtcccttttagaaagtatatgatcctaaaagagcctgaaacagtttccattgtcatattttttcatttttgcaatctctatttttttcactcctcccacctgtgcatatatatatttaaaagcgtccccatatagacttttaaagaaagaaaagccagccaggctccccactctttactaagtttgttttgattgttttgtggcctctgcctgcacctcggcctgagtcagactgactctgggagctgtgggcaggtccaagggaaagtcaaggaggtaatgaggcttctcgtgggggcaacttgtaggccaagttgggtgggttgaagtcagtctaccagaagcttcctgcctcaagcctgggcctctacctgtcctgaaacctgagggctctccagttggaccacgagggtctgacatccaggaggatccccaggagagagcaaccgtcactagggaatatgctgcccagcactgactgtactgagcagcagtgttgtgtgcctgttgggttgatgccatggatagccaggcgttcagaactgaacacgacacctaaaaggcaaacacgaactgtgaatgtgccagtgtcagatgctgccttggtggtcatgtgtgggctggcagtaagcttttggtcccttaacactcgctgttggaaatttcccaaggctttcatctagggtagctggtgtgtgatttccctgtcctttgttactcctatctggaaactagttgaaatcttttctatgatattgatatagttacagaaaatctgaatacttactactaagttttatagttctgcttagttcaaagtaacacaacctcataagagaaagtttgaaacaggtagagaaattgaaagatgaaaatcactacccattatctcagcccacaaagatagctactatcagcattttggtttgtttcctttcagtcctttctgtgtttatgaaattttattatataaataattcatgtccaatatagaaaaagatggaaaattgagaaattataacgttaaaacaaaactgacccatctcaccagttggagatgtcttaatattctggtgaatttttttttgtcttttttctatagacacataagaagactgggaaatattgtgtatatacgtttgtaccctttttcaccaatgtatatcaatgtatatcagttcactaatgaatactaattaaatgaaaatttattaaatgtatatctatttatatctattgatatattaacagatgccagtgcatatctattaaaagagtactatgtaagagatgatgttcttaaacataaaatttaatttaggcatgaaattactttgtcaaaagatatatcagtttatattcagatatacagtgtactgacctgcccatttaccacatcttcactaatactggtattatctttaaatagaatctttgctaatatgagcagtgaaagtggcatattatctattaaattttgacggttatgagattgagcatgtttttgtatacttactggtctttgtgtttcatcttttggggtttcctattcatagtctctgcttagttttccactgaggtatttgcctttttattgatttataagagattttgttttgttttaactcagaaaaggtagtattgcttcagttgtcacagagctttggagtcagacagagctgggtttgaaccctggctttcctacttgtgagctgagggatttcaggcaatttatctgacccctctcacaattaattagttcttctttgagaactaaacgaaacaacactgactagcatgaaaaaaaagcctggtgtgtggtttctgccaatagtttttgtgttgttatttttgttgtgattcctgcactgagtattttctcagaaaaatgaccttgagctgtacgactcatgcctgttcagacccacagacacatgatactcactatatccaaagctcagaaaaatgaaactgaaatcactgaagtttgtgggttttttttttaaattcttcttgccagaaggagacaaatgaaggaaaaaaaacaagccgatttcattttcattaagaggaatttgtagagttatttctggggtcaggcaggatacattcagacgaacattttagatctagggctgggaagatcccgagactcgttatagattacatcatcttcctccaagtgcacttgccaggcaaatggacaagtgcattttagaaaggttttcagttgttcacgtttaaacagaaaggatcacctggctaacttttagttaacccattgaacagatgtgccattcccccagcccattggttattcatgtccttgttactggtttttgatatccttgccccgtaggtgggaggagggatgggtatgagcctgccctgccctctttctcctacttgggacagagctgttgcttttatttgctgagtcactgaagcaatagagcatgtgcagagtcccagcctggaggtgggcatatctgggttccagtccctgctctagcccttctcagctgtgtgatcttggacaagttgccatacctctctgagcctcagtgtcatcttctatgtgatgtcgatgcctcccccaaaaggtcgttacgaggaccaaaggagacacgtcagggcaggaaccatcctaggcacgtgtttgatgctcagtaaacgggacgtggtcagtgttcagagttgtgggggtggcaggtgactgctctgtttcacctccactcacagcaacagggcctgtggtgtcacctagacatctcataggcatcccacactgaacatgtcccaaaccagcagctcctccctggatgggtggatggtgtacagggacctcttcctccagctgtcacatggggcatgtacctggcaagtggctttgcagccctagctgcccccttggctgggggcctttgtgcagttcatggactgggagtcacccccatgtctagaccgtcaggaaacccattggcttttcctttagagcataccaagaatcaacttctcagaacatagcaagagttgactttttgtcaccctgccgtggccactcagactgactcctcttacacctcacatcccattgatcagcacagcccctggaaatatgtctagaatccagctgcttctcatcacccccacacctaatacagagggctgagtcatagcatctcttccccggactgttgtagccgtctcctaactcagcttcctgccctgcttttacacacacacacacacacacacacacatggtatcttctcaccactgcagccagacttaaaacctaagagggatcatgtcactccccattttactcagagtcaaggccaagatccttactggggtctgcaggcccccacacctggccctctgactgcacccctaccttccttagctgtctcctctccctagcatgccccaggtcgctggtcccctagcactgggcagctccctgcggccctgttcactagctgtcctctgcctggaacacatctgtcacctctcacctcctcctgtccagcctccttggggcctttctaactgcctccctcctgtggtctgcctcctccccatctctgactttcctcccgagcacttactgccatccagcacccgacataacttacttgtttcgtttgcttgccttcctcaccaggaggtgtgccagatgaggacaaggatttttatatccctacccccatctgcagcactgccatggagaacagtgcctggcacttggatgccctcagtaaatatttgttgagagactaataagtgatcgtgggccagcatgccaacagtgtcttcgttattacaaaattgtcccgaattgaaatttggctactacaagcagtttgtggtggaaatttactcaaattaccaattctttcactgaagaaattacctggcatatgtgggttctcaataaactgtgttggattgcctcaaggctttggggcagtggtagccgtctgaggcctccttgccagtcaaccaaaccctgtgctgggtgggacataagagatgcccccagcatccttagctgatgctactatgtcaccccagaatccctggggcagcccacccctcagcagcagctgtcaccctgctgggttccgcttttcctcctgtgggcttcgtctccctaaggaaatcattgtccttgctttctacatcttatctccctgagcagctccaaaattctgttattcatatcccactgacctttctcattgtcctagtccaagcttctcacaggaggagttgtctctctgttttatattaaaacaaagcggttggactcttaaaactctattcacttttcagattctttggagtcctcaatgcttcctgctatgaaatgctgcgctctggaatgccttccagacccacccccaggatacctgtagccttccctgcagccactctcctcaactccctcctcgttcccaggggtcaatgtcctggatctctccagctttaagttccttcatgtcctcttgccacccctgctctcaccatctctgagttcttgtatccccaggatttcaacctgagtttgcatctcctgacatcacttttcccagccttctcccttttcaaccagcacaaggccatccacttccatggccatagtggacgccactgagcatgctaggtgttttcttctattcaactcatgtggtctgcacaacaacccagtgcggggaatccacccctttcacagatgaggcatctctagctcctggaagtcacctaacttgcctaggacatgcagctagtaagtggcagggctgggattggaacccaagaggccccgccctgaccaccatcctgccctgcctctcctcgggcacccagaatcccctcactctattgtcaaaacccaccttgtcctgcctgtctggtacctaggggagaaccctcagcctcttcttctgctgccacttgcttcctcttctgccaggaaggtcccacgcctggccagcctgctctggagacacgcccactgcctggccttgccaggaggctctgatgctctgcaggcttcctgtcccacggatcccttcctgcctgtcctggggtcccaccaccccactttgtagttggccttgctctttattgtggtgaaaggtgcaggccattccatccaagatcctataatattccttttctctgctgttgaatgttcttcccattccccccacattctcaaagaaggcatgtggctttcttcactgcgtctcggcctgccctgagtccagcccctgctgcctggcccagcctgtcttgttggcatcccctaagccctagccagaaacacaagcacctttcaggtgctccatcctaactccaccctccctcacactggcctctctccctttgccaccagataacagcagtgcattcttttgtttcctttagaacaagatgcagatgttttccagaattttcttcaacttcaggcagtaagttttttggtgaaaggagtattactccctgagtctgtagaaccaggctctctcctcttattctgtagcaattaaagacaaagacaggcaagaaaacaatgaaaagaaacaggagccaggctgatgcaccttcatttagctggtccttgagcatgactcattgatccttcttgcttccatcagggattgcaccctgtgccctctttgaatgcaggggcatgtcaaggccaagggtcaggaagagagctttggcctcgccagcctggtccccagagtggaagtggcagggcaggaggggtgtggcagacagagcacatatcgcccccagccttgcccccagatgttgagtgctgggtgccggagtgcagaggggaacaaggcctggaccctgcctggggagaggcagcacctgggagatctttgtggcttcagatcccatgtggtcctccaggtaaagcagagcatctctggggtctaggctgggggaaaactcttgcaaaaaattcctggttctgggacagaatgcatggggtctgcgtgaggggcagaggacagtgccaggccagtgagcacgcactgggcaaaggaagtggccagagaccactcataagaaaaagtgggacatgaacctcagagcctgggctgctttcagaggagccaagagcctgggaaataagcatcttctggtgaggaaatcagcagggggaggggagggtcatacaggaggggacttttaatcctgaatggccttgcagggcatggttcccctagtgtgccccatggaacccttggctgttagatgtgaggtgataaatggtgtgtggatgcatacacttgggactcagactctgctgcccttagactttcaccctccacagggctgcgtttaaaggtccaagaagccctgcagaagaaaaacctaactattgaaccagcattccctatacgtatttggcccctgattttttcccccgaataacatcattacaatcctatgggattagtgttccatggcagaactttgggaagtgttttttgaagaatttgtaaatccctgcaccctctggactgtgcccatttcttagattgcatggaggctgtgctgtacagtggaaggagtatgggctttagatgggactggcctgtgtttaaatctgctttcccattatacaaaatctctgatcttgatcaagttacttactctctcaaacttagtttccttatctgtaagacaggggatgaaacattagctagttgtcttatgaggctgttgtgatggttaatgggaagataataatgacacttacagagggcttgttatgctccagacaccattctgagcactttatatatctcacttacttttcaccacaactgtgaggcaggtaatgttatccttatcctacaggtcaggtcaggagaccaatgacacatacaggctaaatgttgtgcccaacatcacacggctggtaaatgtgggacctaagatttgaaccctaggcactcatacatgatggggtcaggatttgaaacttgaccgtcatctcccatcagagaacatgctctgaatcagtatgttctaaagggtctagagcagtaaaagcactaattggtatcagttcccttttcagatggttcgtggatatgttagggggattgatggttcctgggactccaagtcattctgcagtcattaaaatcagccctgttgaaagagtaatctcctcgatctgcttgcccactcagatgctcccattgtgaccattttgtttgctctgctgcctcatcctgggccacttcaatttgggtggctgctcagcgttcaggtggagtcgggccactttccacagccatctcatctgtggcctgtgcctccacttccaggaccaagagtccccccaggatgcccagtgagttggtagcttgttctctttctacacctcagtgatggacttgacaaagggttaagaagacatcccttttatcattcagcaaactgagtgcctttactgagctagatgcatgccctgggggaactagcactgtttggtgacttagttagacctctgaatccctctaccaaccctcagtagctgtctgggagactgggattctgtggactctcctctatcaacgatattgggggtcttttccacaaagaccagcctggttttgattgacaaagtgcctcagatttacaaatcttaccccttgcaggatcctctcaactgatcaagccccatagctccaaatgccgtctccttgattgatgtttaatttggggatccacaagcatctagagctaccagttgaatttgggtacccaagggccacaaatgggcccccctcacaccctgacccctgacaaccagcacctttgagactgaagtaccactgcatatagtgctgtcctctgctcagggcattctccctaccagccaggccacccggcaaacccctgcaacacctcataagacctcttcgctggtctcatctccttttattaacacctcctcagcacccctccacacacacccaagcccacaagcaaatcattttttcatctgttttgctcttgtaccttacctatgctccactaatacaaaaaaagcacgccttcctcaagacacttgactgccacctgctggagagttgtcatcatggctcaacaaatatctgccacttctaaacccccaggcacctctggagtagggcagtgcattgcttgtacagctgtaaacatggcctgcctgttgaattggtcatgctgtcatgtacttattaaaacactcgtctttctaactggactgaggacatcttgaacgtaaggactgccgatttctgtcttcgtccccattgtggcttctgctaggggctagagaaatgcttattgaatgatccttgtgcaaacacctgttaccttaggttcagggcatctgctgtcattcagtgaaggtcttctaaatctgtctgttgcaaagcaaggctcgccacaggctgtcagagtaaccatggaggtcggacaggacttgcagtggggacagggccccatcagcctctcacctctgctcagaggcaccaccctctgaacagatcagagcataaacaggtcagagcaattcagcattcattccctctacagacatcagggcaggcaccatgtagtggagagtggggccaggggccatctgccatggctgtttgggctggggaaggagagcagtacttctggagcatgtgctgtgctcagggccagctccctgtaggtaggttgtgggaatgcagaggtggcaactcaagcacccctgctggggattcagagttttgtggagaagtagatcagtaagcacatggataccagatagggttgtcaaggatgttgattcactgttgtccctattttcctaagctcgccacatcatggaaggctgctacccaagtgacattcttgggcttcaccaagtgttttaacagagctccacccagctgtcacactaggggtaacacagtgggccagaaggagaggcaggccttccctggggtcccattttaaaaagggggaagtcctctgttcttttacaacacttgtttaccccaagccattcagcatagtattacttaggtcccatacagagaaccttccaacagatagctctccttgctcaggcctgtcctgatgaactccctgatattcttccaggtcttaaaagagtgagagctgagcatttccctctctgccctggctgccaggaagctcagagataacttgtttgctcagttcctgtagctttcctgacccaggacttctttttcttataaattctccttgttccttttccaggaatgcttgctttttatgttttgtttgtttatgttgcttttgtctctgtattatactttggggggtggtttttggaggcaggattggcagcagccatggtagttagaagcaccagcagtaaagctggacacacctgggtttcatccccacttgctagctgtgtcattttaagtaagataagttgcctcttcagttctcggttcctcaccttgaaaattgggataatgatcataatgaatggataggttattgtgaaaattaaacttgtttattgtaaatgcattgtttcctgttcctgctcttggatcaggcttgatctgtggctgtagaatcctagtcttaatttccttcttcctgcctgtgtctgtcagcatatgatgagttgtacaatagtagtgactaggggaccaaccatcccggtttgtctgggacggaggggtttcctgggatgcaggactttcagtgctgaatgggaaggtcccaggcaaatggatgagtcggtcaccctggtaataaacaacctcaacatctcagtggcttactgtagcaaaggtttatttcttcgttgtgctactgtccatccagggccttggctaaaggaggagcctctatcccaggaaattgacagtcatgggcacagacagaggaacacatgttaaaggtcctttagaaagttgtggctgtcacttctgccctcattcactggttggggccagtcacatggccaggcctgccaccaggctgtgcagaaccttcccactgggtgggacagctcagcctggaacactgatccactctgccaggctcacctttctcttcttttgcattttagggtgctggagcagggaccagggaaaggagagagtcacttggtctgaactgggggtcttggatgtgatcatcttcctgtagatggtcggtatgggtttcttaaggggcagggttcagcttcaccctgctctgctcagaggagcagctgtgtctcctttggacgccttctagtggttgatgccctcacctttctcagctgccaaggcctctctcgacagggcaggctgggctgtgacttctcttccaccctccttgctccttcctgtggagcccctgagatcctttccccatgctcctgggtggaatggagggtgccctctcacattcttccaaggcatcttgcgcaagtccctccatgccctgctttctctggcggtccagcatgcctccatctcacctttgggactctctagcttggaagtgggcacacctgcagcccctgactccaggaccacaggctaggctctccccaaagcatcctcatcacacaccatgtggatggccaggtcagggcggccgtcagagcccaccctcggcaaggataccctctcaaaggcacctctgttggctcaaatcccttttggaagtagcccagaaagaggctttcttttttcttatcttttgttgttttatttattgttcttgcatctaagaacaccttcttggtcagaaaacagttttccagaaataatgttaagtaagtgtcacaactggtttagctccctaacctggtctaagcatataagagaggcttttgaggctgggcgtggtggctcatgcccataatcccaatactttgggaggccgagatggagggattgcttgagtccaggagtctgggcagcatagtgagaccttgtctcttctaaaaataaaaaattagctacgtatggtggcacatgcctgtagtcccagctacttgggaggctgaggtgggaagatcacttgaggccaggagttctaggttgcagtgagctatgatcacaccactgcaccctaacctgggcaacagagtgagaccctgtctcaaaaaaaataaaaaaggctttttgatttttgttttgcagaagtaccaaaatctatattagcatttattatttttatttctataaagtaaatttgagtattgggaaaattgatcaaaatgagaaatttcatatggagtttagtacttgaaatttggatccttcatctaaatttcagggaagtcagggctgggcatggtggctcacacctgtaatctcagcattttgagaggccgagatgggcggattgcttgagcccaggactttgagaccagcctgggcaacaatgcaaagcctcctctctacaaaaaatataaaaacaagccagacatggtagtggtgcatacctgtagtcccagctacatgacaaactgaggcaggaggatagtttgagcccaggagatggagattgcagtgagccgagatcatgccattgcactccagcctgggcgacagagcaagactgtctcaaaaaataattaaataagtaagtaaatttcagggaactcagagaacgagaaaggacatgaaattgttcatttatttagcatttgttgagtaccacctggagtgaggcacgagatcaggcacaggagacgcctataaataaggccctacctgcctgaagcttatgggaggtggaggagacacgcctacaagcagagaatggtcacagggcgtgaaggagcctgggcaggagctgctgcaggagagccagggagagaggatacagctctgaaggcttctccaggaggtgtgcccacgggcacaggaaaggaaagcaggagtttatcaggtgactgggtggttgaaaggagccacacctgcaagaaacgtgggcccagcagaggcagggtggttttgggaactcttgtcttttagtctgtcggggggctttgggtagcagatgggagggttgggctgaagactaagcagtgtttcctgctgggtgggtttgaactttgtttggaagacttagggggaacagtgaagctattgcagtggtctgagcaagggggtatcccgcctctgaccacagtggagaggggatggggctggagacgacagcagactgaacagaggcagtgacaaggatctggagggaagtggctgggcccatcccttagagggctgtgtgggggctgtggggtgtgggaggaagagaggaaggaagcccagggtaggttctgggttgctaatttgggggctgggaggatagcgtgtgacctaaacagagaatcagatttagatggaattacctatattaagcctggggatttcatatctatttgctgctgctttaccagttgaggctcaagaatgagaagcacaaaatttctggtcacattatttgcatgtgcccagactggggttaacagaatcggacagtgagcgttcctgaatcagactgcaatggggaatgaatgccttgggaggctggaagcagttgtattcgcagatattcatttggagatctctatagcgatcgaggcaaagataccccaaagactgcaagaattagccagtggaatttgaaatgccaaaattttttttcagaaaggtcaggaaagccccgtttaaaatctaaattttgccatctcaaggcagtgcagggatggattaggaggatgtggggtgacccttttcttcctttcagagccagtttctgccagacacaggaatcctccacatgagtcatagggtggagaggagacccctcagtcctttcagtaaggtgggagggcagtaccgcccggtggctaccatgaaccctgtttcagaatttctttcttaacttcgtgtgtgcccaggtgcacttgagattcactgatgttttctttagaccgaggagctcgcttcagcagttagtttcaggtgttggctctgctggcattatgcttcggcttaatgttttctgaagacttgttttctgttgtttttcattgttcttgttgtctggcttcaggccactaccttcaacctagcaagagctgagtggtgccttcagcagtgaggtagcttctgaaggccaccactctcttgctgtgtgactttggctagtttctccacctctctgtgcctcagtctcttctgtaaaacggagaacacaggagtatctccctcatagagttactttcaggtttcaatgagttaatctacataaaacaataaggatagagcctgacacaaaatcacactcaacaagttttcacaattatgattacttgacccagtaggagaaataaaaaacacaactaacttccttctaaggacatgcccaagaatccagttttagtaactttgaaggcattgtttttcaccgaaaatatctcctgccagattttttcatgtgtttgcagcttagctttaacaaggagctgaaggacggccaggcagcaaggggtggtgagtgccggtagagtgtgacgagctcgcccagccttcctccctgtaattaggagtcatgaaccatctacaccatctcccttagctaataagagatttttacatttacttacctcaaagtgacctgtctgggttttcttttcttgtggcccccactgtaggtttttggaagaagctgaccgcctgaaaagaaattataaaacatgaaaatcgctttgaggtgaccaagtccagaggcccctaactcctcccaagctggatctggggtgtaagaactgtgacttcaggtaacaaagtagtatcccctccctgccccctgtgaactcatgattcttggtagcttgcatggcagttcttcctttaggaagtgtagtttcttccaggaactctgaaacttggggtattctacctcatgcggttgtttggctggtcaaaaaagggagtgggggattctggaggtacttcatgtctgctgcatggcccaagggggccagggctccataaatcaccaagaccctgagggcagggctctgtactcattcctggccctgcttctgtaaatgttaatgacaaaataacaatgtcacccacccaacagggtctttaatatgattaaataatcatgaaatacttcttgaaggataaatcagagagaatagctaggaaatttccaaaaataaagagcagtaggagagtatttgttctgctagctattaaaatgtattctaaagcacagttgtaaaaacagtatagtactgtgatggaaataactagatcagaggaacagagtagagagtccagaaataggtgataaatcaataaaggtgtatttcaagttagtggcaatgggatgcatggactagcaaatggtgttagaaaaaatctcctatccattagagggaaataagaaattcctaagcttaggtagtatatcaaaataatttccaaatagcattaaattaaaaaaatcattaaaatcttagaaaaaagaatatttatattattttgggtaagaaaagacttaaaacatgtcacttttggtcccacatacaaatatcgtaaacaaagttaaaaagcaaaagggtgggaaaagtgtttacaacatcaatgatgaacaaagaattaatattcttagtatacaaatttattcgttcattcaatatttattgagcacttagtatgtactagaaagtattctgggcactaagggcacaagcagtaaataatgttcctgttctcctggtacttagaccctgatggagaggactgccagtgactatggtagattattgtaggtcacattttgataagggctaaggacaaaacattacgtaggtggctgggctagggaggcttggcagggtttgcattatgtggatattcaagggggcttcactgatggaatgacatgtgaagaaaaagggaaagtcattgaatgtcgagctgatagcacatttgctgtttttggaatgtcgagctcataggatttgctgatggattgaatgcgggttgtgaaagaaaggagtcagggtggcttctaggtttggggcctggcaaccagaaggattgacataggaatgactgagaggcttggcttggagatagagttttggttatggatgtttcagtttaacatctctcttgtatattcaagtgaggacgtcagggaggtggtcggccataaatatctgtaattcagggtgacatctaggctggagatataaatttgggaattgttgcagtgttgatagtatttgaaagaatgacactagctagagcccctggagagtgtgtgtagatacagaagagggcccaggacatccatgggaccctcccttagagttgagggagatggagccagctaaagagagcaaaaaggagtgaccactgaaatggaaggagtcccgtgagaagggggatctcccaagccaagagacagtgagaagggcgaggtcagctctcctctggatgtgctgatgggcaaggagagaactggccattggatctagcagtgaggaggtcactggtcaacccaacaagggctgttttatgggaatgatggggagagaatctgtttggagttggattattgagaataagaggaaaaaaactggagacagagaaatgggacaatagctggaggaggatggtattcaagtaagtttatttttcccaagatgggagttacataactcttgttttcacccaagtggaaatgattcagtagcgtggggagagtggatggtgcaggattgggctggggtgagggttctgaaatggtggtctcgaggaggtgggagaggtagaatccaggcatgagctggggaagggatcctaagtaggagcatctaaggaggtggtaggtgtgcacctgcctcttttctcagttcactaagaagcagagtcctcagcggagaatggagactaaggagacgatggaagtttgaggagagagggcaaagtatgaagtccttcatagcagaatgagaaaataaatggccaggggaatgaaggattgctgggcggcatgcaggcctctaaggggtatgtttctccagccatgtcctgttacacaggtgaacacggggtaggaggccattgtggtagaaaaacaggacatgagcagacacaacgtaagacagagaaacgcctgtaaagagaaaaagcaacatcagtaatagctgaagaatacaagtaaaaacaatgaggttttctttttttctctttagactggcaagagctcttgttggggatagaaattattgtcgcttttctggagcacagtgttacagtatgttccagaatacaacgtgtgtcccgttttgacctgtcagtcccacctttagaaatttattctaagaaataattgctcaaatgcaaggaaatatatgcacaaagatgttcaccccagcagtgcttatcaaagtgaaaaaatggcagtcatctaaacaggaggcagctggttcacttatctgtcggcctaacagtgatagtgggaaacagtagctcacactcaccctcctgttttgcagatgagggaagttgggtccagagaggggtagtgacagctccagtcctactccacggagctcagaccccctggctgtaggcaggcaccctgcccaacctcttcaactgggcttggagtcagagtcccttgcaaggcacttgtcaagcccttttcaagggccggtttgcttaatgcttttaaaatacgagttctcaaaatgttttgcaaatttgtttacaatgtcttcatttcatctcatggctttccttgcaaaggatgctgacagtggggggaaaacaggccgactgcctggccgtgatagaggggaccatattttcctgattcccaagtaagacttacagtggaagaaaggatattttctgctttcttacagtgtttacaaaagtcataacaggatgtgaggactatctggctgcaacatctgtcaccccattggtcgccagagttgattgggctgatctggctggttaggcaggtgtcccattcctccctcaccactccatgtgcgtccctcccaaagctgtatgctcagaaaggatgaccatccccgatagaggaggactggtctttggtcaagggtatatgagtagctgcaatcttctgctagggacccccaaacaagctctcaaaagtcataacaggagtacaaagataataaggaacttgcatttatttgtttccttgatcatatgtttattgattagaagaaaataaaattagcagccagccgtggtggctcacacttgaaatctcagcactttgggaggctgagacgggcagatctcttgaggtccagagttcaagaccagcctggccaacatggtgaaaccccatctctactaaaaatacaaatattagccaggtgtggtggtgtatgcctttagtcccagcttcccagcgttttggatggctgaggcacgagagtcacttgaacctgggaggtggaggtggtagtgagctgagattgcaccactgcactccagcctgggtgacagagtgagactttgtctcaaaacaaataaaaaataaaaataaaataaaattagctttgtgtgtggagaaaagggaggaaaaataattagcattgtcagagaacatctgggttatttggtcccctccgtgggaactgccctgggttttcacttctagagtttctggttctggtttaatttttccacgccacagcacagggaccgagaagctgctcagcttctctaggcttttatgtcttcaccagaaaaatgagcgggtgggcttaaatttcctacaaaaactcttaaaataaatatgatgctctttccattctatcacatgcctgttctgggtccgggggtgtgagagatgcattagtgctgctgtaaaccagccccgggtctccccccccggccccccaccaccaaacccccaagcaccaacctgggttctccaccacttttgagagctcatcgaaataaacacacctttgtgcctcttgtaacaattccagatcatccaatggcagaccagagaatggacatttcttcaaccatcagtgatttcatgtccccgggccccaccgacctgctttccagctctcttggtaccagtggtgtggattgcaaccgcaaacggaaaggcagctccactgactaccagtaaggcctttggggcatgtcttcctcttgttaaacttggtgtcagttctcgggcatggaacatctagcagccagctactgtttcatcctggaaaaggggatgggaataaaaaacccaactctaggtggcgacacagttggtttttggctttaccttcccctagtttgtaagcaagaaggagccttcagcagtgctgaggcatttaacttccacttcctgtccccaaaatgttctacacccagagaaaaagaacagccttaaggccaagttctgtcttttacccctttcttcgtcttctttctttgctcctttgagcaagagggttaagtctatgggtgtcatctcagggggttcaaagagagctttgcctgagggcctctctgaggaagacagcaagtgtcaggtgcttaatgaatgtttatggaaggaatgagtggaggtcctctctgaaaacaatttaggaacattgatgttgtccttaaacattatttaaattagtatgaacttgttatattaaatagtatttttgtttatttttagacttgttgacttttcgtttgagtaagtaaattttcacacttacagtcatcccttctatatatgtacaaacacctagggaataaggcagtgtagaatattcaaaggcacattttgttttgccgaagcacctgcgtggaatcttacccaaatgtccatttaagaggttttcttttgtttaatgagggaaaatctccgaggaggtataccccctacagcagatgtcctttctgctgaagttcacaggtcgaatttggggagcacaatggctggaggtcagatgcccactaggagatgctatgattaatatgtaagttatcccagatgattaagacagccaacacccaggggctggagagtgggtatgagggctgtgagggcgttcttccatagcagtaactccccagcagaaagactgcgagatgttggccacaaaccctttgtcttgagcaagcgctaagggagccactgatgtgttctaaggcctctgtcatctggacctgtgggttccagcctggtcaccacccaagatttcccttgtggactctggtttgctaatcttctgtaattcatggagactcaattaattaagcaaccttaatccctttcactatcattttaatgtaactgaagtcatctgtgactgtcaggcagagctttttctcacctgagattatcacctggcctcaaggaacagatagaattctagacaaaagggagaggggagtttttgtccttccgtgcggcctgcgtgatctctgaactttagaactagctggggaaactctctgcctgtgaggaaccccagggcgtctaattgggaacactgttctagaatgcccatgatatgatccagtgctcctagaaacagctatttttgcccttgggattacattgtttgaagggccatgctctctcctttcctgtgggataaaggaaaaaggagagaggcccagctggcagtccatgccctcctgataaatgtatggattggagaaggcggtgagggggatttggaactccttcctctggggatttcagtctgttttcttctactgaaccacaggatgcaacgaaacttggttttctgaagtctgtgaaagggagggagatccttgctgtgaccccaggacttctgtggccctcagccccactacgcccctccatcccaattcctaaaatctaggggttcccacctacctgagaagcagaatatttggcagtagtgcctttgaaaagctgcctggggctctgctcagtactttgttggtactttaattccaccctcctcacttcgtcccttccctgccaaatagatatgtatgcacatttatctttgatgctcaatatgttttgcaaacagaataagcttcatttatccagaatgatggggggggagaatgagaggttatatagatatttcaatcctatggttaactaagcatttttataaacactacatattcccaattttcaaacaatcagaatatggtaaaatatatgttaacacacaaactcttttgagatgataacttttgtttgataacctgagaagctggtccaggttttatagtaagttcaagttaattttcatttgttttacccttattatacatcattaattgatactgtggctgttcgaactttatgattgtttggtttctggataaatgagagccttctgtcttatgataagaagctcttctgtatgtctttattaacatgcagtcacattctcttttgttttttcagagaaagcatggacacagacaaagatgaccctcatggaaggtaccatgaacctagtaatttgaacttcagcatccttatagccattttctttgcactgttacacattctgttacttggggcagcacccatgtcctcaactggagatgagcaaggaggccgtgagcctgtgggcgctcactgtgtccctccaacccccagtccccttgtgtgtctgcagagagatgacaggatcaggcagaagaaaacagcaatgtgtaactttgccattcatctccagagaattatgtttttatcttttgctttttcctccccccaggttagaatatacagaacaccaaggaaggataaaaaatgcaaggtaagcttggaccttattttgtctacaaagcatcctagttctggttgcttagagagcagctgaggaggctctgcatgtttggtcctgtctaagagttctgttgggcactgtcacctccttagggaataggcaggtagtgggccttggccgaggtggccttctgccctccatgctctccatactggctggcctttactctttgctgtctaagcacctttaacctgaagtggatttgaaggtagcagaaatcaatcaaggctcaagtttttccccagtcttcagcagagaacgtcttcctgactggagcgccctccgcaggagacatggctcagtgatttggttcctgggctgggacttgcctctgtcaggggcccctattgcactgcgagttgcaactgaatgcaccacatggggcatgctcggtgtctcgagtagattctctgcctgggtctgtcctgcctccagccacacttgctgacctcttcccattgcgtcctcagttcttctgccgttagtaccaggctgtgttctgaggctgcgtcatgacagactgatacagggggctgcagaaattggctgccctaaggcttcaagctcttccctcggaggccagccttagcaggagctcccatggctctgtatctgcggcagctgcagcaaactacatttccatcgttgctgcacctccttaggaggaccatcaccaatggcaggtgcacatcagtcagtgtcaccctgcctcagcgggaggagtgtgacattcctcagaggaggctcctggggacagatgtagcatctgctgcacctaggtggggacctagttttgatccaaggatgacggcgttggttactgggtgccctagtcagtgaggctgtgactggaaagaattggtgccctgcccaggtcacatggccacacagcgggctcctcacagacctcagggacagcccacggggctctggatgctctgtgctatgaagccaccacctcccttctctttcctttcacccccatttcaaaatccaatttgacaaaggctgagaggaaaagaaacgaggagaaatgaacaattcagtttactctgaagagacaatttttgtagcttttctcctgaattctaaagatgaggtaaacataaaaaaattaatactgacctggcagtgagaccattttcttggagactttagttgaaaagtctaattttaaacattctgcaaattctaaatttgccttgtcagatgaacattgaaaacagttacaactcatttatttttgtcatcttttcttgatgcttggttacattttataagaaatcgtttttcatattgttgttcagggaagctcacagtcagattgaaaagcggcgtcgggataaaatgaacagttttatagatgaattggcttctttggtaccaacatgcaacgcaatgtccaggaaattagataaacttactgtgctaaggatggctgttcagcacatgaaaacattaagaggtgagaccctgggctctattgtcctttatgtccttgcccacaaatgttaccacccttgcctagaatgttcctatccctaaggcagatgtttattacttgcaattatgtagccttcagtagtatgcctttactcttcagcaacagccgtgatgccaaatgaagtgattattgagcttatgtgggttttgacatgcaattttgcagtcacacattctcagagcatagaaactgtgctttgcacgtctctgtatatgcatgtaatcaggctatgtgcctatcagagatgatactgctctgatgtctcacatcttgcctatgtttgtgcctggatcccatccttacaattataacacgcagaaatgtaggtgcacacagtgacacagaaaagtcagttcaaagatgaaaattcatcatggttcctttgaaaagtgagtcatgggttgtgggttctcgcgacattttgttgtcaggaatgaacactgaagatattttcatcttcctggaattttcccgaaccagatccactctttgtgagggaggcagtattttccttcttttctgagtgtggggagggtgagaaaacataggcagaaaagtggaagtgacttatccaaaccacaagagaaatctgaaatatatcaggcattttagtgaatgctgttcctggaattttccatagctagtcttggacttttggaggaaattggaaagtgggcgctcagtcagatctctgacctgcgtggtagaagaattgcgtctttttatatttgcacaaggccaccagaaataagaagtagctggttttgtctgactttagatcattacccaaaaatataaatgttgtatcctgtgctggaagaatggcatttaaaaattcatattagcaaagataacatgggttaaattattataaactaatttctattaaattggaaaaaagtggcaaatctcaagttacagtaaagagcagggatagggatcaataggatggttgcaacacgtcctgtctccttccctccccatggtactttgaattgttacagatccatttccttttattccttcactattctactcgctattctacagactccaaatcatttactgctggcatttttctctgttaagtgattgttctcctgaaaaatgccagattgacagccttttaaacctaagtcttgtcccctttcagtcctgggagtgcgagctgcattgactgaagcaatgcattcctccacattgccacgctcgtttaactcacccctgatgaagagtaactcacattaaatgccttccacaatatatttactcagggcctggaagactgaatggtttcccaagaacatttagagtggtgatttgaaggactaccagacaacccatttaatacagatcttaggaggagggaactctctgaggagcctctaccagtttacttccagagctgccttctttcttagaagcagattgttaaacttccttctattatctcttggttttccctgtaatgagaaaaacaggcttgttaggtctcctgtgggtaacagtgttctctcttccatggaattctctttggcttacaggattctgtccaaagccagatctaggctcatctcagttaaggcctaaacaataaaatttaaataccaggtcatagagactaggccacttacagaaggtttgaggcagcaagttagaatgagacattttctgaatatcaagtataccaattctttctctttttgcccctaaggtgccaccaatccatacacagaagcaaactacaaaccaacttttctatcagacgatgaattgaaacacctcattctcagggtatgttcaattatgggattgttttacaacgtttgtttttataaattttcaagtaagtaccagcatgtgggaatttgatgtttcaacactgagcttttttttttaggcctgcttcctctctcaggtccctccctttatcttattgtttggacaggcttcacatttcttccacaaaaccattctcctcctcttttaacctcgtctagacaaaaatggaaggtctatgccaccgcaatttaaaatcagaagagtcaggatttgttaaaaataagggggatttgagaatcacatttctgcatgaagattttaggaagggactgaaaccaacaacaattgagaatttctcttcacctgatttaaccactagcacaaaaaagtccacctaaatctttacaccaaaatctcatcaaaataacaaaactgtggctcacgcctataatcccagcactttgagaggccaagacgggcagatcacctgaggtcgagtttgagaccagcatggccaacatgttgaaaccctgtctctattaaatatataaaaattagctgggtgtggtggcagatgccttcttgggaggctgagacatgagaattgcttgaacctgggaggtggaggttgcagtaagctgagatcactccactgcactccagcttgggcaacagagtgagactctgtctcaaaaaacaaacaaacttacaaagactagtggtccaaaaaagaaaaataaatgcaagagatatatgctttcacctgcttgacttgagtgctctctctgtcttgctaaatctctgctgggagatggttgaggtggcactatgggaacctgttgtcttccatgaagaattaggtcggcacaaagctctaagttgtgttactaggtaaagtgagattaacttgggaattgaagggaaagaaactggattcagaaacgtgttcttgtagattgtaaacagatgaatagaaaaacgtaactaaaaggaaggatacccgcttccacctcccacaaagtcagggctgaccttacctgcacagccaacagaatcttcctacccatctttgagcagaagtttgcaaagctctagagtagagggtagtccatctggaattttgcatcatcactatccattttcagctctctataagcctggcctgtctgctcactccagcattctctatttatctcctcatgacgtgctatctcaaattggaaagcattcacctgcaaggaccagaagacctgatgaataaatagagtttaatttctcaagtataactggtctggagtaggttatgttgggttgctgcagtggttcaatgaggtcaataggaaccaggttctttgtctttgcactcagccacaccaagctagcatgctagcttgtttccttaatgtagccaggtacctttgccaggtctaagtagccagacccactgtaaaaacaggggtaaatgaagctctagtctggctgtcctttttatcaagaaaggatacaccttcctgaaaactcaacagtggacttcagcttattcaaaagtgtgtcacttggtcacgcctagctgcagggcagggtgcagaaacaagtgtttatagattttccagcctccctggtggagacaggcaagagagaaggggcctgggaatggtgttgggaattggcttccccaacagtgtttgccacacacactttccagagccacatgcatttgctcgattccttccagaagtgactcccacaacccaatatagtgcttcaactgtggtctgattggcctgaggttgaatgggactagtgccttccttgccaaaaaagccatctgattagtactgtatcatttggggcagctgcagtactgcctcctcccccttctctcctgaatatgaattattgttaggtcaggttttttacatcttgtataggtgcttttttgaacttaagataggacttctctttcatttctgtcaaaacctgtttgttgaatggccccacagtccagcttgtcattagtgacccttggaatctttgtgtgacttgtagatccaatacatgcctctgtgcctttcatccttgtttattcataaattcaacaaacatttttgtttacttactagatgcatggcattgttctaggaacatccaaatcaatgataaacactttagggtgggaccaggctcccgatcaagtgagtgatagtcttttggctaccactctcaggacacagttattcaaacacccaactttgcccacctctccatccttttcgtaaagatgtccgtgttctcagagaggatttgctgaggttaaaatatgaccgatgcctgtagcatctcgagagctgccgtcggtgccagcttcatgggcatgtgacctctgcagtttcacaaggccccatgcttggtttaatgccctgtcaccatcttgaaaacgtaatttttgaacaaggatccctgcattttcattttgtactgggccccacaaattatgtaactggtcctgattcccatactggtaacagatctgcagctgtagatgtgataggcctgcctctatgcctttcattcttgcgtattcatgaattcaacaaacccttttgtgtacttactagaggcttggcattgttctaggaacatccaaatcaatgacattttgggctggggtacaggcttgattattttaagaaaaagaatctatgtctttatttcatatatatatatatatatatatatatatatatatatatatgtaaaataattatcaagcagagtcctgtggatggacaaatttaaaaataaataaaacaagctccttttgcagtggcacgtgcttaatcgttttcttgttgctgcttttcttaataattttctatcagatacccatacttaccagggtatggaacaaggattatcatgctatctcagctaaatacttcatgttgggcttgtctcttctactcccttgtttatgcagcactcaagagtgatctctcttgcccgatgaaggttttgtcacctctctagcacgtgtcagtggctgtgaaatactgtccagtcccttatcacttccagggtcccagttccagggacttgcttccacagaaagccaggtctactcagatgatgttcagacagtttggccgcaggagctggacttctgcttttcctcagcaatgcaaaatggacaaactgctttctttactaagtgctttcaaaatatctttaataaagtgtatgtcagggatcagtcaactgtatcagtttacaatgtctacgttagtctacttccccatgttttgaaaactaggcagaccgtaccaaggcctctgtgtcttttattaaccagcaccatcttcccaagagtgaccctgccactggctggcccctgtggctctgtggtgctggtagtgttctcacagcttctgctccttagctgtccttcgggcccggctccttcacagatggtctgctggccagggtgctatggagttggaatgtccagagcctcccctcgctgatgcattcactgctttggaacctgctggctttcctctggagtactgaaatagctttacctgtgttgtcggttcaggcctgaccctgcccagcattacctccagggtgtcacagttcccttctgtccaggtacctttcaagccacattgccacatcaatgaaaagcctcaaaaacacttccatgagatacaagattatctgcaaggcaaacgaggaagtttttaataccctatttgttgacagaatgaggcttccagcagatggtgcttggaaagttacttccccctcactgtcatcccttgcccctgggccagcttagggacctaacttaggaaaggatcctccccagcttccttctggctgagtagcctgccagggtcttaagcaacagtgattctgttcccctctcactcatttcttctgtcccagcacaagtacatgcaccattcttttaccttctggcacattaattcatttcctagttctttgaattaaaccacatcatgaaggcccttttgtggaaaaagagaacagtttctctgtatttttccaaagagcagattaaggaccagtgaataaggtgagaaactagtccactgtgtattagaacgagggagggctgagtcataagagcaagggcatgacagagtggggcacaccctccttgtcaccggaagaccccagcaggagttgagtggttgtatgtctggaaggcagtgggtgggattcacacagcccaagctctcaggcactatagcttgggtatttacctgcttcagtctctttaccaaatgttgtcctatcttaatggctggctttattggaacatttagattttttcctgtatttaaactgaagaaggggtaagaagaatctaagcggggagttttgcttttctgaatgcaaatagtccggccctggatggagggataacatttgagagtagtagttctcagccctatgtacattagaatcacattaacgtggaagtgggatgggtttaaaaataccccagtgatcagccccatgccagaccatcagcataaaaacaaaaacaaaaaacactgctccgaatgttgagaaccactgttttagagagctccctgtacgtggaggttttcaagttgaaggcagatgatggctgagatgttggagaggggattcttgaagagtccttccaaatctcagattctctgactctccatagagttgttattattagagcaatgaaatatgattctctggaccatgataccttcaaaagaacacgtgcaagctgaattctgctttgaaatataacttactttaattggactttcttcctataataattagatgatatgcagaaacacacacacacacacacacacacacacacacacacacaatcttacagttcttcagagacgtttgttttcagcatcctgcactcaggatatcactgaaactgttagtgttcctgtgctttggatgcttagaaagcacatcctctatttgttatcagggtgattacaaattatgtttcctacagtatgagaaattgattatccatttctcctgattaggcagcagatggatttttgtttgtcgtaggatgtgaccgagggaagatactctttgtctcagagtctgtcttcaagatcctcaactacagccaggtattgttcatgctcctgttgatggtgggcagcctcacagcagtcagaagtgtcactcaattttgtcagaataattatagtatacaagtcacatgtgaacttcttccagaaaattcttaacttcttaacagataaattaatttagacttagaacaatcttgtaatatgttccgtattccccccattgaaagatctgactctgatctgatcgatagcattatggctttcttctattgctgcaaaataaatatcccacaatatgtggcaaggacagagggtaagaggctatctgacaagggagaaaggtaggcaggttaacacaataccagagaatacgtcacttggaaatccactccatactgtgtttgcagtgctgtgtcacttcttagctctattgaacctcagtttactctaaaaattaatgataacttataggatcaaataagagtaacatttataaacgcttctagaacagaacttttcacctattatgtcccccagagtttttattcatttattcattcactcacacactggtatttgcatggaagcttggtaggcagaagacttgaagaatcaaaatgacatttatgtaaattagaattaatgtaaatttaatttttccaaagatttctgctctttttagtctcagagcaaagttatggaggaagttgctgttatctctgttaatagacaaggtgactgaagcatatgatatgcgtgacttgcttgagaacagagaggctgaacagcagagctggaatcagagcccacccctatcttctgccttctgaggtcttacaggggaattccaagattgttgccttagaagagcataaactgtttatataattgagggttttcccgtcatgttatcaaaaccaacctccagatgcctccttcctggtgtcaggcaaagtggttggacatatgtacaggttcacataggaaaagtttgaggtctcatgcacaaaaacacaaaggcaacatgcagactgtgcatgcttacttgttgcataattgattttctgcatgcaattgacttgtcatgtttaacatttcatctccccagaatgatctgattggtcagagtttgtttgactacctgcatcctaaagatattgccaaagtcaaggagcagctctcctcctctgacaccgcaccccgggagcggctcatagatgcaaaaagtgagtaccagagaggcctcgcatttcctcagcagcccactcacaggcagccaaccctgagtgagcagagggcgggtgtgtgtgatgggctcagcctttccagtcctacttctctgtcctctttctggggcaccagagctatctttggctaaatggaattatttatgttctttggtcttttacataaaaagaagaaaaaaatctcaatgtccaaatttattgaaaagaagagctatttagactggattctttctgatttttagacttttcttttttctttcagaatctagaaaatcccagttgtatgctcctgagtttaaagggctaagtttgatttgttctcccagaacaaatgggctctatttacctgaattgcacacaggcagcctcataaaagtaagaaaacgtcaactataaatatggtgtttcttcaaccaaagtgttcctccttaggttggctcccccacctggctttcttcttttgcagtagtggaaccaccatccacatcgctccctctgcccccagcttcctgctactgcacacacttctgtgcaaggccccagtagctgtcatctactttagtcctgtgggaggctgtacactcctacagttaagaatgagagaatgaggactctggctgggcgcagtggctcacatctgtaatcccagcacttcgggaggctgaggcaggtggatctcttgaggtcaggggtttgcaaccaacctggccaacatggcaaaaccccgtctctactaataatacaaaaattagacaggtgtggtggtgcgtgcctgtaatccaagctacttgggaggctgaggcaggagagtttcttgaatccaggaggtgggggttgcagtaagctgagattgtaccactgactgcactccagcctgggtaacagagcaagactctgtctcagaaaaaaaaaaaaaaaaaaaaagaatgagaacacaagggagattactgggctcattccggctccaccattcactagctgtgtgaccttgagcaagttacttaacctctctctgtctcagttttctcatttatggaagagtacctatttctttgggttgttgtgaggattgaaagtgttaatgtatataaagcaggcagaacagttcctagcacatagtaagaacagtatcagtgtggcctaatgtcttgctcccaagctgtccacgttaatccctggaaaaaaataccaccagataatctccttcaagtcatctctttcattacagcacaccgcttgttcctaaaagtaaaatgcagactttggtatctgttgttctttatagtctagccttggcttttttaagtgaccttaggagaaaaatatgaatggcatttgggccttgcctttgaggctcttagcatatagtcagagaaatgagacagacagcaccctgcatagtaataggtacagccatagaaatagtgccaggcatagagaacggatgattaattctcatgtgggcgcaaggacaggcatcactgagtagatgacaaccgaggtgggtttgaaaagatgaattaatgtttgccaggtaatgaagggaggaacaaagaggaaacaatctgtgcacaggtgcaggggtgtggagccacatggcttgcttggtgctattggacaaaacgtgcacggaggggaagggctgaaccatgaagaccatttgttctgtggggacacagtgaagagctctgagttgggtggggcaggctcggattggcattctaggggagatcgcagagctggcaatgtgggaggtagatgggatgggaggaagcccagaaggagccctgggcagtggccattcctcggcacacttgctcgtgtgatggccatgggtgtgttttccctcggcttctgtactgacacctagccagtgtttggtaaggaggtgtgctcctcagaatcacctgggagcttttcaacatagtcatgctccacccccagagattctaatttggtttttccagacagcacagtccaataaaaacataatgcaaaccacaaacatgagccacatatataatttcatattttctggtagccagactttaaaaaataaaaataaatgtaaaattaactccaaaatatttcagcatgtaataattataaacaactaataagttcgttcacattcttttatttttctatactgtctttgaaatcctgtgtgtatttaacacttacagcacatttcaattcagaaaagccacatttcaagtgctcagtacctgcatgcagctagtggctaatgcattggacagcacagatctagaatggggtccaggaatctgtaggttgatcatgcatccagggtattctggcctacaagccaggttgagaacttaaggcagtccggctcccaccttgccttcccaatatccatatcctacccatccttcagtgccagcccaagttccttctcctctgggaagcacaggttgtctttgccatttatttggcactaatcatacatcaccctgtcctattattaatcttttcttggtgcacctccatttgccctttgttagccataagcgtctattgggcaagaaccccatactatatttcttttcatccccagagtacctaatccatttatttagtagcacactctgtgatttataaacatttccagactgacaacacacctgtccatgctgcatctgttaaagcctaaacttgggagatatttatctcatgtcatcattataaaacagtgaggcaggcaagaaaaggctttgctcaaggtcacactccccctcctgacagacaacactgctctcagtttatcacattttgtgtattgatttgcagctggacttccagttaaaacagatataacccctgggccatctcgattatgttctggagcacgacgttctttcttctgtaggatgaagtgtaacaggccttcagtaaaggttgaagacaaggacttcccctctacctgctcaaagaaaaaaggtaacaatttaacagtccattaaaaccctgtgacaggtgaagcatgctttctgcagcggagctctcagctgggcgttggttccatggtttctggctggccagagtggcaggtcccaggactgcagacaggaccctgcagtcctccctatgtgtagggcagttgggagcagaggagagagctgaaaagcctgatggcagagatttgtggagaggcctcctctgtttaaattgtgtttcttttaacatgattgaggaagaatactctcagccacaatcctaactgccttatgaacagccaccagtccaccaaaattactctgagctcaccagtgaccttgatgttgttaaatgcgatgaacatttttcctttgtcttccttcttgaagtgttctcttctcctggattccatgaaaccacattcttcttcctcctccccgaccccctgctgctacaggctctcttgctggcccctttgctggctgcccctctctgtcctgggctgcatctctgtctgcagtctctctctgttggtcatgtcatctactccctcagctttaaatgccaacaacttccacattcatatttccagcctagacttgtcttttgaactccagattcataaatatactgcttactaaatcaacctgctttggatatctcaggggagtctccaacaggatacgtgccgaagtaatcacctgagcctctcctccagcataaatggcactgccattcagctggctgctcatgctagaagccggggaggtgccctcacttctgcttcaccaccccactcttcaatcccgttagttatgaagtcctgccacaatgagtcccatctgcaaaagttctctgaaatgtttgtccctttccatgctgcctactttcactcagctccaggctgcccccaactctcaccaggtctcataaagtgtagacccacatgctccccacccccaacacagcagccaggatgatctttttatcagtccccttttaaaaacccttcagtgttccctattgttcttgaagaaaagctcaaaatatttaacgtgaccatgcagcccccgaccctgccactaagcacatgtgagccatgttgacttcctttgatgcctcaagccccttctgggcaatgcttctgcacatgctgtcgcttcctggttggaatttcttccctctccccatgaactcccttcacatggctctctccaacctcagactgccttatgtcttatagcaccctactggtttgctttctagtgctttcttatacttgctgttatatagttatttgtgcgattatttgtttaaagtctgtctcccccactaggctgtaaactccacaagggcatgtctgatttgtttttcactctattccagtaaccagcacagactccacgcttggcagacactccatagtggtttgcttgttggtgaagtctataggtgctccacatttaatgtgtcccaaatcgaactatcttttttctctctctctcttctagtctgttttctttcttctctgagtcagtgaatgacaccagcaaccacccaatccagaaaagttagagtcatcttcatttgtttctttcccttaagcctgatattcacagcaaatcccaacagtttgatctcagaaatttctcctgctttctttctctgctccctctcatcttcactgcactgccatagttcagtcctcctaatctcttgctgtattatagccactggcccctgaatcagccttcctacttctgttttctactgtcttccagttcatacgtcactctgctcctacagcatccaaaccacaatttgattttgctgtttctgcacttaaatacctgtagatgctctccatttcctgccttaaaaagacagaccaacattggttagaaagtaatccaaggcccttttaatcttcctccaacctgcctttccaatttgcccctcactcccagtacctccaatttcacttcaaccacacagagctcttggccagttcctatataggctgtgcctctgtgcctgtgtacgtcatcagcctttatacattctagtccctcagccactgctcatccttcttgatccacctcctctactggttttttgggggagccttcctctccctaggaagagttagatattccttccttggtgtatgtaatgaatgtccatggtataactggccctacttaagcattctgacactggatgacagtttgtttctctttccgtctgcccctttcattagatgcttacttctggagagtgaagccttgatttttttttattttttgactccctacctacatcccatcccaccatcggccgtgtacacctccatggcccaaacctagtgctgacactaaccacgaactttgctttctagcagatcgaaaaagcttctgcacaatccacagcacaggctatttgaaaagctggccacccacaaagatggggctggatgaagacaacgaaccagacaatgaggggtgtaacctcagctgcctcgtcgcaattggacgactgcattctcatgtagttccacaaccagtgaacggggaaatcagggtgaaatctatggaatatgtttctcggcacgcgatagatggaaagtttgtttttgtagaccagaggtaagagtctacatactacccttgagcaatgatggtagaggattttcaaccctgatctaaaaagcagagaagactgggccatcagctggcttttctaagaatgaagaaagaaagaaaaagctgggtgcagtggctcacacctcaaatcccagcactttttgaggccaaggtgggtggatcacttgagcccaggagtttgagactagcctgggcaacgtggcaaaaccctgtctcaactaaaaatacaaaaattagccaggcatggtgacacatacctgtagtcccatctactctggaggctgaagcaggaggatcagctgagcctcgggaggtcaaggctgcagtgagctgtgattgcaccactgcacttccgcctgggcaacagagtgagaccctgtttcaaaaaaaaagagacaaatgatgagagtctctgttaaaaaatgagattcaataggatatcatcataaatacagagatttttctgtcattctttggcatatagagacaattaagtggggtgccttgatgtccatggctaaaagaaaaacagtagggatagcatgctgtctgaatctatggaatgttccagaaccattattgtgattgaaattcttttgaatctaggacttggaagcaattatttagtcctgagctgtccaataaaatactcgttggccatggtagcctcccatgtggctaacggcacagacatagaacatttccatcatcacagaaagtcttgttggacagcgttgatctaatccaacctccttattttatggatgaagaacagaggccagcctggggactggtctcctgtaggattcacaattaattggtaatagacctggaccaaggacccaggtgtcccaaatttactgctgcctactgctttccctcagaatatgcacaggctaataatttttctggctactagagacagccacaacatgctggaaaaagagacagcctcagctgtcttgtggcctcagctgctgcagcttctggcatttggttgtcctgataaaaaggaggcagcaaaaactagaagccttgcactgaggtttagatttataccacattttaatctaattaatgtggttccttttttaaagacagatctcagtctgtcacccaggctagatctagtgcagtggcgagatcttggcttactgtagccttgacctcccgggctcaagcagtcctcccacctcagcctcccaggtagctgtgaccataggcatgtgccaccatacccagctcattgttctgtgtttttggtaaagacagggtttcaccatgttgcccaagctaatcttgaattcctgagctcagacaatctgcccaactcggcctcccaaagtgctgggatgacaggcatgaaccaccatgcccgactggttgcaatttttaaagccccctcagatttgatttcttgtgataatagtccctttacaaaggctttgctctgtttccctctatttttatagccttgattaaattcagatgcctgaaaaaaagagagaaagatccacacagtgagccctctgaaaatccatccagctcttttgcctgcagctttgaccttgctctcataggctgtagcagggtttatccattgcaaagttgcaattaatcatctgaatggctttttcttctttaaatattcctttattcccttttagggcaacagctattttggcatatttaccacaagaacttctaggcacatcgtgttatgaatattttcaccaagatgacataggacatcttgcagaatgtcataggcaaggtaagctaggatgtatgaaagatcttaagttgaaagtgtccccttgcttctagactagtcaacatgaccttccagggaaatctgtccactgaggatgtagagtcagccagcctaggactcttcaggtcagaacatctgtgtgaagaggaagctgatacctgcaggcactgtttatcccccttgtagttgccctgtgctgactgcatggcagtttctgaaagacatctcttgttcagagggttttcccagaccctgtaaagatttagtatggcccagactgatctgattctcttttccattcaagcctgcactacctcctgtgttttctgtcttgactaatgctgtggcttcatgtgcaggctcctgagagagaccaacattgaccccttctttcactgtgtctccaccagatcctgttcattcacctcagacatgcatttccaaaagtctactttttaccacctctgccatcaccctggttcaggccctcgtgcctacttagagacctgtgatagacttctcagggtttctctgatccctctcacccccagttcatcttccatagttatcctatttatccccagatagattgagcctggtaacatcagcctgcttaaaaacctcctgctttagactcaagcccaaatgcttttgacaggcaatcaaatgtgagaccttccaccttctggccccagcccacctcctcagtttcagtccccatccctgcctgcagaggcctgtgctccaggcacactgacctcactggcctctccccaaccagaccctgctgctcctcaggcactgctgggttcttccctccctccttctcttggcaaactcgtgttcatccctcaaggctctgatctcttctccctgtatagccttccctcactactcttcttgagggcaggagtcatagcctgtctcctcttgtatctccagtgcctggcacatgagaagggctcattacatgttacatgaaagaatgaggttgaataggtgagtagcctctgttgatttggatgttcttagaaatgagataagttctatattgcccttgggctttgtgattgagataaagcatgacattttggacagtgccttctcatttgctggtggtcatgttagagctgattccagttagatgtataacatgcagtcagtaattccctagagcctcaattttacagactatggaaaatcatgacagcttcacaaatgaattgaaaggctctgagttagaccctcagaaacaacctatttcctgagtgttgaccactgcagtttccttggcttactaaagagcgatgtcgttggagctcaagtacctttaatattttgtattggatgtcctgtttaatactttggtctgagaaaacaacaatgtccatgttttctttacattttcagttttacagacgagagaaaaaattacaactaattgctataaatttaaaatcaaagatggttcttttatcacactacggagtcgatggttcagtttcatgaacccttggaccaaggaagtagaatatattgtctcaactaacactgttgttttgtaagtacttttcctatatctgaagctccccttgcttcaaacagatgcctagggttcctcatctgggaaatggggtgcaggcaacatccagtatcacatcctttaatgccatcttgctaatacctgtgaagcctcaggactggcagaagctagaaaggattgttaacaaagggacaagcttcaggacttgtaccatgcaggccctggcttatgaaactgctccaggaaatagcaacatttccttccagataaagcagctaacctttgaattccacaggccctgcaccctaggcatccacttgtgctgctgtggaggaaggggttggcaatctatgaaaggctcattcaggcactagctcacactggccttggctgaggatggggaggtctccatacctgtcaggcagggggcccaagcactggcagctggaatgccatctcaaaaggctgctacctgctagatgagcagagggaggtgaaggagcctctctttggccaggcctgctccccacttttccttccccatagtgtccaaaaccccacctatggtaagagctgtgtgaggggccggggctaggtgcactgcaggctggcaggaggaggtgctgtaatgatggcagtaggttactgcagccaccacctctgctgaactgtgtcccacacatattaggaaggcctaggcaggcagtggggccaaaggccaggatgctatccattatattatcaaacagtgagacctgtttacccactcagacagacacttcattttctggcctgtccaggtccagagtggacaccggacaccttggccaagttgaatggtgcacagttctgagcaggcctgactcacgtttccttattgctgggatgttcacagagccaacgtcctggaaggcggggacccaaccttcccacagctcacagcatccccccacagcatggacagcatgctgccctctggagaaggtaactatgtgctgctggggccctggggcttgcccgtgggaaggtgcttgtggtcaaatatcctcccctaaagtattcagggtcccctccattcatattctgtggaacaagggaggcctcgaggggatgatgtgcggatttccccatgaatgcagaggacactgtcatgtcactttctctgttgagccggaatactaggagctcactgctgcacttcccaaagctgctggcccctggaagcccttgagctcgcaaactccctactccccttgtgctttcctcctgtgttggctagtggccatgatgtgaagtgctctttcgtgactgtcactaactcctgtggttggcaggcaggtgtctttcggcaccagggtgtgtaccatacccactgggctcccttctcaggctcagccttggccctgcccctgctgtccacgctggactcatccttcctgggaccatccccacatgcatggctgcagcccccatcgatgactcccacatccacatctcctggcccagtctctctcccgagctccagatctgtctctccaaatgcctcatagacagaaccacctggagtctcagaggcacctgaaattcagaatatcccaagctgattttctgcactcccctacctgattggttgtttaagccagaaacctggctgttgtctctcccccattatatctaaacacggagtcctgaaccttctatctcttaaacttcgtcaccactattgctatttcaccctcctcatctgctgcctggattattgcaaatcacttcgcaactctagtccccctctccccaccccatcctccattgtagttcattctccctgccgtggactttctaataacccagttctcatttgtgccttttctgtgtatcgtcctttggtactcctcattcccttgtggaaactgtccaaattcgttagtacggcatccaagaggcccctcatgatcggattggtacctgctgccccagtttcatctatcatgctctcatcatcatttatgatgaattccttggaggagtctcccaagttttaacctgcctcagtgctcctgcacgtgttggttgctgtgcctggaatgctttctcctccttacctctctgccaagctaattcatattcatctctcaagactcagctcggggttaacttgctccagaagctgcacctggccccagatgagttggttgcctcgtgcttgcctgtcaaacttacaacattttgctttagccattgttcatcttgttggttttcctgttaaactgtgagctccttgagggcagggacttgtctctgtaaccctggcacatacagtggtcttcaataaacgttttttttcagtgcatgaagggaaagaattagatgctgtatgaagggaaaaaactggcctcagatcctagaaggaaacttgagcctttccctgctggaatgccttttcctgacaagctgtagccctaaagtccctcaaggcacaactctgatgttgaactgcaaatggatcatgggataaactggttttactttaatacataatagtatttcttcctcagttttcccctttcctactctcagattcctttgttgtaggtggcccaaagaggacccaccccactgttccagggattccagggggaacccgggctggggcaggaaaaataggccgaatgattgctgaggaaatcatggaaatccacaggcaagtaacaccttctagttcctctgttaaaccagtggttctcaacccagggaaattttttcccccaggcaatattttgcaatgtcaggagacatttttggtcttcacaactgggtgggaggttgctacttaaacatcctgtggatagagaccagggatgctgcttgttaaacatcctacagtaaacaggacagttccctcctccccacccaacaaagaattatccaatccaaaatgttagtagtgcctagattaagaaatcctgccttaaataaagaagctaaaccaaaatagcccagcgctaaagagaattcttgagaagacttaactttcttatggctcaaggagcttctcagtgcggatagatgtacctttactttacaggaatgcaggagtagagctgtgaactatcagagtgatctggaccttaacaaaacattcactttttttcaatcaaagagctgcccaggattagtactagaaaccaagcagatcagctagttattactagctgtcttgggagagacttcctttccatatgaaagagaaggagcttagaagcagtccacctgggtctgagtcctgggcctgtctctctacctggctatgctgagacttacttaacctcttgctctctgttgatttaaaccataaaaagaaagcactatttcccaagaattgtgttaggattgtgagggcactcaggaaagttccaggaacacagcctgacatatagtgagtgcttaaaaattaattaaatctgtctttaagagcagtcgagagggaagcagttatcataagtctgtccaaatttggggaatagagaaggtggtaaccagattcttcagaacgaaacttaatgtaacataagaaaaggaagaaaacactgctgccgctggattctctcaggagaattagaggctggcctgttttccaattggccataaaggggctgttatccccctataggtaacacagctcttttccaaccccacaggattagtgggtgtgacttctgcatcaggaaggagacatgagggtagtgtgcagtgtaatcaggttcaaaccctatactttgcatttgcataccctgtattttgcttgagaccatccaagaacagtatcaaacagtccttgacctcaagaattttaaaatcttttataagtctattttctttatgataacaggaaaaagggagggtgcatgggccaaagcaagcaaaagaggaaagatttgaacttggccttagccagggtttgcaataagagtggatgttccctctagaaaagccagggctattcttgagtgggcatgtgagtggcaaattcagggtcaagaaacaagctacctaactgggcaggctttgtgtaggaaggagacacagagctatgataggcgattaagaaacacaagaaatgatactgtgcagtttggaagaaacctgtaagaccccatttgttgtaggatgctgaacaagcatccaaagtcttgtgttacgctttgtggaagttgcattggaatagggagagatgaaggtgggcatgtttgacaactcaggaatgaggccttatcctacagagatgacactgccaaaagagaaatcaatcatctaaggtctagcgtttgaagatgaaatcaggaatgatgaaacagcaattccaagatgagaaacctgggaaaatagtggtttcatagacataagtagagaaaggtgggggacactcagcaatttttccgtaagcaattagcagccgtttgtgcatgctgagaatacatgatatgtagttgtaaactgccgttaagaagcttctaatccagaaagaaaacttgttcactcataaatctagagaactaggcagtacaagaaccaaaagacttctgggtggtggaggagtggtctctgggtcacccaaaagctacattcatccatgtaggagctgagagtcctgtggttacacaactgccatcacactctccctaaactgtagctgcaatgccaagtgatggattctttcctgaggtccttcagcctgacaagtatttaggtggatttacagttctaagtcttcccttctataaatcttctgagagatatgctagataagaaaggcctggacccatttttcatcaaccactgccttcgaaggctgcttttcctgtcactactactaggctaccttttagaccctggtgccgtccatgtcctaagagtattcactagctaaacagtgtttgtggagaaggggacaaattgttttctgtggatcaaagatggaggttgatcttagaagttctcctccaattcacctggattctgtgaggaaataaaactggccacttacttgaaattcaccaactgaatgcaaactccaatccaagggctttgtcagtgagatgcttgactctagggactgcattctagatcaggtgcctgtagaacaaatccagcttgtcatctgtttttgtaaataaagttttattggaacacagccacaccgattcgtatctgtggctgctttcaagctgcagaggcagagttgagcatttgtgacaagacaccatatggcctagagagcctactatctggccccttacagaaaaagcttgccaaaccctaatctagatcttcatcccctttctcacctttaccccttaacaaagcacatacactccactgaaaaaagaaaaggcagtgtaattctcttttctgacaggataagagggtcatcgccttctagctgtggctccagcccattgaacatcacgagtacgcctccccctgatgcctcttctccaggaggcaagaaggtaagactgatgattcttagcctaagctagagaacctcttgcccaagatctgaaatgttgggggtgggagtatggaattgcaactgcgattgctgaaacaatttggactacttcctccttgaagtaaatgcatctgtgtgaggctggatacaaagcatactggtagggctagggaggcttgctgacatcctcagaggctttcttccatgtgagtggaagaagggagaaagaataaggaatggggaactgtcagttcatttaattgagggagcaattcaagagttcccatgagggaaagattattgagtacctcacatagaaaagtttctcattttctgccaggaattttcaagggagaaaatattagtgtctagggcaggcaatggaaacagcaatgccaccagcagtgctttggaaatcaagccatgctttatagctgcagaatacttggggatctgctgcctgggggttccattggtgtgacagcattggatccaagcagtggatcaatcaccagccctcatgaagagcttgctataagactacactataaataggtttaggaaccagtcatttgttttcatctttgctggagaacttataagcctaggcccatcttaatcgtaaattataaatctgtttatattgcctgatgccagtagagcttaggacagtttaaaggccatcattttggacacaatggcttcctttccccatctcctaaaacagagagagagaatatcaggaatttccataggcaggactcctagggcacaaaccatcaaaagcagggcaaggattttcaaaactgagctcctcggaggtttgttcaggttaccaagagctgtggtgttaccaggtgggatgggcgtggggatagttgctaaggagagagggtaagagtagaaatcctgcttctacaagggcagcaatacttcttttttatacaggaatcttctgcaaacatttctatttgaaaaagcgttttgctccccccaaaaaaggttgaaagttaacaaattaatgggtaagactacaaagtaagacctgggttcgaagcttggccttgccatgtgctagttatgtgaacttgtacaactttcaagccctagttttctttataatggagctaataatggttagggtagccagcatctttgcacgaggtcctactgtgagataatatatgtgaaagtgcttggcccaaaataccactgacagatgaagtctgagcttggtgtcccgtgacccccgcccccctgcccacaacacacacactgcttgccagctgtcttcttagctgttcttctgttatacctccaggtccttcctgcatattggatccaccatcttcttagggtggtcttccagtctctgcttcttaagttaacttttaggcacttgacttgactcctggtattaccaaggattctacttcttggttttgaaaggttatcagtccagtataggcttaaatattactcaaagaactttcatatacattgtctcatctcaccttcacaacattatagtgacaagatccaggctcctcagcgttcgttttataagtatggcccccaggctacaatcctgggctcatggcttccaattcttttcacatcaacaactaccagaaatcaaaagctgtgctctgcatcataaagccccagctatttttgaggcacttatgaaaattctcccttttctttgagaagaatggattataaaatggatctgtgagaagaaatttggatgtgttctcacgagatgagtcctgggcagcaggacttataagaaaagcagcttaaacaagacagttaaaactgacagcagtattaaatggtgcaccatacccagccctttccagtcactttcaaatttggaaggtccaaaaatgaaccatttagcctgcagttgtttgtcaggatcaagctaaaaaggaagcctaagtgagcctccataggtcgcaagagagtacagacatccagaagcactaaggaaaattcagataaagcagcagttctacaaatgtcatctgcagtctttttccagaaagagagggggcacaagatccttttaagggtctgcaaggttaaagctattttcttaataacattaaaacgttaattttttccctgtattgataatgtgcactattcatactaaaagcacggttgggtaaaattgctggcattttacaaaaatcagacaagtggcaccaaactatactagtagtcattgtattcttcaccaccacacactcacagtaaaaaaatagtttaaagccagtttcatttaagattgtccatcatggctaggtgcagtggctcacccctgtaatctcagcactctgggaagctgaggcaggcaaactgcttgagtccagcagttccaggcaagtctgggcaacatagagaaatcccatctctactaaaaaatacaaaaaaaattatccaggtgtggtggtgtacctgtaatcccagctactccggggactgaggtgggagaatcacctgagcccaggaggttgaggctgcagtgagctgagattgtgccactgtactccagcctgggcaaccagagtgagaccctatcaaggagggaaggaggaaaggaaggaagggagtgagggagggagggaaaatgtccatcattacttttataaaattctcaagcacacatctttttaatgctctgtgacaaaatgagaagtacacagaacttgtgctgcataccaaagtatgatgtttgtctcaaaaactacttgtgtgattaagttgtgagttgaactagctactattttcattggacaccatttttattgtatatggtcattcggttttgggtatttagaatactttttttttggaaatgaatgaagtgaacctgtcactttaaggaaaatgactgacatttgttgccaatgataaaatctgagctttcaagcaaaaattggaatttttagaaaacttgtctctgctactttgaccttgagatcttcctaaaacttaaaaaatgttgttgatgagatagggagtattaataatagtgatattttgatgctctataatgaaatgtgtcaatatatagaagatctgcataactcagtgaaccaatattttgtaactaaacaatgcaaggtatttcaaaatcatgtaagggtaaaagatccatcctaagtgccaagatataaagagtacaaaacattcattgatatggtttcagattccacattgcaactcacctttaagaaacttctacgtgtcaagttttgaagtggtatcaaaaaagaatacaattatttgaaaagtctattaaaatatgcctcccttttccaactacttatctgtgggaggttggatttccttcatatacttgaatcacaagacgtatctaaatagactgaatggaaaaacatatatgagaatccagttgaaaattattaagccagacattagatttgcaaaaatgtaagataatactctgcctggtaattttttgttactgttttagaaaatagttatttttcattaaaatactattcattatttatgttaacatgtagcgggtttattacatttaagaaatctattagttttaatttcaaatacagtaaatattgataaatacagcctacataagcaaaagttctttggagtcctcaatgatttttttaagagtgtaaaagggtccctagaccaaaacgttgctgtggaaataaagtaagttataatgccacctgctggcaaagcctgaaatcattgctgctcctgaaagcagcagctaccaaactgtttcctcacgtatatccagataggtctcaaagaatgctcttctttgagactcagccaggggaaggcagctggggtgagtgggggagattttgagacagagttctcttactgagtagtagtaataatcctccccagtagcctgtcttaacttaaaccacaggttactgaagttggcacctgtagtataagagatttacttctgttttcttcatttgactccttgagctgtgtctcttcacagcttgttaactccactttttcttcttcagaaatatctgtcactataagatgttttattcccttataggggaaacgtctagctgggctcattgaagtttaggcattggtcctaaagaaatatgtgggcatcatgattccaggcagttgaatgctcttgggattttattcagcctttaagttgcctctgtgggctcactaaaatggagagaaaagaatagttcgggggagaggttttttcttactctgaccatgtctgtctaacagttccttgtttgaaatcatccaatagaaaactgaagccatttgaagcttctccccaccccaccccatgcttcattttccttttggcattgctcataatactgattcaaacttcacacttccctccttttgtttgtagattttaaatggagggactccagacattccttccagtggcctactatcaggccaggctcaggagaacccaggttatccatattctgatagttcttctattcttggtaagtggcatcattattcgtttccattgcaatgagcttgcaaaacatcttacataaagtcaattttaagaactgaactgtgtgaaacaagctaatcctagataaatttgataggaacagaataaaagtttaaaatttgtttaaatctctaaaaagttgaccagtatttgagttttggtggaggtccaagtttgtgcctggaactcaagaggaggctacagctacctagacataggctttctcccatgtggggcataatctcttcagagagagaaggctaatgaaggttcagagataatgcctagaagggtgattagtaagcatatcagaaggtattaaaagtcattaagtgaaaagagtttgcttttcccatcacatccatctttttctcccctgggctttctagatctgtttttttcctaaactctcccttcctatttgcctttctttttgtaactcctcttaactggttacatcagattattaaaataagcttgactcaaatatttttaacatttactaaattttaagcgctttgtacttatttctaaaatgatcatttgattccttagagctgtctcttcacaacgtaaccccacttatttcttacgtatttttaaaaaattggttctttcctctaaaaaacagcgatataaaaaaagatagccatgcagcccaaaaagcagcatctcaccctaccattaaatgtaactttcttattaaaaatgtgcttaggaattgcttacttaatctgaagatgctttaaaaaagaaatcactgaccagtctttatctcctcccacaggtgagaacccccacataggtatagacatgattgacaacgaccaaggatcaagtagtcccagtaatgatgaggcagcaatggctgtcatcatgagcctcttggaagcagatgctggactgggtggccctgttgactttagtgacttgccatggccgctgtaaacactacatgttgctttggcaacagctatagtatcaaagtgcattactggtggagttttacagtctgtgaagcttactggataaggagagaatagcttttatgtactgacttcataaaagccatctcagagccattgatacaagtcaatcttactatatgtaacttcagacaaagtggaactaagcctgctccagtgtttcctcatcattgattattgggctagctgtggatagcttgcattaattgtatattttggattctgtttgtgttgaattttttaatcattgtgcacagaagcatcattggtagcttttatatgcaaatggtcatttcagatgtatggtgtttttacactacaaagaagtcccccatgtggatatttcttatactaattgtatcataaagccgtttattcttccttgtaagaatcctttactataaatatgggttaaagtataatgtactagacagttaaatatttttaataaatgtttcccttgttcta

SEQ ID NO: 15453 - DNA, 109352 bp, Homo sapiens
gacggaggtgcctgtttacccgcgccggactcaccgccgccgccgccgcgggatccgagtgcgggcgcgggcgcgggcgctcccggcgagccacggtgagtgtcaggccggcggcggccagcgacgcgatcccgcgcaccccgtcgggggccgttagcaccctcgcgggcgctgcgcccctgccgccgccccgggggcaacccggccgccgaagaaccctgcccgacgtgcccgctgccggccttaaagggcccgtgaccgctccctgcccccacccgggccgtggggaggctgcgccccttaaaggcgccgcgcccgtccgcccccatcctcctcgcgggggctgccgctgcgggctagggcaggcagaggtgctgcaggagcccttaaaggggccgggaaagtgttcgctggagtacccaccgcccttccgcgggcatcgctacctggcggggggagggggcagctagctgcctcttaaagggatagctctgcccttgggggcagtgactcggccgaagaggactcctagatgtgtccccgggagcttcggggatccccgaggggaccatgcctggtggctgcccctcaagggcgttgggcgaacggtgccgcgtctgcccttcctccccgcttcacttccctttcgggagcccgcgaggctgggtgggggcggggagggcgtctccgtcgggcttggggagtccaagtccgcccgccccttcggccctgtagccagggctggcgctgcacccgggaatccccggccggcacggggccgaccccagcctgcgaactttcgtggggcctgtgccgtccaggtcctgggcggccctcaaggatgccccgtgggtctgcgggcaggtgcgcgtcggcctggggatgtcgcccggagcccgggtgcgggccggccttggagtcccagagctccgcggagggcgcagcgagcctggctccagctccgggtttgacagatgtcagggaagaaaaggttcccgctcggctattgccgggcgttgacatcccagagagcttcccgtttgcttggaagaagacgaggaaggtagaggtgaacgtcgaccttgtggggcgcatgttagcctccccgaggggtcgcgagagccggcagcggggtgagctcaggtgcccgccggcaggagctggggagggaaggggagtgctggacaccggcgcctgctgtcaagttctcgccggccggtgagagacccgctgccgccgcgcaccccgcacctcctgacccctctcccctctccgcctcggccccttcccggtcacctagcgttgttttggcgctttggcgcttgcggtctcttccttcttccaccgctactcctcagcgaggaattattagccaagttttctcacccagcttccaaaaatcagattccgtatttgtgaacaagcttttcttgacactacccgtatacccgtatttccagcatcgtcgttttattaaacatccataaaagctgccccttagatgcattcatttcccacgacacctgcttgcttgtcatttgtccttctgacatctgctgttgttcacccctttaatctattattaaatgacaactattattttaattcttctggtctcattgatatccggatctgtgaatttgggttggtggagtttttaattaatgtacccgttgaatcatgagcttaaaataatcattgctgctcctgagcagttttgaataatatcatgctctctctgcttgcaagacttaaaaaaattcgctggtgttatatttgatttccatatcaatggaattcccaaatatttttgaaaatacaaaattcagtctttcagtccatgttttgttactcagatcattttactgataagtctttaacgcagcttatagaacatatttagaaggtttggaaatttcctggacaggatttgaaattgcctgtatcatctgaagctggttctgtagaagcattttggttttgattgtagatgcagccagtgaatgataacaataagttaaaactgtagttaaatttgttctttattcaaccctctgaagaacgaacagatctggtagaaaagcactaacctgggagttaggagctggacatcctggttctagtttaggcttgggctctcatggccgttccagtcggggcaagttattaaagatttctaggttgtgtttgcctctgatggaaagtaagacggttgaactaggtgatctcaaaggttcctctcttttgaagttctgtaagtctctaaatatttaatacatttgaattcaggttggtatttacctcctggcacctccagaatatctgagctgaagccctattttcataagaaagttaagcagatcaacagatggtgttttgaagaatccatttcaaatgatttataaaatgatgactacttacgagtttgtctgctatttgcagaagaggtttgcatgccacagggcaggaaaaggaagtggccatgttttcagatttatcccttcacaccaacaatctctgtggaatttatatgctaaaagatggagaagcaccatagaaagatttggctgtattaacaaaactgcatatgaaaaggtaaaaactagatagttaatatctctctttggtgtaagggttataatgtatctgagctttctttgtgatttcatcatcaactctcactgtggtaggaaaatcaatattaaataaacagtttcagccccgtgattacatgcagtgattttaggaagcatcatgataactaaagtaggtacttgcagggaagtaaaatatcctttctagaccttgaggtttcgttgggagctagggacacaggcatgttatccttctccacagtcttttttcattgtcaccttatcacaagactcagatttatcccaaatacccaccttgtcttttcttctccctctcatgaaataagacctgctctgactcaaccccctcagcatctcttacttcccacccaaaatgtcctgtctctatccccatcgtcccctcatctcctcccaattcagagaaagcaagtggacctctcctctgttccttttcttggcctctcaccatgggcaagtgcctgggctctggtggcagaagaatccatggctcaggtttgggctttgtggtcttggatgtgtgcttgactcctctgacctcaggtttctcctcttggtgtaatggcagtgcctgcctcgtggagtctgtgtgaggattaagggagatggtgcatgtaaaaggcctggcacacaggaagcctttcctttgtgccagctgccattccttctcacctctacccgggtcctatcactagaatattatttgtgctgtttgtccttagtctcccctgccccaccctgaaaaccttaggcttgacttaggagaggaaggatggaagaggcagagtcagacttgtggtgagcctgctgtgtaccaggcaatttacatgtgtctttacttggtaccctgggttcgtaagcctctctttcctccctcctgccagcctcccccactctcccatctcctgctccattcttagtacctgccctctggcttctctcgctaccacctttctttatatttcttctcaaagttttctccaaaactttgtcgtgagttcctggggcccatctgcccatccttattcctgagtggttgttcttggcccctttgcagtatttcttttatttttttaaacatggtctcagtcttgcctggttggagtgcagtggtgcaatcgtggctcactgcagcctcccaagtctcaggtaatcctcctgcctcagcctccagagtagctgagcctacagacacgtgccatcacacctggctcatttttgtatttttattagagatggagttttgccatgttgcccaggctggtctcaaactcctgggctcaagtgacccacctgcactggcctcccaaagtgctgggattacaggcgtgagtcactgtgctcagcccctttgaagcttttacctcacttgttttttgtcctttgaaatcctttcctctctcagcctttgggtcatgctggtttcttgattctcttcctgcacccctgtaaagataaatgtctgtcctagcttctgctattcacactgtccgtggcctggggtcccctctctagccctgacctgtctctcctgtgttctgctagcaggtccgttgtggacatgaatggcagcctgtaatctgcatttgtggtctcggagttacaggtttgcagactgcttgcaagcactgtcacattgagtcctcatgacacactggagcctacatcccttcattccccaggctgtcctaaaaggcagtttggttgggtagtttagcatacagactctggagccagatttcacatcctaagtattccctactggcttcgtgacttgtggtcaattttcttttgctctctatgccttggtgtcctcatctataaaactgggatcatagtagcccctacatcagagagttgaggtgtggattaaatgagttaaagcattggaaaaagtgtgccagtctattcatggcacattgcaaacactcagtgaatgttgctgtcagtcttgctgctcttcgttgccttgccggggtgccttggcctggtttgtagtggtctccacattcagcctgcctgtctgccagaccttgccatgtgcctggacactgtagtcaagctgaggggctgtccattccctgtaccagcccttggcccagtccatccctcaattttcacgtgtccaaatcctcctctgcttttaggacccagggccttggtcctgcagcactatttcttcattttgttttccttcctccccacacctggcagcaatgtccacattgatttttctccaattctcttaggttctgctgcattccatattgtgttgggctgtctctgaaaatatctcacctgctcgctcagcctgagcattctgggagaagtttatcttgctttttccaaaatgacaggcacagggagcctttaggccatggttgtccaatgcacattgatcttgtggaggaggagatgggatggggtgggcactcagggacggagcaggtggagggaacaggatgcacactgcatagaggtgggggtgcaacagggccataagtggacatggccgtaagtacttaggtctgcatggaaggagggtttgaattggggacttaacctcagggggagataagattggataaggtttagtcatctttgctgcaggggaacgttgagtactggcatgtaatggagagtggtttttaccttagtatgtgctgtccttttaaatagtgtaaactaattctttatctagcctggttaaagaaggggatggctggtctgcctaatttaatatttggctattgctctacccactgggttttgtgcatatactgaatgaagcattggcttgtatttattccttcaatcactgtttgaaatgtctgacctgggcaagttaattagcttctctgagtgcaaaataggaataataattattacgataatagcagctaacatttattgaacactttctatgtgccagcacatatgtgagtcacctttgcttattaactcatttaaaccccataacaactacatgaggcaggtactattatccttacttcacaaatgaggtggttttataaactgcccaaggtcactcagctgttatggcttggggcagaatttgtgctggtgaactccagagtctgccctgtaacaccctagtagattcctactgggaggaaacaccccgttatatcccttacctcactcagccgcaccatgccaggagcctagtaggctgacagcaattgggaaccagtcttattgttgacaaacatggtatgagcctcttttagagcggagctgcctgaaaccctccgcataagggatgcggacctggatgctacctgagcagcagctccaggggcttgtgaacattctcctcacatcctgttatgcatggctgtctctctggcctccccctgctttctctgcagcattgctctgacccaggccccctgtggctcagccagctcctccccaggcagctccttgtgtgagatgaaccttttaacataactcactaaccccacctcccaccctcatctagccatctgcagagctcctcactggggaggggaccttttcaaaggtccctcaccttcgtccttttctccctgaagaccaacgtccacaactttggtatatccacagtgttggggtgtgtgtgtgtgtgtgtgtgtgtgtgtgtgtgtatatatatgtgtgtgtgtatatatatatatatgtgtatatatatatatgtgtgtatatatatatatgtgtatatatatatatgtgtgtatatatatatgtgtatatatatatatatgtgtgtgtatatatatatatatatatatatatatatatatttttttttttaatgccagttgttccccaaatacatttagatagtaagggacacattgttttatgtcaagaacctgttacataaaaatgtgttatataatgttcaaatatatactgcacagtgaaattagataccactttttttttttcaaagaataaaaggataataaacacaggccgtcctgaatataattaacctcagatttgggaggcatggaaggacgtgccctgccctcagagctctcgtcctgagctctgcctttcttgagtgcgccgggagcaggatggatgggaagttggcctgaatctgccatggtgtggtactgtgagatgctctggaaattgtcttttttttttggcggggggtgggggatgccttcgcatcttgctcacttgtatctttctcacacctaagcagagggaagaagctctttttgccccctcgtacttagaccacccaggtcatcttttgaccagttttctgctctgctcaactcctttcaatcttcccagatgacaggccagctttgcctgctaagaacagccctggtgccagtggcatgcaggtggcacccctgtgtccagtcttccaggctctccagggtctggtcctgttcctcctccccagccctgcttccccgctcaacctccattcccagccacagccctgtgcccgaggttcagtcctccttgcctctccgctgtcctccctaggccacctcacttcacactctccctctggctagcggggtctttgcttaaattgttcccttgaggcctctcttccttgcccgtgcctgccttggatctcacttctctgtgaggtacctctgataacatttgttccctttgtgtgtgctctcccttttgctcttgattgccaaccattcattcgttcagaagcaggggtatgtcataatgagcaaattaccatatcatactgaatcaggatggccagttgtctcattttttaattgtttcatggttaattatcttacgctcacttcccactctccagtttcactcagttactccgtcagtgaagtttattggatgcctagcactgttgtgggcactgaggatacagcagtgaacaaaacaaggggcccgcaggaggggacagatgatgaatagtgaaacacgttcatgccttgttgtgagaagtgctaggagtgctaggatagcaagcaaatagagtaaagcagtagcgatgaggtatggtgggagggagggtaccttatctagatcacaggggagacctctctgaggaggtgacatttgaacttagcttcagaaagatctgggggaaagtatcccaggaagagagaacagcacatgtaaaggccctggggttgaaaggtgcttgatatttttgaggaaagtaaaggctagtgtgactcgattatgagctgcttgtgtacagatgttttctgcctcttttatactccctttaaccctgagcccagtgttaggaaggccttgtaaatacttacatacagaattatagcatttgtcattggttatatattataaaatagtaattttataaaataataatttatcataccctgcttagaaggcttttaataaaacattatattgcatataaacaaattaagggtttgaagggttttcttataaatgcactcctagcatgtttcaccaaatattactgttttaattgtgtttagtgcagaactttagacctcataattctgcttcatgtgcacaaccatcttaaaaacaggttttgttccaaaagtttatttgtaaggcactaggtggaaacttgggataaatttttctataagaaacaatgaagtaaatagtgatgtagtttctaggcgagccctcaaaagctatttagtggtgactgtagctgaaaacatactggttggtatcagcagtcgtcaagccttctgctggtagaccctcctctcagtagcattgtacctcatttgctgttagcaatcataggacccatttacctcagtcacttctcctactgtattttcagtctgttaaagttttatagaagggattttttacctttatacctttaagatttggttgcatgtgttataaatgagacagtagtgcagagagtggggaaaactctggactgggagctgggagaggcctgggctccagactgggcccagccactgactggctgagtaaatttgagtaagttatcctctttgaactttgatttctcaggttcttcttggctgtaaaatcctattgttttctcaccatagcagggaaacgtagatatacttcgttgttcaaacctgccctcaaatggctgcctctgatttcttcttgaagaagtatatggcactcagcaatgaggaactcaagcagttccccatgtgcagagctctgcagtgacattctcagtaggaaccttgattttgatctgctatctttcttgatgagttgaaagaaattttgtcccagaacttttggtccagataagatttctgtgttcttggccaacttatcttccatataattatgtaaattgttttttctttttaactcttagggataaaaatggtgactctggcttgcctgcttataaaatatagttataagtgcccttagggaatggaatgagtttgcaggagagagcagagctgaaagagtgtgggatcaaaaacaactttaaatgttaaatgcaaagctattttcagtaccctgctggaagaaaaaatttttttcaaggttttagaggatagaagaggtttttgctccaaagaagaaaggaacctaaggttttgcagtggtgaaaagtacctgatcctttaaccaactaccaccctcccttcccacctctgagttttgttttcgacatcatgaaccacatttgccatttgagaggtttgatatttaagtgacgttagtggcagagctcaactggcagtgttcaaatgacttaggtgcagagtgctgtgctgcaaacttccccagtgcattctagggtaagggatgcctcatagagagtgacagagcacttttagctctgcctctatttggtcagttgtgaatggtgtgttcctttttttccttacttgaaggcatagcgaggagttggtacaagaagttattgcttcatggacttcactttggagctagagggtggcattagacctagcctgccttcttggatgctggaataccagtggcaatgtcatctcttgttctctgctatacccctagcaatgaaaacagtgtctgtacagaaaagtctctcaataaatacttgtttattccttcaaaaagtgaattcagctttggataaatttttaatttcctccactctctagcagtataggcttatgaggttggtcttgcaaggtactttggagtttaggttgccatttctttttgacatctgtgtttttcttattcttcaggttggtcaggtatcagtgtcttttactgatgatggttgtccctgccctgctgatgttcatcttctgttatctttaattggctccaaactgcagcaaatctatagctgagccacattaactaaaagaaaacttgttgcatatttatttaggcatagtactacacatgtatttattcagtcaacaaatatctgtgagtctatatgccaagaatgttactagacccaaaggaagagcagaaattgttgttgtgaccaaggagcctgcagtttgattgccttgtggaacatctttatgagcattgtagaagggaggaggcttcatagaactggtcaggttttcacctttaaggatggtaggatttcgattcacagacaaggtgaggacaggtatttccaggaagtggctgagcggaaacagcataattaaaaacacagaagtaggaatggaccagtttgcattcatggacacagacttgtctaaaatggaaggttcttaaataatggtgggaatttaagtatggaagatcactgaaggcccaaacctgaagccattttagacacctagtgacttgcctaaagtgacagctgataagtggtagatccaggcttaaaataaggccatgggagctctcgaccactggcactggacttggctgtttcccagcagtctctagatgcaggatttgggtttgattggggattttcttttttctttctttctttctttctttttttttcttttttttttttttgtgatggacactgagattgggggttttagagtcatgagctggaaataggcaaggctctatttagcccactctttcattttgcagttggggaaactcagtgaggttaagtggcaagtcggagtttacctagtgagtcagagactgctaggcaatggataaccactggatttgttttattatgattatgattttagtgacatgaaatatttctctctaaagcatcagtccagtgttagtgttccagttggattggagcaatgaaggactaaatgcagcagagacctgacaggaggctgctagatgaatccaggaaggagagagagaagccagaactgagaattaattgtcaattatgttaatcagcatggtgttatcagtcaccctttagatttctagagtgcggtgaacatctgcctgtgtgagtggctttcaagtgtgtgaatctgcactgtactgtgaccaagataccttaatgaattctccagacagaaagtgccactatggaagtcgaatgttttaaaacaaatgcccacattttctggaaagagcaccagattaggagtcagatgacctgcattttaggctgcttctgctgcttagtcaccatatagccaaagcaaatcacttaatgtctcaaactgagcctgactccttatctgtggaacaggtataacaattcctgttgagcccttttcagtgtatgtgtgatgcttgtgtgagctaaggaaagaataggcattttgaagctgtaaagttgctttctggctgcagggagcagcagtgcagttttaatagtgaagatgtactggcccttacaggaatagcctaggagaaccagaagaaagttcccctacctccagggcatgtttagggaatctggcgctgtccaccaggtgggtgctgatgtgtactactttattggatagggccatgttttttgtttatttgtttgtttttattatactttaagttctagggtacatgtgcacaacacacaggtttgttacataggtatacatgtgccatgttggtttgctgcacccattaactcatcatttacattaggtatatctcctaatgctatccctctcccagccccccagcccctgacaggccccggagtgtgatgttccccgccccgtgtccaagtgttctcattgttcagttcccacctataagtgagaacatgcggtgtttggttttctgtccttgtgatagtttgctcagaatgatggtttctagcttcatccatgtccctgcaaagaacatgaactcatccttttttatggctgcatagtattccatggtacatgtgtgccacattttcttaatccagtctgtcattgatggacatttgggttggttccaagtctttgctattgtgaatagtgccacaataaacatacatatgcatgtgtctttatagtagcatgatttataatcctttgggtatatacccagtaatgggatcactgggtcaaatgatatttctagttctagatccttgaggaatctccacactgtattccacaatgattgaactagtttacactcccaccaacagtgtaaaagcattcctatttctccacatcctctccagcatctgttgtttcctgactttttaatgatcaccattctaactggtgtgagatggtatctcattttggttttgatttgcatttctctgatgaccagtgatgatgagcatttttttcatgtgtctgttggctgcataaatgtcttcttttgagaaatgtctgttcatatcctttgggatagggccatgttttaaagatgattacatttcacccccgtaagcctgggcatggacggaaaagttaggcatggatagccatgtgaatctattatctgtagacacctttcaggatagtgacaggcagctgtgaaccagaaaaacaagtgtcagaatctagccagctggccagtctggcattcttggatgtttcatctgtcctggggcattaggcagcgatccagaggaaccttgattagcctgggggattcatggctgagccagcatgctgtccaggtaatacctggctgcaaagcctgactggagatctgccaaatctaaatttctgccagcattacaagtgtatatattattattattattattattattattattattaatagcagtatctaaccttgactacctaccatatgccagcaactgtgctaagtgcttacatactttttctcattcagtcttcacagtattcatataaggtgggtaatgtcagttctgttttctagttagagagactgaaactcagacgagcttcagctgatacatactaagtgtaaaagccatgattcaaactcagaacagtctcagtccagtgcccagctgcataactgctatgttcttctttctctcttttcctggtacctgaaaatacttcttgtctctggttttgaggtttctgactgtgttattggttgatggatgggttgccacacagaggctcagctcagcacagctcttttttcttcatagcttatgacggacatcctcctggatactctggctggtgagcaaatgggtgccagtggtgaatgcagcagaaagactaactcttgccagctagtgcatgtgggtgaattttaaagacaacaaaagaaatttctgtaggtcagtttttcaaagagtaactggtagcttgtagtctacttaaaggccaagtttgatgttcatcaaagtcaccctgtaaaaacctttccaaatgctgtgattctgataacaataccatagaacattcctgtgtaattgacaagtagtttttacatacaatgtcttgtttagtcatcatcacaaccctatgagggtttgcaactacatatagttgcaaagaagactgggagatatctttagttgggaagccatgagtctagcaaaatctctgtttttaagggtggcgaggggagtgaatgaggggagctagcaatctgatgtgttgtggtggtgatggaagggataagtagagtttgaagctgttgtcagtagagttgggaggatgcctcctagtctatgacatctcctagtgttatgacatctcctcttgtggactgggaaattgcttagagtttaagcaactgtccagggttctacaactggtcagcggcagaggcagcacttaagtattgcttttgtgacttaattcactctctattcaagtttcatctttgctttctctattgaagttcttaaatattctgattcactgtatttagaagtcggcaggaattattaaagtgaacttctttgtggtatacactgttactgaatcagagtaaataaaaggtcacatgattggttgttgtgttaggtttaattgacgtgtactctgtatgatacagaatactcacatatcttttgtgggatatcattggtccaacagctttaaaaatcccaaggctttaatagatgataaaacacggagtttgtgtaatttcttgaaaaagttggccatcgagttcttggtcaggaacacaagcttcaattgtaacagtttccatggagacattagccttggcttgcatcatttcagctttcagtgcctttcctaggaatggagtgaactgctaaaagaagagctctggttgtggttgtcacttagagctctctcccctactgtttctgctggaggctgatttgcttttctgggtcttctcagttttttctgtgacctaagcataaattgtctttgagatcctggtaatctcatattttaaaagttttccacaaaagacaactgaatggaacacttttttttttcacccctttaaagtatttaattggccatcaacggtggctcacgcctgtaatcccagcactttgggaggtcgaggcaggcagatcacgaggtcaggagatcgagaccatcctgctagcacggtgaaaccccgtctctactaaaaatacaaaaaaaaaattacctgggcgtagtggcgggcgcctgtaatcccagctcctcgggaggctgaggcaggagaatggcgtgaacctggggggcggagcttgcagtgagccgagatcgcgccactgcactccagcctgggcgacagagcgagactccatctcaaaaaaaaaaaaataaaataaaatgaaaaataaagtatttaattggtggcaaggggctttgctagaagaatggacacctggtctcactcaagcttcttgtattagttgggataccaggtgagtccctctgttaaagagacccacaggcacaatggctgaaaccaggtagaagttttctctctcatgtactagtccctagtagatagtggtccaggcctagtatttttaacacatggcttccatttgatggttgaaggtaaaaacttaccatctcccagaggaaacacccaagggggcacacatccagtcatttttaagggaaagacccggaagcagcacattctctttttccagtagccggaatttgcaactacatatagttgcaaagaagactgggagatatctttagttgggaagcaatgagtctagcaaaatctctgtttttaagggtggcaaggggactgaatgaggaaagctagcggtctgctgtgttgtggtggcgatggaagggataagtagagtttgaagctgttgtcagtagagttgggaagatgcctgagtcaagggtgagaatctaagcaggcacacagaaaccagggcatgtgcagccatctagaggtcagggaagctcttggctctgaaactaagcagtggggggcacccaggcatggaagggaatgtgaattactcagaagacattaggttgtcagtaaaaggaaattcaccagtgtgactgaatcagtagaaagagcacttagactaggagtcagaagacctaggtttgagtccagcccttttacttcataacctggggcaaaaaactcccataaatatttgctttattatttagataatggcaataacagtgatggcctttcctgcctcccaggcttagtgtgagaccaaagggtgaggaagtactgtgtagactgcagccccatggagatgtgcacagtgtctgcccagcccagggcctgccatgggtgtatttgttgaatgaagtgtgaactattaaaagagttgggaaaaatgcattatactaaggagatcttaatcctggacagtcttctctaccaggcagaaaggttctgctctccactggtcaaggccttgggcctatgtgtaaaactgggtacctaacaaacacatgggcagacgcctgcagctccttactgggtagcacatgacacatagtatgtccttggcaaggccatttgctcattcctctgtgtaggtaaccaagtgcaacagaagtggaggtatagcccatgaatgtgaactaatcatttttaaatgatttggtccatgggcaggttagaagatgaaaccttcccaaggccaccaaaacttgatttcttgcttgaaaatgataagatgcagttataaaatgcttctgttgatttggaaaaaatgtgtgacttgttcaaaacaatatgtattaatagaaaatgtaacataaataagaggatacaaaaaagagcttaatgtttctatcttctgggcctagcaatagtgatttttttttccttttggtaggaaaatgggggctcagtggaataatcagttttatttctttttcttttaacttcatgaagggtttgtattgttcattttgttatttaatttgttcatttgctaaggaaagaacttctttcttggaactctgcggagtgtttttagatggactttactggaaaaaaacaggaattgaaattatattcacagtgcgctctaaactcttttaaaatctcatgcatggatggaggaaaatgcactgaaatatcaatagtggttctcacctcatggaattagaggtgacttttattctcatctccttctctgtggtttcctatttttcaacgagtgtgaattacttttatcatcatgaaagaccagttaaaaattaatctcacaaattaacactctcaagccaaaccacgaatttttgtttttcacaacctggcttggactataaactgtcacactatctcagacctatgcagattcttttctgagtgaggcattgaggaacttgttataaagatgatgctttccttctggaaatcaagaaacaagccaagggcttataatgtgttaggaaagatgtcctgagtaactttcctcctggaatctgactagcctttattacagctacttaaggaaatgagttttgtgggttccctgttcactgtgtcaccatttttttctttatcctgtactcatatgtacctcagggtccccagattttcttatcctgggattgcatgaccttgtccttggctctctcgggcccctgccgtttccagtgttctctgttcatgttcacaatattgttgatttggctgtggcttcttcccgcagtgttcttgtagactgaagagagcacattgctgcccttgtccctgtgcagcttcctcttcctctttatcattgctcaggtgagtggcctgagcagtgctcctgggatgaggtgaagagaagcagtcaagactgcagggaagggctaggggtgctgagctggccgagcttccctgggggaaggcactgggccatctgtccagcagcagttggcccacagctggcagggcaggctcaggagtggctcttgaagatggctgcttggtgtttgaagacagttcccagggcatgcattcatttgttgagcaccttcaatctggcagcctgtgttctagatgctggctgatgaccaaggctgacatggctttggctgtcatgggagtttcattctagtggtagagggagagagagagagacgatgtggtagagggagagagagagagacgattagcaggggaatcaatgaagaagataattacaggttgtaagaacagccccagaggaggttacaggtgcctgtttgtcgagaagtgggagggccagagttgggataggaacctatgtccctgattgcaaggtctggctccttctgtgtcctctgggctttctggtgggaagggaggaggtggaggagaccccttgcgagggccgagcttctcccattcagccagtctggaccagcctggggccttcagatggagatagcaaaagttgagggcataagctagggactggctctcttggtcactccagttgcccatctctgtacttccccaggtgaatagccatgttttttaaagaacacggagcaaatttgcatacaagagtccagatttatgcatgctgcagctttgtctgaaggcaagcttatattttctctcctattattttcaacttttaatgagttaccagcatctcagtgcccctccagcaaggatattgggctggtgttttcagggaacaattttaattaactcctccttgcctccctctcacccagccacccccagtccccttcctggtggctcagagtctggctttggcatgcaataagaatatttttgccttggtgttagcctttctgaaactcttgattaccagtgctcacaggacctttctgcagcactgtctgcttggctgtggactacccagaggagcttggtgtcaggcaaacttaggcgatttccctgagcatccttgttgagtctgcctttgtacttctttgtcaggtctagaggcttggccgtttgtcctgctcttttgtcccctccttctgggaaccctcaggaccctcactccatggagactcagcacccttcctcctgcaaacatcagtgatggggctttcccagccctttcccctatcttccttttcaaagaacaaagcctttgaagcttgtctcatacctgtctgatgcagtatgggaatctgtaagttctttgcctcctgaaggggtctggggaatcacttggctttcagagctttcctcgctcctctcccacccacagaccgattttaaccagagagtaagtcattcatgctgtgcttgaatactccttccagtcccactaggaagactctttgttactaaattctgttttcttgggaaaggggagcttattactatctcattttgttggttgttattaccctcctttaaaaatgtatctacatacacgcatgtgtgtacctacatgtttctatatttcccttgtgaatgtggccctcagagggcctggatttaaaccctgggagtggtagtgaccctttgggaaatgtatactttttgttccaaatcttctctggcttaaatttgtgaagttttgtttcagccttggtttcatagtttttcccagtttccaagataagtttggggctcactgtaatcagcatgtaaaggagaatatggccatcagctctgccccttaaattcatagtcagactcagtggggaagccgttcctgtcccatcttgcgctcgtggctctgtcagcctcaggcagctcctgcaccgtcctcctgcctgtgacagtgttgtcaggagttcttggtacctgggtgctgcttggcctcagggtgccagggctcccatgtggagtgtgcttgctgcagtctctacagcccaggtgtctctgcagccctcctcttacatagccacagcgtggtaaagtacatccagtttgcgctgtagtaagcaattttattaaaaaaataagtttaatatgtaagtggtcccttagttcgtttgaatggctcccctctctggctttggtttgaatgagctacacctggctggagccctgctgctcccctcagcatggagtcacctccctgtgctatggaggaaaggaagaagttattcttaccttggttttgagacaagacaagcctggagaaggctgtagggatgaaggagttgcccatttgtccagcatcagttgagagtctactgtgtgcctggcatcataggaagcctctggagtgctgtgagcaagaaaataatacttgatttatgtttttaagggttcttctcgctgcctgtgggccggcagtgaggaggacaagagcgcagcagggagatgggttaggaggcagttgctccggtgcagggagcagtgccagcttgagggctgctggtgggtattggtgtgagggtgggcaggctgcagataggccttcgcccattgcccttgccatgtgtccccatgtgtccccaggggaggctctgggcatcccaaactgtgagcctgccctttcccaagtgtgctaggccctgccaagctcctgcttcatggcctatgctgttcattccatctggaatgctctcttccccctgctttccatcctagctgagtgacattgggcaagtgaccagatctctcttgagcctcaatctcttattctgtgaaagagtgctcatggaacctactgcatgggaccatgaggataagactatagttgagtgtggtgattgcagtagcctccaaagctgtctcctgcttccaatttcatcccgctactgtgcattctttacacagcgatcctgtgaccgagggtcagatcagggcaggcctctgctcagaatcctctccacagtagcttcctgtcccagtcagaggaaaagccaaatcttagcatggccctcagagcttcctggtacttctgacctcatctcccaccccaaggccatggtgtatggttgatcatgctgggttctgcacagctcattgtggtgcatgtaagtggcactcacttcctccccaacttatgcattgcacaacttgtgcagctgtacatgctgctcctacctgcgcctctctagctccactccagccacagtggaatccgtgttgttcttcaaacacaccaggcatgcttcctgtttaagctctccctactgcctgctcccttggcctggaccattcttcccccagaggtgtgtatggctagttagctcaccttcttcaggtcttttttcaaatgtcaccctatttaaaattgttccatctgggtcactgccccccaaatgttccctttttcccttgctctttatttttcctcctagcacttatcaccatctaatatattatacgttttccttatttatttggtttatttttatttatttatttatttctcaacagaacataagcttgatgcaggcaggcaccagtgttaattttgttcactgctgtatccccagtgcctggattggtgcctggcagtaggggttcagtgatgcatgagtgaatgagtttggatgcacaaaggtaaagtattgggtacggtgcttagcacactggaagcacctaatacatggatgccagtattttcattgtctctgttaactctccaggccctggctcaaatgtggctttctctgagcctttctgcagtcccttctcaggctgaattaagtcaccaccacctgtgctctgtgttccccttcattttgccttctctgtctgctcggcatttatcacactgcagtagtgggcttatctcacactttttcctgttccaattgcaattcctgtggggcaaagactggcctgttcagatttgtatctcaggcggtctgcgcccccagctggcatgtggtaggagcttaggaagtgcttgctgctggtggctgtgggaggtggaaagagctttttaatccatcaggacccttacaagggggactggctccagcatcactgccgtctgatgtttgtgccccctcccaaggggtgtcaagggagagcttggcaaccacttaaatgagagtctccagtggtatatttagagcaaattttggagagaggagtctcttggataacagcatctgggtgacctgattgtttcacatataagagtttggctttttggctactcaggctttgagaggttggggtcattcaagggaggcagtgtaatacccatgtgttcagaggtggctgggacgagagggtgcaggagaaaaggcttgagctggcctgtaagggatctgagttggtgaagggagcacagcttctgggggtggcagaaggaataggagagctgcccctgccatacctggggaggggtggttaggtaggtgccttgggaggcatggttaggtaggtggtttggggccatggggggaaaactgtaatgccagggcaattactttggcctcttgtatttggcaggaggggtccacactggggattgtggtggcgtgagggagagggccctgggagagaagctctagagtcattttcttttccagaggtggagttgtcttggggacctgcacgtggcacgcagagcccatgctctcaggcacctttggggtggcagagtttcaactgaaccaacagaggacaaggggctgagaagtcggaggccttggctgaggtgcccagtttcttggttcactttctttacctgccaggttagcagcaagtgagcaaatccctcctgcctttgctcagcattagcctcagagacttgaggagagctgggccttcaggtgggagcctggtggccacactggagaggaccaagcttgacattgagtgtccgaggggctgaaagttgttcgctcatccagagatggattcgttctgcaaacatagggaaagttcccttcccattcctcatggctgtttgaggatggaattcctgcattgaccttggcctttccctgatcttggcctttcccctgcactatggcctctctactcttaacattacgccccagcccttttccatgggcccctcgtcttccctatggccatctaaaatggccgtataatattctatcaagggaatgttttcagtaagccatgagcttgatatggagcatttagattgcttctaatttttgctctttcagctaatgctacattaagccatctctgtgtattatggaatcatttcattagttggcatttgtctagctaatggcaatggcccaagatttaatagcgaatcagaatttcttttttcaagaagaatgtcatgaggatatataaaaaatttacttaaaatgctaggaatcatctatgttggggttttcatgaatgaggaagcagggaaacagtaacatgaaattagttgtaagtgaaagactgtgtgtataaaagtaactcgtgacttgtttgttcctgagtgtggaggggagccaataaatccttggaaggagcaatctacctgtgaaaatcaaagagatctgtattcctgcatctgatgaaaacataacaaacagtgatctcttcttaaggatatttttagaaatgccctaaaacaagaaaaagtaaataagatttccgagaaaaaacatgtctccttaattccaaatgagcctctctggaaatgccatttagtagtggaagcaggttgtagacttgctgaaaggatttggttctttggttattaggaaataactagaatgaaattgacaaacagacaacactgacttggtccccagtactgctttgagcctgaggtatgtgttggctttggaatgatggggaaggcttcctctgacttgctgatttgttgtagttgttgttgttattgttttgagatggagtctcgttctgtcaccaggctggagtgcagtggcgtgatcttggctcactgcaacttctgactacctgattcaagcgattctcctacctctgcctcccgagaggtgggattataggcacgtgccaccacacccagttaatttttgtattttcagtagaaatggggtttcaccatgttggccaggatggtctcaatctcctgacctcatgatctacctgcctcggcctcccaaagtgttgggattacaggcatgagccactgcgcctggtctgttgttgtttttattgtttcagtctctggtggcttattatgtagacttgggctgtaagctttgcatttcagtttaaaccagcaaatgtttacactatataaggttgcaagggctaaaactttagggagaaagaacccagtgcacccctgtttctgagaagctcatgaccagggagtgggaaggataaagcaatgttaaaaccaatggttattcaagggagattaagaagggggccctgggagagtcagctccatccttttagagaagggaggagttctacctcactgctgggcagggtggggctaaggggcaggagaatcaagaaaggttttatggaactagttgcatttgtcaacatcttgaaggacaggctgaaatggaggctggacattctcagcaaaggtaaaaggcctgagtagaggagatggagatggaaggacatggggcaatgtttgggatttggctgaagaattgcatgcctgtagtaatggtcatagtagcactttatggagagtatcaggtgccaggcatggttctaagagctttatatgtagtaactcacttaatccatgcaatgaaccaaatgaggtactgttattatccccattttacagatgaggaagctaagataaatagcaaggaattaattgcccaggatcacactgctgtggagccaagatcagaccaagttcatctggctccaggctctgtgcttacgaccatgaagctgtcctgtctctgatttggggaaagaacagtcactagaatcagacagatggacagatgccgtatgtttagaggctgggattatcaacattcaggaatgcagaggtggaaaagagaccagagatggagatgaggggcattggagaggtggggatgggaggagggtttggtgagagccgtgaagggccacaggaagacagagctttaaggagaagtttgtcagtgaggcccagagctgcagacaatcccaggaggtgagacctgaggaataggtctgggctgaggagaaagctgtgagggcctcgggagaggggcagcagggtgacccaggctggagctgctgtggtgtcctatcctggctgcagagtgctgcgtgttcctgggggatcatagctgttgatgagtatcactgtccctgtcctcttatctgtagaaagaggtgagtgtgacagagggggcaggtgagagctggcactgctaatttggcaaacctggtgacttttctgcagcctaatgatttttgaaagctgtttgctatgctgaggcacaagtgtgacttcccccatctaaatgctgtgcaatcgctattttccctggaaaattgggcccatgtgggctctgtgtgtggtttatttgagttccatttttatagccttattaccttgtccccatgatgcaagaggcctctctcttttcttgagctttgctgtgaaaattgtttcttaaaaggcacaaagtgatctctcgtcatctgggtggtgctcgctccacaagcagcacttttctcagactccgcacacacttgtcatcgcccctgcccccacttggcaggttcctctgattgttggcaatttactgagaacttttaggcagctcttgaagctcactacctatgtgtttgtcttgatttcttccggaagagtttgtgcatgtaaatatccattcagcctctttctctccgagatgttgccctgccactgaccgtgcttggggctgaaacccagtcttgtcctctggcctcgagctgattaacaatagcagtcatcatgtacagagcctgagtggttatcaggcactaagctaagggatttacgttcgtgatcttaattattcccaatttctttgaggtaggtactattacttcccccattttacagataaagaaaatgagccttcaagggatagagtaagttaccccaggttacatagctagtacatggcagagctgggcttaagcgggcctttctaaccttagactccatgtgctccattcattcattcattggcaacaaatgattgtctgcaacaggctgagaactgttgtagacccagggtgtacagcaaagggaaaaaaggccaaactcccaccttcagcttatattctaacttggggaggtagagatcatataataaatgacatatacattatgctatgtggtaatgagaactatggagaaaaatgaagcaaggaggtcagatgggaagtgggaggattttgaggagtggtcaaagaaggcctcattgagagtacaacaaattgttaggttaacaaacaaacccccaaatctcagtgtagcaacacaacaaaactgcacttctctgcagaaaaaattccaaagtggctgctcctggttagcaggcagccttccttgcagtcatccagggacctagactccttttatcctgtgtctctgccttcttcaagggccttggtttcctttgcattcaaatgctggagcgtgaggaagaagaagagagggtagtttgtgaggaaggctttatggaccagtctggaggaagcatacctccctcccacccactggccagaattcagtcacatgttcactcctgactgcaagggaggctgggaaaggaagtctggccatgtgccgcctaaaaaaaggaagtgggttctggtgaactcatggcatggtgtgttgcagcgagtgaggtgaagaagtgagctatgtgtttagctggaggaagagcattttacacaaaaggagcagcaagacaaaggctgctggaatggagtggggaggagagaaggagagtgggagaagatgagggcatggagttgtgggggccaggccactggggtcactgtaaggatttggttgccttgggaatgacaagcagagccagaacatagagttttgaaggaggaacgacaggatctgaggcacgtctcacagggctcactctggctgctgtgttgagagtggactgagggagcaagggggatgcaggggagaagcgggcgtttgcgggtgttatccaggtatgtgaccagaagggctggccctgagccggggtggtagaggtggggagaagccgttagatttgagatcagttctgaaggtgggccagcaacttttgctgtgggattggtagtggggcatgagagaaagaaaggagtcaagattattctgaggttttggctttgcctaatgagtattagtctcacttcctaccctcagaagcaagaggggaaattttttggaaaaggatatctgagtgttctctgggccctgacctgtcctccataacctctttcactctgtgatacttttttcagcacagatgggcaattcccattcatgactaggctttcagacatggagagggcacttggagtccctcctggcacacagcagaggtgaggcagcactgggaattgtctcactttggggtctttgggtcaaaccttgggacccctttagagtgacatggcagggactgagtgtgccctctaggggggtgagatatgcctactggagtccacttccaatgcctgccatctgcaaacactggtgaggccctggctgaagggtaacaacccacaaaagtgcacaaaaggaggaagttctggaatgcgagttgatgctgccagcggtccggttggctccttgccttctgttctttgtgtgttgacatcagacctctctactgcagacaggctgccctacctgagggggcacagctgccagcagcctcagtttacaatcctagcaaaggaggagagcctttctctacatctaggtatcagtttaagggaaaagcctctgtgtttgagagtgggagcggaaactgtttcccacgtacttccttggcagtcatgacctgtcaaggctgaaactggagatgggactttttaatagaccatgatctcactgggagcatatggggaagaaagttcatcttagagatggcagggcgtgagctgtgaaaacagatagtgcacacctactagatgctgggcccccgctaggtattttatttcactggagagcaaaacaatatatcatccctgccctcatggcacagatggcctcaagtggctaaaccatagaatggctagctgagagaaatgatagttctttctttttttctttactgattgcgaatggggttgtatttttaattttggtatccatgtgttcattgctagtatatagaaatccaattgatttttttgtttttatgttgtatcttgcatgtttgctaaactcactaattagtcatagaaatttttttttgtttattccccaggattttctgcatagacaattgtatcacttgcaaatagggattgtttcatttcatcttttccaatctgtatgttttttatttctttttgttgcctgattgtgtggccaggacttctagtcctatgttgaacaagagtgctgggagtgcacatccttgccttgttcctagtcttggggaaagcatcagcctgtcaccattaagtgtaaggtcagctgtggatttgttgtagatgccacttgcactttgctggcatggttgtgagtaggactgtgggttttgtgtgtttgtgtgtgtgtgtgatgtttggctgaaatacagtggttattatctacaagttttctgtcttgaaacagggagatttgttggggcattttctctttgtgctccttggcatttctgagttgctggtctcctcagttccaagtctgagctatatgcagaaaaggaaatgcaggaagctcaccactgtgttgttccttggatcctgaggtcccagctggtctgccttcttcagactgccatttggagtcttcttatagtcatctagcatagaatgcccaggggttttcattgttcttagcaggtggaatcagggaaagtgcacctgctccatcctgctgggagtggaaatggttgggggaaattggagcgtataggtcggggctagtttagatgcaagggctccgttctgtaggtgcaggagggccgtggaggctcagccctgacagcagtgggagggggatgggaagagggggagtggagagagcctaggtggctgctgcctgtgtccaggcaggaggtcctgaagtcctgaggtcctggccgtgacagtagaactgcagcagaaagaaggacaggaagttccatgaggacagtgaggaagtgcaaggagaccaggttggtctgaggtttctagctagagcagctagctggttctgagataacagagacagagggaggggtctaagcgtggcagaggggtgtattctaggcattgtagagcagatctggaagactggacttactgtgcttcccctcaggggaggcttcacagaggaagtctggctgctggggaaaaatccagggagtgtgcattctgggcagaggaattctggctgctgggtaaaaatccagggagtgtgcattctgggcagaggaaacaacgtgggaaaaggcacagatacagaaaacggcgtgatgggcctgttgggactccagctagctgaggcataagtgggtagttactggttccatgactgggaaggatgctgtaggagtgcacaaaaggaagaagttctggaatgcgagttgatgctgccagcggtccagttggctccttgccttctgttctttgtgtgttggcatcagacctctctactgcagacaggctgccctgcctgagggggcacagccaccagcagcctcagttttacaatcccagcgaagggggagagcctttctctacatctaggtatcagtttaagggaaaggctctgattggcccaggttggtgatgtgcctgcctttggacccgtcactgttgcaagggagtggagagttctaatctaggccggatcgtctgcccacccctgttggggcaaccagagtcttttaaaggagaaggcagacaaaatgcatctggggaagataaaaaagactgtttaccatggcttactgtaatagattttgaagaatatgtagtctggcagtgcaggaactcttcatggagattaaagcaggggacttgatcaaagttaggttttattaaaatcattctggacactgtatggggttgtgattggaagtgaatgacaagaggtgtcaaggcgggttcgtaggccactgctttagctccaaggagcactgatgaggcctaagctagcttagaatcctgacttactttgtttgcacttcacctgtagcgacagcatcagtgaggtggagaacagggatagagtcctagagatgttagacaggcaagacttggtggccagatggaggcaaggagaagggggtcttatggaggattccccactgccaccaagggcataaagaatgagtctctggagggctagccttatctttggaaacactattaagtgttggcagactcgatgtaccttattgcttcttcagaagtgttagtgttgttggcttcttgtggtatccagctggaaaaggaagctgattgattgcatttccctccctttaaagagcttccttttttgagaaatcagaagataggtgatacagtcaggactgccagtggagaaataggttggggagagggagacactggcttggagactctcctgcccccagcctgccccgaggcccgcgagtctgctttaggcacattcgtccttttggcatcatccttgctgggaaggcttttaagggatttaaggaaagaaatgacacaatctgattcatattgcaccagatttcctcctctgttcagaatagactatgggtggaggtagagtgactccaagagtagcagcagggaagcagggcaccaattaggagactgtcgcagcaatctaggatggggacggtggaggtggtgagaaatggtcacattctgaatacattttgaaggtaagaaccagttttagtgaggattagatgcggagtgggagagaaaggagatgaaaatgactccaaatttttggtctgggcagctggaagaacattgtcttaaactgaggcggacacaacgctgggaggagcacgtcaggggtctgtgttggacatgtttaagtttgagacacccaccatgtcttacacaaagctcccatctacttcttacttgacacaaacagttggatgtactggtcaggagttcagagcaggggtccaggcttggagagaaatctgagcattgttagcatggaggtgatatgtgtgaatccaggagactagttgagatcaccaagggagtgacagagaagagatgaaaacaaggactgaacacgctgacataagaggtggggagatgagggagaataagcaaagataagccagtgaggtgggcggaaaaccaggagagctagagggcatgattaactggtgtcaaagctgcaaggtaaggactgagactttaccaatggatgtagcaaaatgcaagacaggccaaatgcatatgctgttggacctaagcttaactttgcaaataagtcatagttccttcccagaaggagaatataattttgcaaaaagggatcatttaagatttattaaaataaatctgagaaagatgtgaagatagtaccgtaggaatccagcagaaggaaacagtgcttctggcttttgtggggaggattgagtcagattcattcataccttcattcatttgtgtgttcattcatttggcaaaaacttattgggtgccaggggttgcggggaggagggaagagagagttgttatctagtgggtatagagtttcatttttgcagatgaaaagagttctggagatggcttgtggtaatggttgaataagaatatgaatgtacttaataccattgaactgtacacttaaaaatggttaagactgcaaattttatgtgacatgtattttctcacaattaaaaatggagagagattaaataaaaaacagagcactttttggggccccatcatgaacttggtctgggatatgatgtttgaaatggatgcgccatctcagtagatggaggtaatgtggagaagagtggaggaagacgtccagctcagagggttttgggaactatcagtcctgtttgtctggatggtagggtctatcgggggaaaccatgcaagctgagactgcagccgggccagttggtgcaggcccagcatcctggctgtggatttgggcctgccttcttagattctgggagcctctgatggtttctgcccaggggagtgtcattccaaaggtgtgtatttagattaatttcattagtccttcctgttaaaccattgcctattaaaagcagtggggttgaggcattcatttttatggtgaaaattctggcctagcagaattttagatatccaagcatgtgtcaatgaagtgagtaggttatttttccatccattttacaagtatttattgaggatcatctaagtgcccgtagtgttctaggcagttgggggtatgggacggggtgaatttaacaggtctcttctcttaaaaagcctacagtctagagaaaccccctctccttcctaaacaagaagttatgccacaacgtgccatgtgttaccataggcatgccgccacagttccatgggtactgagaggagggggtgcctggcctgcctggaacactggggaggcttacagggaaaaactgtccaatggatttaaaggacaagcagggattttctaggcaaagaagcagaatgggcatcccaggagtatggtaaatcaaaacttattgggtgctatgaatttaaagctaaacttttatttcattggcttttaggtggtgctggctagagtgtatacgtttggacccaagcttaacttttccaatgtggaatcctgggccttcattggtaagtttgtttgatgccttcttaccaaattatgctatcaaggattggtatttggaatgaaaggcaaggtagttatcattggcaagttctctgtggaggttaccagccctggacctggagaagcctgtagcacaggctgaaggggtacataggaaaagtgaaatctcactgtaggtttctgtggtagatgcagagagggaggccagaggaggggaaccaaggggtgcgggggatggatgcagcgggccttatggagaggtggagctttggctctgttttgaagggcaagctagattgaaaaaagtccggggaggagtgaaagaagattttcgggacttgagaacatagaggtgaggtgtaaacaaagtgggcctagcagcagtcccataggagcaaaatcttcatcgaaaggagtcacgggcaagaactgtggtgggatctgctggcgtctgatgattctagtccatcagcaaactttttctgtagaggaccagatgctaaatatttttggcttcgtaggccatgtggtctctgtcacagctactccactctgctgtggtaacatgcaagcagccatagataatatggaaatgaatgggtgtggcagtgttccagtaaaactttatttacagaagcaggtggtgggctggatttggcctgcgggatgtagtttgccaactccttttctagaccctaaatgcccggctaaggcacatagactttatcctgaaggcagtgggaagccattgaagttattttggataaagaagtgaagtggcagaagtgatgtttacattttaggaacattcatctgatagctggacaagaggcatgggccccttttggaaggcagcagcagtcatccaggcatgaggtcttgcggtgaacagtagtgaaaatggaagcaaaggatcaatggaggagatactgcaaagggagaaccaatagcgttttcagtcttcttagacttaagaggcaggagtcaaagaggatgaaagtttaagcttgcttgtttacggtggtatctttgacagaaatgtagatgttgggggtggaaaggatagctgatgcatctggttttagatatgttgaattcaagataacagtggttcatccataagaaatgtccagcagagaattggaaatgcagggctgaagcctggcctgagaagattaagtctagagatgtggaatggaagccataggattaaacacggtctccccaagatgagcagtgggctgagctgtggggaatatgcgtaactgtgggacgggaagacgatggaagagacccagaggccatggaggagagtcccgggaagggaagagaatggggcagcagagaccagggagaacggacctgaagggaggctgctgaatttgtgacaaggtctttgcagatggccttgagaaatgtaatgtcacaagaggggaagggaagaggaagccaggttacatggagttggacataaatgaaggataaagaattgagatgttacaaaaatagaccgctcatagaaggtttgggtagtaaaagaagggagacacataagatttagatacttgcttgtcagaataacctttgctttagctttgaggcaggcaaagcatgctgtgaccagttttcatttccttctttggagccaagctgtgtttgggagtttgtgtgtaccttgggcttgtgattgtgttcttatgctcccttttgaggtgtggtgttcgtaactctgccacaacttgcaccacggaatccagcccgtgtttggacccttgccatgagacaagatgtgatctgttggggaagtagttgcatttgtataagttggaggagaaagtagagtggaccaaaaattgaaataaaccttcttactacagagtctatccaagtatggggacttgaggataattcctccagtcatgatttaattatgtatcaatttgtgctctgagtattttgagtgtaccttctttggtttgaattctaagtagtttttgacttggtttgtgtgaatatagcagttagagagctggtaacaaaagcaacagttgtaactggtttagagccatgatttattgaacactcattatgtactaagtccagtgctaagtgctattgtgtatcatcccatttcatctttgcaatgacctatgtggggggaattattaatagtattcttatttcagccagaaataagtcatagatgagtaactatgcaaggttacaagggatttgaacccgggtctgtataatccctggcttatgctgcttcctactttatcttgcctgtgtctggaatttttcctcctactaatgtagaaggactagagatagatcgagtccctcaggttaaatattcagaggctgtagtgggtgtttccacttcttaggagtctattgaaagggcagaagaagtgtgggaagtctggaagagactaaggccaaacctcaaacacttactttaactgtttccccagataaaatttagttgaaggcagcagccttgggcttggaaagaaaatagcgctagaaggcatgagagtcagattccagtcctagcattatgacaattataatgtcatttttgtttaaactcttggcatttctctccaattacctccagctttgagctccaaaggcaggctcctattttgtcttgtttttcactgtatccccagcatcgtagcacagaatctggcatgtagtatgttatgtactcactaattatttattgcttcgaatgcaccaagggacttggtacaagacacttagcctctcaggcactgctcttggcatcatggttatagaggtgaaacaggacaaggtctctgctgtcgtgaagcagacgtctacatgtgtgagatgtagaatgtgacgtcaggtatgatcatgctctgaaataaaagacagtgagaccggggtggagagggaagggcctgtccaagaagtgagacagtgagctcgttgggggtaaaatccataaaattcctcttggggtgactacagattgtcagctgcgctgtcagcaccttgttttaattgttttacttggctgccattgccaatgcccagctgactgctccctgcagcgagaactcccacctcaggcctcgctttcttcagctctgctgagcgtgcctctcctgggtcggctcccggttctcctccagctgctgagattccagcctccacagcctgctctgctggttctctgttctttgtccttagcttctggtttggcttggtccctttcacgtcatccttaacgtcctccctgggtgagctcatccaccactcacctctgtcttgaagacacccggatctccatatccggtctgaacctcctcccagtccacactcctagtggtctgccccgagggcacctcaacctgtctgtcccctcctgagtgccacatgcgtctttctccctgtgctgcctgcttggtccacgcccctcagttgcttctgcttcatgagtcgtcctggccttgtcttttccctcatattcccttggttaccacatcctgaagagctcatcttctaatttgtcaactcagttcttctctgtctctccactcctgtgtttaggattcatcattttgttctatgacagcctcttaattggtcatcctgtgttcatctttttcctccctcattccactgcccacattcctatcaacgtgatctttctaacacatgtctgatcagagctttcttttgcttaaagctctccaagagctcctcattgcttagaaaataaaagctaacccccttcagcggggcctgcagtcttctcatcatctggcccttggccccctgcagcttttgctcccccacccccaccccactttgggttttcctttttccctaactcacatttctaacctcagcctagctaccaacagccatcacctcctagtgcctttgcaatgctgggccctctcctgggaatggcgtggtctctgttcaccctcttgggaactcaactccagtttcccccaaatcttcaggacaccatccttccctacccagcacctctccatgacctggaaatgaccttcctcctggctcccagaacaccctcatgtctctcttgcaaagcacttatcggtgttactgttgatttacttacctgttatgctcagcaacctgagctccttaagggtggagaccacacacacacacacacacacacacacacacacacacacacactctgtctctctctctctgttccaagtgccagcatagtttacctggctcaggaagtttttgttgtaagagtgaggagtggtctgtttgtgcagccaagcaacagattcataatgtgataaaatgtacctgaaatgggaggttcattggccattgggtttattggggtgctcttcttgtcagctttgagtgcaggacaggttgtgttgggcttgagtttgtgacgcctgttgtgtctcccagcatgctgagacctcaggaatgtctcttctctatattctttgcccctgactttttatttttttagctcttgtttttgatggaccgataatagcaattcaaaatgaaaaataatccatcaaggaattctcaggaatgaggtccacccaccttggtcctggatgaatcccaaatttcctaaataagccagaatatctattcttgcgaactactgtctgacagcctttttcccccttaatccagctgagaatgcttttcttgaagggtaaggatacctagtggcccttcatgggggtgcctgagggcctctttgtcttcattttaaaccttgtaaagtccccagtgaatactgaggagtctaacaaataggaagaagctctgaccccaggggtcccaagtcagcatctgtactttgcatgggagctagcacaatgcacctagccaatagcatataaactctcctgttttcattcagtgccttaagcttgttgcttgttgtgtcttcttcacttcctatctctgccagagacctgagaagttgtgccaagagtgcagcttttatttggggcctcacagtaatctaggaaagcttttcagaagagagccattctcagcaccgaggtgtcctgcagaccaggacactccagcaggctcttggaactgctttcctgggatggaaatgcttgtgatgctgcctccccttgtagggactttccatatgctgttccctcagcctggaatgcatttttctcctggtttgcctagctcatgcctgttcaccctttggaactcagctgattggcctgcctcctcctcagaagcctccccaacctccctgataagaaggctaggtcttgtcctcaccattcccatgccagcatctagcgcttatggactgctcaccttgtgtcaagtactgttagaatgcttcatgcgtagctactttgtattaggggcttggtagatgttggctgaggtaagtgtcatcattgtcccaaagacactgtgtgaggaaactgaggcctcgacccattgagtaggtgacagagcaggagtttatcccagatgctggactgtgggtttacgctctgacccttctatacgccaccgttccctctgctccaagtccttgcagtctgtccttttccagcacttgtcatggaggtcatgacctcggtttgtgtggttatttgattaatgaatgtttgttccctcactgggcagcccttttgagccccaggatggcaggagtacctaggactctaggcaggtgcgcagcctggagttgaccgagagcatgtgggactgcccacttgcccacagctgcttcttgccttttgcatcacaggagggtgggctaggaccataaaagagccagcccaggcctccccctttctggagctcactgagtgcgtgcatggggtttggccgtcaccctcacttccatggttctgcatcagaaccagctgtgctgaggaaacatctgtgccttgttaaggtctgttccttctgcccactccctttgcccttttctctaccttacaacccctttgttgtccttcttcaaggaaaggggccccctttgtctctcagggcagagccagctgcccttctcctggtcctcttgatctgcacacactctgaggatgactgcccatggcaggtcatgatggtccgtctgccctggactgtggtttctgtggcagagcaatactttgtacagtcagggcccatggccctacggaaggctgagggagagcctgaggtcattgccttaagagaagctgcttcatggtgcagttggtatgtgtgcatgtgtgtgtggatgtgtgcttttttcatgcatgatgtttttatttgtgttatttatccccctgctatatctccctctctcaggggtctaacatggagctttgaatagtagatacatcatagctcttggctaaatacatattttctcccccgctgatctgaaggcacctcccttttcccctacccctcactttggtaccttggtgacttcacagggttgttatgacttcccagacctcattgagattgcagtgatgtgaaaaccctacctagattccagccagctgggcaggggccttggcagcaggggaagcccagttccctagggcaactcaccaggcctccagggctctctagggccaggctggctgagcttcaactgactcatactgtttttgactgggaaaaataaaaattttaaaatggcttctgaccaaatggggaaagtggatgtgggaggaggagaagggggacgttagccacaccctaggtacatttgccagcagcaaactgagatgggcttaaagtgtggctggcctctaagacgcctgcttcaaagggcattcggcacactggtctcaggctttggaggcccacctgcttcagaacatcagctccctgtctgtctagcgttgtgacttaagacaaacccaccaagctcccttagcctccattttctcatctgtaaaatgggattgtaatcattagaataacctttataaggttcttgtgagagtggaatgaagatgtgcttagcaccgtgactggcgtgtagaaagcaccaaatatttattatctgttaacattgtttttgtttgtcaaagtattattgttaataataattataagaagactttggaacagatataaagtctaaaatgcaggctgtgatgaaagggagatggtatataagaaaagtgctttttgaattgcacattatgtccagatattattattagcacaagtatgtttattattgttttgtctttgaaaaaaatgctggagcacaattttatgatgttgagtctatgtcctttgttgttttgttttttgttttggaaaaaggtttgtcacattggcctttattggaatcttgtccagtggatgtatgacccacattggtgaccctgggtgccaaatgcctggacagcacctggcaaagaagagccattatttcaatggtcactattgtttaaaatcgttatggtaaacaatacctgacagaagttcttagaggttcattgacagtaaattgtgggcaatgcactgagttattatttactctagacctgagaaattctccctctccaagttttgtgccttgtatagctaaataaatataaacaatttccttagaatttgatacaaacagctaccattgtcttcacaagtatgttagaaatactttcttaatagcaactacttgactgttttgttttttatctccattccctgccattactctgcctcttcccatctttctgaaataaaagtgagccaaattagccatttaaaaaatacgtagatactttcaggcagaggttgaaaactgtctaccccctggctgcatctggcttgcagatgtgttttgttcagcactcatagtgttttaagatgtttaaattagtggccaacatttaaaaatgggtagatttttgaatcaaaatccagatttccagctcttcataaaaaatcaaaggtctagtgggcctgggcccgtcttccttgtggcagtgcggaagagtggtggtccctcccctgggagcttgtttctccagcctgcctccggctggcccagcctcactgtacctttccatggcctgcttggcccctgtaggaatagagtttgtagtctctgcttaatataactaataccccttagatactgtgtatcagtttagaattatttccactagcaactgtgaccataggtaggaaggatattttacttgctaagttgtcattcttatgatagcccaaatggctataatagtattttaggctcttttggatttaatagaattaccttctctcctctctgtgggatttcctcattaacaatttttaaaaagtgttcagcaaggcttatatagcaacataaaattttaaataatgcaggatataaatttctatagctgctattgaaggggggttgcaatcaagtgaactgctttaattcaacaatttatggtgttgtaaatttgaaaaataaaagacacttagttttttttttttttttttttttttttcagaataaaataattaaatagttgacctttggcagagtctttgttgaaataggcaagggttttgagcttctcagaacttgagaccattgccttctggagtctttcctcagatgagtctgtgcctccttctagctagtgcactctgagcactgtggccacatctggagggtggagaggagacttagcttccaatggtggtcactctaggggaggggggcccttgcaaataccaaaatttttttaaattattattttatgagcttttaaaaacttttttgtttttgtcatcacaaaagtaataaacacttgtgataaattcagacaacactgaagtgctttaacataagcaacaaaatcttctgtgacctcccccaaccttttccaaccattccccaaacataagcacttttgagagtttgcttcttatactcctggacttttgcatttgcttgtttctctccacccctaccctttgccctcaaccacgacatagatactttcccttttgttttctaaagatagactgtccctgtgcatggtgttctgcaactttctttttacagctgtcaattattatggttatttttccaagtccatatgtacagataaatgtacttgttacttttaaaagttgtactccatgttatggttgtatgttaagtaaatttcgttttgtattgatagacactcaggttgtttctgaccttttgccattgcagtcattgctgctgtggaaatttttgtgcacacgtgtgaacttttgcctgagattttctttggtatagatacatagaagtaggacttttggtttaaatggtttgctgtttaaaatttgaatccataatgccaaattaccctccaaaaaggctgtaccaattcatgctcttcctaggagcatcccattatggctttgctaatctagtttttgcttacacatgtgtaagaaagtaaatcttaaaagcctcacaaataatgccatcaaaattacacgtttatcttagaaaagcattcagaatatatgtctgtagatttaattatatgatttttatatcttgactttgatggtggttatcatcctgcaaggtgacaaaaagttccctaaatactgtacacaattattaaataattattaaggatatcagttgtgccaggtagcctttggaagaattacagccaaatcacagcttccttttccacagctctgccaggctggcttgtctttcccaccaagggctgagccattaatactgaggctgggtcagcatttgaaggggccctgccagggagtgccaggccttgggccccagagacctggggagtgggagatggcaagtgactgctgtgaggctgagacaaagtttttgcctacaacaccccatggctgtttcctttactgagctagatgaggaaagcaaagggaagtgatggtccaagacttctggtggtcacttttgttcatagatttctcacaggagtgctaacatttaggctcatgtttacgaaggtttgaaaccttagcatttgggaaggatctgcaaattctcagccaggggccttaactgatcacaggtagttgtgaactcttggtccaggctgtatctcaaggcttcttcttagaaggacaggtcagcttaccacctgctaactgcatgtgaaattttgaattctgccttctctagctctcctctctggctctgagctggtatctggcatttgcaaacagtttaccctttgttgacttcttagcactaacctcacttttatgagtctgagtagacttgatacccaggccatttatcctttgagggtgccctcagcttcatcagacccatgctgggcagtctggcatagtggtaagaggcacttggagccagacagacctgggttcaaatcctgacatcatcacatttactaacagtgtgaccctttggctgatgacctcacctctttgagcatcagtgtctccttctacaaagtagggacagtaattctttcccaggggtattttgaaggatatacgaattaatatttgtcaggtgcctctcagatgttcagcacaaaataaacagtgtataaatatgagtcctctcttatcttcctgctgtagagagaaagttcgttggggatgctccaagttggtggctactggctgaggatcctggagtaagaggaaggctaccatgtaaacccagagatgaatcatgaacaatgtgtattctcaggagcttagtatttgatatgggagcctaacaagcaaatagtgtgtccagtaataggaactgattaatagaggaaagattaattaaccttctaggtgggtggggtggaaaagtaggtggggtattgaaggttcaacaggagttcgacagagaagatagaccataaataataaatatacggctgtatccactagagataaagttacattgttttttatgtacatgttgacttcttttggccttgccaatgcactgatatattcaaattcagctcctctctttttctcttcccttttcccttcactctgcctttcctccagccctgccttgaaatactcagccactgaaaatttcttaaagaatttctttatactttagtaagtcctcagaggataccagttcaccctactgagattttacaagaactttggtgtagctggggttttttttgcattcctttttctacggtagatataagttcttttgggttgcccatcaatgaacaaactaccaaccatttgatgtttactgcgtgactcctgtataccaagcacatgtgccatttcacttagtccccagaatgtcagagcagctttgtgaaatgggctgcccgttctttcttatggatgaagaaactgaggcttaggtaggttaatatactgaatattatacatgtagtgagtgggaaagccacagttcacctccagggtctttttctccctctttgctgccttgcttggggtcctgctcatagtaggtggacagcagatgtttgtctgaacatatgagaacactgcctgccacgtgccggtcagtttgatttgtgctgctggttttgtaacccacatggggcaatgacagctgctcaggtactttcctacctattagtggggccccagggtcacacatcagtcataattgacaaaaaacacaatttccctttcctctcaacttttatttctaaggtacttgtaagcaggtagattagattgttaacttttcattttttgctttgtctctctcctttaaagactatgtgaaagaatacacagtgccctgagagcctggcctgggaatcagaaacttagattccagcttcggttctgctggtaactcctcagtcattatgggtaaataatattccctctccagaactactagattgtgtccttggtgcagtctggggttcgggtggtcctagggaccctgcctactgcatgaacctgttatcaccatgtgaggctggaaggatctcagcgttggtgttgggcaggcctgagtgagcatcctggctcctgtacttcccagctctgtgacctcgggctaatcacctgactccctgatgcttgttcttgtctacgaaggagggctaagaggacctgcttcccaggatcactgtccagattgaatgagaaggaacgtcggcttccttccttctgtctccaactcctgagtgcactggttttagactaactgggtgtttctgcagttgaaaccaaaacaccttcattaggtacaatgttcattatacctcgcaacaccctgagatactcaactcttagatttcttgaagctcttttttgttaagaaactcctcaaaggaagatactcttctaccccattgagctttattagtgcttcaatgacagcaccttattttttcacttttttcccccttgcagacagaagctgcagtgtgaatcagtttgcatttatataatttcttttgcatttctttgcaaagaggaaaactccattcatttagcaaatgtccgtcatgcccaggccttatgttaggtgaagggatttggagagaaatagagtcactgacctcaagaagcttacagggaggaaaggtgtaaatacataaagtgacacatgggtttgtcctgtcaccaaggtatgcagtagatgctgtgggagaagagaggatgacacaggttctctcttggaagacctcatagagaagaggtgacttgtgagcaagtctttttttttttttttttttttttttttttgagagagggtcttgctctgtcacccaggctggagtgcagtggcatgatcctagctcactgcaactttgaaatcttgggcttcaagggatcttcctgcttcagcctcccaagtagctggaactacaggtatgtgccacttgcctgtctgatttttttttttttaattttttgtagagacagcgtctagccatgttgcccaggctgatcttgaactcctggcctccagtgatcctcccaccttggcctcctaaagtgctgggattatagacatgagccactgcacccagccgttgtgagcaagtcttaaaagatgagtaggaaggagtctgtcagctgtagaagtaggaagggcccaggcagaaggagcacagggcagaggctagagccctggtaggaggtgacacactgggtgcatgtctggagctggagccaagaggtggaggacctaagtggctacatcttggcagtcacccatatattggcaagccccaaatctttgtaaccagcccagattgtcttcctgagcccccaactcccatacccactgcccattcagcagctagctgcatgttgaagtgtagtggtcttcccagacctaacataactaaacagaagtcttgatttgttccttcaaaaacaaacaaaaaactagccttgctcctcctcagtcttccccatgttatgaggtccccatcatttttacctggctacccaggcctaaaatgtgggcatcatctttgattctgcttcctcctgtgttcttcacatcatctgtttgcaattctttttttgtttgttttactggttttaaaaattatttatttattgagactgagtcttgctttgtcatccaggctggagtgcaatggtatcatcttggctcactgcaacctccgcctcccgggtttgagaaattctcgtgcctcagcctcccgagtagctgggattacagtcgtgcgctaccactcctggctaatttttgtattttcagtagagatggggtatcaccatgttggccaggctggtctcaaactcctgacctcaagtgatccacccgccttggcctcccaaagtgctgggattataggcatgagccactgcacctggccaatttatttatttttaattaacacataataattgtacatatttatggggtacatagtgatgtttcaatacatataatctgtagtaaccagatcagaataattaacatatctgtcatttcaaacattgcagttcttgacaactcttactgtatgtcctggaagccaccactgctccttattattagtttgtttctttatcaaccaagcaggccagaccactgctctaccctcgttcaaacctccactgtctttcagcaggtctcttgtcagtttgctacataggcaaagaggtcttttaaaaagcaaatttgtgtcatttccctgctctaaactctccagcggctttctggcatctttggaatggaatctaaacatctcgccttggcctgccagcccctcctgctcatcttctctggtctcatcccttggcactctctgctcactccatttcagctgccgcatcttttcttactgttccccctgttgtctcatgggctttgcacttgctgtcctccgcctgagctgctcttccccagacaccgcctgtctcaccttcactccacgctggcctctattcaagtgttctcccacctgtctgaaaaagcaccgttctgccccctctccccgctgcttcaaccattctgtcctacctcgctttggtttctctcattagcactcatcactctctgactttatatgatatgtttgtttgtcttcttatttagtgtttgtcttaccccacaagaatataaatccatgaagatgggacctggtcttatctattgcattcagcactctagggcctaaaacagagcctggcacacagtgggtgatcctgaaacacgaggtgggtggatggacaaatgactgagttaatgcatgcctgcatgcaagcgaagactttggagtttatttcataggcagtgcaaatctagtagacatctttcaggaggtgagtgacgtggtcagcacttttattttagaaagccagctggtggcagtgtgggggctggactgtaggagggaggcagcagaattactttagcggctgtgaaaatcgtccaggaaattgatgctgagtgttgtgctagagctgtggggatggagaagaggggacagatgacaggacctgaagatctttgagtgtctttgatttctattgggataacttggtatagtgattcctttataagaaaagcaggaggggacgaactggtccagggagagactgttgacactctgtggtgtttttctcaccaagaaaacctaagccctgggatgcatgttctctgtagtggcattggctctctggggagtgactctgctgctccgcagcctcccctgttccattttttaataagagaatagtcaagatggtggtgtcagtgagtgggagtcttcttcatgcagatggatccattgatctttgcatactccaagccacactaagtcattggttcttttctcgcagtgggtacatttcaccttatttgattctgatctgacaaatgctgctttttttcttttctttttttttctttttttttgtttaaagaatacctagactgtgctcaagttccaggtggggtttacagataactggggttccagcatctcccttcttacaaacacgaacaggagcctttgccgtccttgggtctcagggaggcagaccggcagcaggcacacattcctggcccaggcgtagccatgctgtctggtgctgccttttgagaccttttgtgtgtgtgtgtgtgtgtgtgtgtgtgtgtgtgtgtgggcttgaatgattccttctttcaaaaattcaaccctctccaaattttgatgaaaaccttttcatctctgagtaagcacattatttcccatcttgatgaggtgtgtcccctctgtgtccctgagagtatgtcatcccagccttttaaattttattgtatttttttattttttattttttcatactagtcaagtgcagtagtgagaagcggggaaagagtagaacaaggggccgggggcggtggctcacatctgtaatcccagcactgtgggaggctgaggtgggtggatcatgaggtcaggagattgataccatcctggccaacatgatgaaaccctgtgtctactaaaaatacaaaaattagctgggtgtggtggcacacgcctgtagtcccagctactcgggaggctgaggcaggagaattgtttgaacccgggaggcagaggttgcagttgagccgatatcatgccaccgcactccagcctggcaacagagcaagactctgtctaaaaaaaaaaaaaagagtagaacaaggagtttgatctgttacagactgaactatcaatggagataactcactaccttcggaccagcctcatcccagtcttttaagcctggtccagaattcctaatcctgcttgtcaggcccttcaaagtgaaatgctgtaccatctgtatagctggattctcacctcctacctctcctctcccttccaaaggttccgatgtcataggaatctacgctagagggcttcctgtgtgccgggcactgtggtaagcacttcacatgcattctctctaatccttaccacttcggggatgtaaggattataatcttctttttacagatgaggaagctgaagcttgccactgcttagtagttaagagtatgggcttacagccaaacagaccctggattgattctcaactagctggggaccttgggcatgctacttaatttttttaacctttttcacatttagaagataaagataatatatagagagataatatagaagattatataggtattatatatatatatatcttctatattatgaagataatacagagttgtgataaaaattaaatgaaatgaccagacatagtggctcactgttgttttgttttgttttgtttttttgagacagagtctcgctctgtcgcccaggctggagtgcagtggtgcgatctcggctcactgcaagctctgcttcccgggttcacgccagtctcctgcctcagcctcccgagtagctgggactacaggcgcccgccaccacgcccggctaattttgttgtatttttagtagagacggggtttcaccgtgttagccaggatggtctcgatctcctgacctcgtgatccacccccctcagcctcccaaagtgctgggattacaggtgtgagccactgcgcccagcccatagcggttcactcatgtaatcccagcactttgagaggctgaggtgggaggtcacttgaggccaggaattcaaggccagcctgggcaacatagcaagaccacttctcttttatgaaaaaaaaaaattaagaaaaataaaaattaaatgaaataacatgtaatttcctaagtacattaagtacgtgcctactatgcgccggacattgtgctgtcagcaaataatagctcatcgcagatgctgttatcatcatcatcatcccaaagccacagattgagtctgtaggtgaggccctgcctggctccaaagattgtgtttttttctcctgttgctcccaagttcacctgtcccaaactttctagcccctaagtttgcttccttgcgcttttctggttgtgccatttgtccctgtctgggcagtgggctcaagctaaggcacagcagttttccagtccctttgagctactgacctcttttctgtcattgactgaacagtttccggtggctgaatcgtctgtgtaagagcttggacaattttttctgattgttaccatcatcgtgtttactgtgaaagggcttcctgtatagttgtttgtgttagcagcattgtctaaatgaaacaagagtggcaacagaaagggttggtgagcagtcctagtcttttggggtcacagatcactttgtgagtctgaagaaatttatagactctctcaaaaaaataaacgacaagacaaatacaagcccagcatttttcatgagacgttttccctgaagttgatctggaaggctatgtgctcttttgtcattgtgctactccacattcacagccatgaagggtgtcatgtttctgcagggtgtttgtatttaagggttgttgggcaatttggcaacactatacctgtttcattgatactatgtgctatttgcatttatttcccatatctgagatacgtattcacacatgagaactggcctggccattttgatgagatgtacctgctgatttgcacataaacacaagccatggcctgcatctagaggatcgactggagaggcttttttttggcccaaaacatcagactagtaggaattttattatgagttatagactaaaaggggggataaacttagcttcagcagggtttaatattctcaattcaggtaagtgtaaatctctacttttcattttaaacatttttgaaatttcagtctttaaaaaaatgcttgttttttttccttccaagttttaaggtatgggtttgggagaaggcagattccaaacactttaactcttcgacctcagacttgcttatgagcctctctttggaacatttccagtgaaccgtggagcaagcctgccacatccagcagccgtaggcatgatgatcactggtgccgatggcccctccactccctgcctggcttttgaggccccgcagaaagaaaggaacagaatcctttcataaggaaggccccagaatcctttctcctgctgtagctatgctgccagtgtcctctgtagatggaaatggaacttggattttgggtgccagaactgaattcatcacagataagattagttgatataaagctgtttctgatgagcagtttttcctccagagttttcatttttgctttttctaaattatacaaaataatagacactcattacaaagggaggatcataatgctccatacctggttttgaattccacttctatcacttattagatgcagccctgggcaaaacacacgccctctctgagccttgatttttctcattgaatgggagatctaattattttacctcataatactgctgtagggattgaaggagattggtataaataatggttttctgagagtctggtgtgtatttgctttttttcagttaatatgaattgagtacctactaagagctggtcactgttctagttgatatggaaccagtcaagagcaagacagagagggtctccgctctcatggtgctcacattctaatcagaggaggcacaagaacacaagatcacttcagttattaagaaattagaacccaggggtagcatgagagtcacaggaaggacccctttacgtcggatggccagcagaaccctccctgaagagctcaatgctttgtgacccccccggtcccaagttttccaggactcctacttttaaaaacactgcccctccaagtatataggtctcaattttgagtttggaaaatctgaccacatattagttctcttgttcattaatgggcttcccatttagagagtgagttcctggggcaggagccatgtcacaggaccttttgaaggtctcagggccaatatggacgacacttctcttgaacactcacccagttgggctgacatgaaaacctcatggtgggaggtggggggtgattagtttccagccagagcccattttgctccattgctgctttgaacattctggtttctaaggagctggaagtagtttctctcagcgagaatgtggcacactgtcatctcctgattctctgcatgcagttcttcaatggcttgttgaggctgcgtggaagcccagaggtcggggcagttccaactcacacactggcatttgaacggcagagcagtaagccctacacctgacataactgcattgccttcttggggtacggtacggatttttaaatgaccatttcagcctgctgggctgggcaacggtgatccaaactgatgagtcaggaagccactgaacagaaaggcaggctgcatctgactcacctgtcatgtcgatagttgacctccttttgtttgaccttgatttgctcagtgcaattaaagatgctgttgtgagtgcacttctgctacctgatttaaataaagtctaacatgtgacagctcagggtcttaaatgcacacacgacttaggcagacggacagatgggtgagtggttagcctttcacttacctctgaattgtaattctatcacaaggaaagggcttaatttcaggaacacggagtaattatttgagactagatacaatgccaaagcagcaggccttgattccttgctacagggcagcttaatcaggaaatggcctagatggccgcctttcaagtaggtccttgcagtagcttggcaacaggcacagggtcataattggaagaatttggctgtgagtgtctgtgggtgtttacagtgcactatagggcagggcttctcttatttatagaatattttgagcaacaagcagcagaaggctgaaaagccactaaaatctcgatttatttttaacaaattccatttttctcctcatcccagaaggagaactgagttattaaaaaacagttaaaaaatacatcattgcagagcatgccatatctaattatggggttgccagcatcggcctgcagccacatttcaagggcttcgtaaatcaaccatccattcaatctgtgaacttatatgactcctgttctccatttagatgtagagcgaaattattggcaagtgggtgctgatcagaaaaagttcttccctgtctaaattaggagatgggagggataaatatagaatagtatacttatgttctcaaaaggagataaaatcattcttcattgtccattatacttagctgcacaaacatccatcccattgcactaaatagccactttagagttttcacacattgcaatggcagttctgtgccactcaaaggcgcagtattgtgatatctcgctgagcctaaacctgagtgattattgctcacgtagtcatgaagagacataaacccagtgcttttttgcctgtgttgtcgtagtgtactagagctacaaggtgggccttcagagagacactagttttaagtatatctcattgtaggtggggaagcagaggcctaggcaagggagtgacttgcctagggtcccattaagagtcatggcagaggtgggctggggcggcagtctctgtgcttctcttgacagtgccctgctgtgctcactggagctactgtattaaacagatacccttcaggggttcacagtcttagaagacacaggcacgaagatggccaaacaatcagcccatgcataagcagaccaagatatgtgtatataacagattagttgagtggtagagaaaatgagagtggggaattttggaatctatttggatagcaaagcaaaggtaacatcagttgctctctgacccacttgggaaaagcttatagagatgctatgaagttttctaatggaaaaaggtgcagtacatttgccatgtgttagtgggaaggtaagtatgatgcagtggtgggtggtaggaggcagtgaagataagtattgcaactttggaggagccctgggaatggattgttgaggtgatttcataggaatacgaaagggagcataggaccagggcacaggccagagacaggcaatcccaagttccctggagtaccctgcccttttctgggaaagcaagtgggtggcatgagtgctatgttcccaatgctctggccccacccctggtagaagaataataactgatcatggtgggttttttctgagcctctgtatctttgagtagcattctggtagccaatatcagtggactggtgccagcctgtgtggtgaacctctatctctttcttgccctgggctgcatgtcaggcacagtgcctaagccggagtgggctttggggagttacttctctttctgaggctggaaggggcagagggacgtagggaaaactttgctagggagggcaaactgtgaaagcctctggagaagtcacctgttgggataccaaaggccagcggttttagaggatgcgaagaggccgggcggggttggtctgggcctaaactaaggctgtagcggctagcatggagaggaacaagcgacggggagtgattacggatgaggaagacgtactaggatttggctacagacagacaaccaaccagagagtaaaagacagtgacatgctaggatgtgaaccacctactacagagaaggtcagaggtggggagggaggaatcagggctgtgggcagatccagcagctgggatccaaagctgaagcccttgggttattgaatccattctttctgagaagagatggttgatcttcctgcccagggagttcctagccagactggacagtggttctcaaacatggtgccaggtgttgtcagatagcaaacaattagtttgtacacagaatgtccccaaggtcacctacacatatttgtttttcctaatctttgatacctacagccacttacctgctttcgagttctcagagttgagaacatataaatttgcagtaacaagtgcacaggaaatacttggaaaatggctgatgagctttagtttggaaatttcatttttttcttggatctggattataatttcagtacaagctagcaatttttcttgttggtaaaatagtttctagttttaaaattatttctgtagttaataaagttaacactatttcatgatggaggctgccccagctctgaaccaattttcaaaaggcagattctcctctttctctctcttatttcttgctcttgaacatttcactgtgttctagcaacttttcctgtgtgtgactcggccaggagactgacttgagtaagatccaggtcaaggggttgtgtgggtgggtcggtggtaaggaggtgctgaagaacactaaaacctttgcctgagaggagtctgggaagtagcctgcgaactggaatgaccccaggcttcctgtcacggtcatagcccatggagttggcagacttgatcactctatattgtgtgcccccaggtaatggcattagtcatcgatactgtcttttttttttttttttctttgagagagagagtctcagtctgtcgcccaggctggagtgcagtggcgtgatctcagctcattgcagcctctgcctgctgggttcaagtgattctcctgcctcagtctcccaagtagctgggattacaggtacatgccaccacacccagctaatttttggatttttagtagagacggggttttgccatgttggccaggctggtctcgaactcctgacctcgggtgatctgctcacctcggcctcccaaagtgctgggattacaggcgtgatccactgcgcccggccaatactgtctttaaatcgtccagagtaagaaaatgttgatagcttgttgtcacagccctgtcattttacacattccctgaattattgtctggcaccagcaggtgttccagaaacacttttggttctttgagccattactggtcattcctgtcaccactgccaccaccagatgtggttctgagagcattaagtaaaagttttgaaggttgtgtatgttaagactggtgcaaagtccatcctccttccttcgggctgatcagccacaccctggctatcagcacttatttactcattttcaaagtgacagaatggtccagtgggcaggggcataaggggtcacttcctctaaccacccgccagtgcaggaggatcccatctgcgcagtggctgcccatgacaggcagttccctagccccagtcggacatctccgcaccaggcatcctgctcctgctttatggacatctttggctcttaaaaatcctcctttattctgaccgcagatctgccttttggcagtgtttccttagtgacctagttctgctttttgtggcaacacagaacaaaggtcggtaggcatggcacaattccagcttagaagtttgaaggtagtgctcatggacccacatcctttccctctccacccactctatctccctccacaaggtttatgttctccagtgccttcagccattctttctatggcatggcagtcagtattaatcccagtaaaggtaacatgtatccagagagtgcttgccatgggccaggcactgttctaagctccgtacgtgaattgtcttatttatgactcaaaatcaccatatgaggtgagccctgtcatcatcctcattttaccaatgaggcaactaaggaacgagggctcacatcttgtcccgagccatgcagtcaagcagcagagcagagatttggggctaggcagtgtgactccagagcccgtgctcttagttgtggtgcaagactatcttacagcctttcctgcatagtgccaaaaataagcccatggtgcactagacttgggctggccctgctttaacttattttgcaagaaatcattagacaggagccttagttgaaccattttctgtgaaaccttcagagtttgttttgacagaacagactgcagggcagaggcatctgcactgtccccaacaaatgggttcatcctgtagctctgccaggccccacagggttcataaaatggtagctttagatcaaggtgacaaatacagggctcttgatgttttttttttttttcctgaacatggtgcctgagcaataggtttcttgtttaaagtgcttagtcatggttttatggccagaaagtagaaggagagaggtacctaagaattgcaaaactgggtcatctcttcaagtgcctaatccaatattcagtctcagagaacaactccagcagttacgggggtggaaggatgtgatgaccacctaccatccaaaactgggatgtaggtgccaaatacacattctcctgaaatgatccctggtgcctctagccaggctcttccaggagtctagagaaagatggcccatgacttcatccagagtctttgcttcctgtgctctgggatgcctgggcttttctggccacagccatacactgacagggccagaagggctgagatgctgggattgaaccatctttctctttgtgagttgctttccagatagcacgcattccggtcactattttccagagatttaagcagcaaagtgagggaccctcgggcatcgactcagagacctggaggggagcagcttgaagcaatgtaaaaagcactggataaaatctggttctaccaaaaatagggctatgagagttacctcacctccctgaaaggtaatatctttatctgaaaaatggggatgataatactactaacctggaagattgacaggaggattagatgagattctgcatggacataacagtccttggcatgatgtctagcagtgaagaaacataaatatgagaataataacttccttcttcctccgctgtctattccttctcttattctagtcctgtctgctgttgggttttgtctgttgttttgggtaaatagctaacctctctgcctctttttgtctgtagaaatgctactggttctgaatgggtacttcgcgccccctataggacatcgtgggaatgtgtgtgggtgatctggatgtcacagtgacccagacgaggcttttactgggggaagaggggaaggcaggggtgctagatataatgcttggggaacaaaagattgcccaacatctgcatagctgcctaatgctcagtgcattcttgtgggcaaaaccctgcttaaaattatctgggcctagagtctgactccaattaacacataaacacaaataatttttgcatgtttttaatatatactgaattttctgcgaacacagctaccaagtatataagatttacctatttgttatgaataggtgcaagcatttcatatatctttcatgatgttttctggtgtagcggtgccccaatacttacatattgatttacatgttgtcttatttttaactatatttcctttcttctttgtattacagttagggcattatattgattatttttggaattataagtgttgtaaggttatattacttacagatttcaagagagctaaagacatatttaaaatatttttattgcatttttgacaatatgaaagagcaagagagagagagtgtgtgtgcgtgcatgcatgcacatgcttacaaattagctagaaaaatcctaagacagactttaaatgaaaagaaatggtttcatagctcctagaaatgtccttttacataaggatatgtagtagaagtccaaatttttaactgcattcattgtcagagaaatgaggtgttttgatgtttcccctgtcccttttagaaagtatatgatcctaaaagagcctgaaacagtttccattgtcatattttttcatttttgcaatctctatttttttcactcctcccacctgtgcatatatatatttaaaagcgtccccatatagacttttaaagaaagaaaagccagccaggctccccactctttactaagtttgttttgattgttttgtggcctctgcctgcacctcggcctgagtcagactgactctgggagctgtgggcaggtccaagggaaagtcaaggaggtaatgaggcttctcgtgggggcaacttgtaggccaagttgggtgggttgaagtcagtctaccagaagcttcctgcctcaagcctgggcctctacctgtcctgaaacctgagggctctccagttggaccacgagggtctgacatccaggaggatccccaggagagagcaaccgtcactagggaatatgctgcccagcactgactgtactgagcagcagtgttgtgtgcctgttgggttgatgccatggatagccaggcgttcagaactgaacacgacacctaaaaggcaaacacgaactgtgaatgtgccagtgtcagatgctgccttggtggtcatgtgtgggctggcagtaagcttttggtcccttaacactcgctgttggaaatttcccaaggctttcatctagggtagctggtgtgtgatttccctgtcctttgttactcctatctggaaactagttgaaatcttttctatgatattgatatagttacagaaaatctgaatacttactactaagttttatagttctgcttagttcaaagtaacacaacctcataagagaaagtttgaaacaggtagagaaattgaaagatgaaaatcactacccattatctcagcccacaaagatagctactatcagcattttggtttgtttcctttcagtcctttctgtgtttatgaaattttattatataaataattcatgtccaatatagaaaaagatggaaaattgagaaattataacgttaaaacaaaactgacccatctcaccagttggagatgtcttaatattctggtgaatttttttttgtcttttttctatagacacataagaagactgggaaatattgtgtatatacgtttgtaccctttttcaccaatgtatatcaatgtatatcagttcactaatgaatactaattaaatgaaaatttattaaatgtatatctatttatatctattgatatattaacagatgccagtgcatatctattaaaagagtactatgtaagagatgatgttcttaaacataaaatttaatttaggcatgaaattactttgtcaaaagatatatcagtttatattcagatatacagtgtactgacctgcccatttaccacatcttcactaatactggtattatctttaaatagaatctttgctaatatgagcagtgaaagtggcatattatctattaaattttgacggttatgagattgagcatgtttttgtatacttactggtctttgtgtttcatcttttggggtttcctattcatagtctctgcttagttttccactgaggtatttgcctttttattgatttataagagattttgttttgttttaactcagaaaaggtagtattgcttcagttgtcacagagctttggagtcagacagagctgggtttgaaccctggctttcctacttgtgagctgagggatttcaggcaatttatctgacccctctcacaattaattagttcttctttgagaactaaacgaaacaacactgactagcatgaaaaaaaagcctggtgtgtggtttctgccaatagtttttgtgttgttatttttgttgtgattcctgcactgagtattttctcagaaaaatgaccttgagctgtacgactcatgcctgttcagacccacagacacatgatactcactatatccaaagctcagaaaaatgaaactgaaatcactgaagtttgtgggttttttttttaaattcttcttgccagaaggagacaaatgaaggaaaaaaaacaagccgatttcattttcattaagaggaatttgtagagttatttctggggtcaggcaggatacattcagacgaacattttagatctagggctgggaagatcccgagactcgttatagattacatcatcttcctccaagtgcacttgccaggcaaatggacaagtgcattttagaaaggttttcagttgttcacgtttaaacagaaaggatcacctggctaacttttagttaacccattgaacagatgtgccattcccccagcccattggttattcatgtccttgttactggtttttgatatccttgccccgtaggtgggaggagggatgggtatgagcctgccctgccctctttctcctacttgggacagagctgttgcttttatttgctgagtcactgaagcaatagagcatgtgcagagtcccagcctggaggtgggcatatctgggttccagtccctgctctagcccttctcagctgtgtgatcttggacaagttgccatacctctctgagcctcagtgtcatcttctatgtgatgtcgatgcctcccccaaaaggtcgttacgaggaccaaaggagacacgtcagggcaggaaccatcctaggcacgtgtttgatgctcagtaaacgggacgtggtcagtgttcagagttgtgggggtggcaggtgactgctctgtttcacctccactcacagcaacagggcctgtggtgtcacctagacatctcataggcatcccacactgaacatgtcccaaaccagcagctcctccctggatgggtggatggtgtacagggacctcttcctccagctgtcacatggggcatgtacctggcaagtggctttgcagccctagctgcccccttggctgggggcctttgtgcagttcatggactgggagtcacccccatgtctagaccgtcaggaaacccattggcttttcctttagagcataccaagaatcaacttctcagaacatagcaagagttgactttttgtcaccctgccgtggccactcagactgactcctcttacacctcacatcccattgatcagcacagcccctggaaatatgtctagaatccagctgcttctcatcacccccacacctaatacagagggctgagtcatagcatctcttccccggactgttgtagccgtctcctaactcagcttcctgccctgcttttacacacacacacacacacacacacacatggtatcttctcaccactgcagccagacttaaaacctaagagggatcatgtcactccccattttactcagagtcaaggccaagatccttactggggtctgcaggcccccacacctggccctctgactgcacccctaccttccttagctgtctcctctccctagcatgccccaggtcgctggtcccctagcactgggcagctccctgcggccctgttcactagctgtcctctgcctggaacacatctgtcacctctcacctcctcctgtccagcctccttggggcctttctaactgcctccctcctgtggtctgcctcctccccatctctgactttcctcccgagcacttactgccatccagcacccgacataacttacttgtttcgtttgcttgccttcctcaccaggaggtgtgccagatgaggacaaggatttttatatccctacccccatctgcagcactgccatggagaacagtgcctggcacttggatgccctcagtaaatatttgttgagagactaataagtgatcgtgggccagcatgccaacagtgtcttcgttattacaaaattgtcccgaattgaaatttggctactacaagcagtttgtggtggaaatttactcaaattaccaattctttcactgaagaaattacctggcatatgtgggttctcaataaactgtgttggattgcctcaaggctttggggcagtggtagccgtctgaggcctccttgccagtcaaccaaaccctgtgctgggtgggacataagagatgcccccagcatccttagctgatgctactatgtcaccccagaatccctggggcagcccacccctcagcagcagctgtcaccctgctgggttccgcttttcctcctgtgggcttcgtctccctaaggaaatcattgtccttgctttctacatcttatctccctgagcagctccaaaattctgttattcatatcccactgacctttctcattgtcctagtccaagcttctcacaggaggagttgtctctctgttttatattaaaacaaagcggttggactcttaaaactctattcacttttcagattctttggagtcctcaatgcttcctgctatgaaatgctgcgctctggaatgccttccagacccacccccaggatacctgtagccttccctgcagccactctcctcaactccctcctcgttcccaggggtcaatgtcctggatctctccagctttaagttccttcatgtcctcttgccacccctgctctcaccatctctgagttcttgtatccccaggatttcaacctgagtttgcatctcctgacatcacttttcccagccttctcccttttcaaccagcacaaggccatccacttccatggccatagtggacgccactgagcatgctaggtgttttcttctattcaactcatgtggtctgcacaacaacccagtgcggggaatccacccctttcacagatgaggcatctctagctcctggaagtcacctaacttgcctaggacatgcagctagtaagtggcagggctgggattggaacccaagaggccccgccctgaccaccatcctgccctgcctctcctcgggcacccagaatcccctcactctattgtcaaaacccaccttgtcctgcctgtctggtacctaggggagaaccctcagcctcttcttctgctgccacttgcttcctcttctgccaggaaggtcccacgcctggccagcctgctctggagacacgcccactgcctggccttgccaggaggctctgatgctctgcaggcttcctgtcccacggatcccttcctgcctgtcctggggtcccaccaccccactttgtagttggccttgctctttattgtggtgaaaggtgcaggccattccatccaagatcctataatattccttttctctgctgttgaatgttcttcccattccccccacattctcaaagaaggcatgtggctttcttcactgcgtctcggcctgccctgagtccagcccctgctgcctggcccagcctgtcttgttggcatcccctaagccctagccagaaacacaagcacctttcaggtgctccatcctaactccaccctccctcacactggcctctctccctttgccaccagataacagcagtgcattcttttgtttcctttagaacaagatgcagatgttttccagaattttcttcaacttcaggcagtaagttttttggtgaaaggagtattactccctgagtctgtagaaccaggctctctcctcttattctgtagcaattaaagacaaagacaggcaagaaaacaatgaaaagaaacaggagccaggctgatgcaccttcatttagctggtccttgagcatgactcattgatccttcttgcttccatcagggattgcaccctgtgccctctttgaatgcaggggcatgtcaaggccaagggtcaggaagagagctttggcctcgccagcctggtccccagagtggaagtggcagggcaggaggggtgtggcagacagagcacatatcgcccccagccttgcccccagatgttgagtgctgggtgccggagtgcagaggggaacaaggcctggaccctgcctggggagaggcagcacctgggagatctttgtggcttcagatcccatgtggtcctccaggtaaagcagagcatctctggggtctaggctgggggaaaactcttgcaaaaaattcctggttctgggacagaatgcatggggtctgcgtgaggggcagaggacagtgccaggccagtgagcacgcactgggcaaaggaagtggccagagaccactcataagaaaaagtgggacatgaacctcagagcctgggctgctttcagaggagccaagagcctgggaaataagcatcttctggtgaggaaatcagcagggggaggggagggtcatacaggaggggacttttaatcctgaatggccttgcagggcatggttcccctagtgtgccccatggaacccttggctgttagatgtgaggtgataaatggtgtgtggatgcatacacttgggactcagactctgctgcccttagactttcaccctccacagggctgcgtttaaaggtccaagaagccctgcagaagaaaaacctaactattgaaccagcattccctatacgtatttggcccctgattttttcccccgaataacatcattacaatcctatgggattagtgttccatggcagaactttgggaagtgttttttgaagaatttgtaaatccctgcaccctctggactgtgcccatttcttagattgcatggaggctgtgctgtacagtggaaggagtatgggctttagatgggactggcctgtgtttaaatctgctttcccattatacaaaatctctgatcttgatcaagttacttactctctcaaacttagtttccttatctgtaagacaggggatgaaacattagctagttgtcttatgaggctgttgtgatggttaatgggaagataataatgacacttacagagggcttgttatgctccagacaccattctgagcactttatatatctcacttacttttcaccacaactgtgaggcaggtaatgttatccttatcctacaggtcaggtcaggagaccaatgacacatacaggctaaatgttgtgcccaacatcacacggctggtaaatgtgggacctaagatttgaaccctaggcactcatacatgatggggtcaggatttgaaacttgaccgtcatctcccatcagagaacatgctctgaatcagtatgttctaaagggtctagagcagtaaaagcactaattggtatcagttcccttttcagatggttcgtggatatgttagggggattgatggttcctgggactccaagtcattctgcagtcattaaaatcagccctgttgaaagagtaatctcctcgatctgcttgcccactcagatgctcccattgtgaccattttgtttgctctgctgcctcatcctgggccacttcaatttgggtggctgctcagcgttcaggtggagtcgggccactttccacagccatctcatctgtggcctgtgcctccacttccaggaccaagagtccccccaggatgcccagtgagttggtagcttgttctctttctacacctcagtgatggacttgacaaagggttaagaagacatcccttttatcattcagcaaactgagtgcctttactgagctagatgcatgccctgggggaactagcactgtttggtgacttagttagacctctgaatccctctaccaaccctcagtagctgtctgggagactgggattctgtggactctcctctatcaacgatattgggggtcttttccacaaagaccagcctggttttgattgacaaagtgcctcagatttacaaatcttaccccttgcaggatcctctcaactgatcaagccccatagctccaaatgccgtctccttgattgatgtttaatttggggatccacaagcatctagagctaccagttgaatttgggtacccaagggccacaaatgggcccccctcacaccctgacccctgacaaccagcacctttgagactgaagtaccactgcatatagtgctgtcctctgctcagggcattctccctaccagccaggccacccggcaaacccctgcaacacctcataagacctcttcgctggtctcatctccttttattaacacctcctcagcacccctccacacacacccaagcccacaagcaaatcattttttcatctgttttgctcttgtaccttacctatgctccactaatacaaaaaaagcacgccttcctcaagacacttgactgccacctgctggagagttgtcatcatggctcaacaaatatctgccacttctaaacccccaggcacctctggagtagggcagtgcattgcttgtacagctgtaaacatggcctgcctgttgaattggtcatgctgtcatgtacttattaaaacactcgtctttctaactggactgaggacatcttgaacgtaaggactgccgatttctgtcttcgtccccattgtggcttctgctaggggctagagaaatgcttattgaatgatccttgtgcaaacacctgttaccttaggttcagggcatctgctgtcattcagtgaaggtcttctaaatctgtctgttgcaaagcaaggctcgccacaggctgtcagagtaaccatggaggtcggacaggacttgcagtggggacagggccccatcagcctctcacctctgctcagaggcaccaccctctgaacagatcagagcataaacaggtcagagcaattcagcattcattccctctacagacatcagggcaggcaccatgtagtggagagtggggccaggggccatctgccatggctgtttgggctggggaaggagagcagtacttctggagcatgtgctgtgctcagggccagctccctgtaggtaggttgtgggaatgcagaggtggcaactcaagcacccctgctggggattcagagttttgtggagaagtagatcagtaagcacatggataccagatagggttgtcaaggatgttgattcactgttgtccctattttcctaagctcgccacatcatggaaggctgctacccaagtgacattcttgggcttcaccaagtgttttaacagagctccacccagctgtcacactaggggtaacacagtgggccagaaggagaggcaggccttccctggggtcccattttaaaaagggggaagtcctctgttcttttacaacacttgtttaccccaagccattcagcatagtattacttaggtcccatacagagaaccttccaacagatagctctccttgctcaggcctgtcctgatgaactccctgatattcttccaggtcttaaaagagtgagagctgagcatttccctctctgccctggctgccaggaagctcagagataacttgtttgctcagttcctgtagctttcctgacccaggacttctttttcttataaattctccttgttccttttccaggaatgcttgctttttatgttttgtttgtttatgttgcttttgtctctgtattatactttggggggtggtttttggaggcaggattggcagcagccatggtagttagaagcaccagcagtaaagctggacacacctgggtttcatccccacttgctagctgtgtcattttaagtaagataagttgcctcttcagttctcggttcctcaccttgaaaattgggataatgatcataatgaatggataggttattgtgaaaattaaacttgtttattgtaaatgcattgtttcctgttcctgctcttggatcaggcttgatctgtggctgtagaatcctagtcttaatttccttcttcctgcctgtgtctgtcagcatatgatgagttgtacaatagtagtgactaggggaccaaccatcccggtttgtctgggacggaggggtttcctgggatgcaggactttcagtgctgaatgggaaggtcccaggcaaatggatgagtcggtcaccctggtaataaacaacctcaacatctcagtggcttactgtagcaaaggtttatttcttcgttgtgctactgtccatccagggccttggctaaaggaggagcctctatcccaggaaattgacagtcatgggcacagacagaggaacacatgttaaaggtcctttagaaagttgtggctgtcacttctgccctcattcactggttggggccagtcacatggccaggcctgccaccaggctgtgcagaaccttcccactgggtgggacagctcagcctggaacactgatccactctgccaggctcacctttctcttcttttgcattttagggtgctggagcagggaccagggaaaggagagagtcacttggtctgaactgggggtcttggatgtgatcatcttcctgtagatggtcggtatgggtttcttaaggggcagggttcagcttcaccctgctctgctcagaggagcagctgtgtctcctttggacgccttctagtggttgatgccctcacctttctcagctgccaaggcctctctcgacagggcaggctgggctgtgacttctcttccaccctccttgctccttcctgtggagcccctgagatcctttccccatgctcctgggtggaatggagggtgccctctcacattcttccaaggcatcttgcgcaagtccctccatgccctgctttctctggcggtccagcatgcctccatctcacctttgggactctctagcttggaagtgggcacacctgcagcccctgactccaggaccacaggctaggctctccccaaagcatcctcatcacacaccatgtggatggccaggtcagggcggccgtcagagcccaccctcggcaaggataccctctcaaaggcacctctgttggctcaaatcccttttggaagtagcccagaaagaggctttcttttttcttatcttttgttgttttatttattgttcttgcatctaagaacaccttcttggtcagaaaacagttttccagaaataatgttaagtaagtgtcacaactggtttagctccctaacctggtctaagcatataagagaggcttttgaggctgggcgtggtggctcatgcccataatcccaatactttgggaggccgagatggagggattgcttgagtccaggagtctgggcagcatagtgagaccttgtctcttctaaaaataaaaaattagctacgtatggtggcacatgcctgtagtcccagctacttgggaggctgaggtgggaagatcacttgaggccaggagttctaggttgcagtgagctatgatcacaccactgcaccctaacctgggcaacagagtgagaccctgtctcaaaaaaaataaaaaaggctttttgatttttgttttgcagaagtaccaaaatctatattagcatttattatttttatttctataaagtaaatttgagtattgggaaaattgatcaaaatgagaaatttcatatggagtttagtacttgaaatttggatccttcatctaaatttcagggaagtcagggctgggcatggtggctcacacctgtaatctcagcattttgagaggccgagatgggcggattgcttgagcccaggactttgagaccagcctgggcaacaatgcaaagcctcctctctacaaaaaatataaaaacaagccagacatggtagtggtgcatacctgtagtcccagctacatgacaaactgaggcaggaggatagtttgagcccaggagatggagattgcagtgagccgagatcatgccattgcactccagcctgggcgacagagcaagactgtctcaaaaaataattaaataagtaagtaaatttcagggaactcagagaacgagaaaggacatgaaattgttcatttatttagcatttgttgagtaccacctggagtgaggcacgagatcaggcacaggagacgcctataaataaggccctacctgcctgaagcttatgggaggtggaggagacacgcctacaagcagagaatggtcacagggcgtgaaggagcctgggcaggagctgctgcaggagagccagggagagaggatacagctctgaaggcttctccaggaggtgtgcccacgggcacaggaaaggaaagcaggagtttatcaggtgactgggtggttgaaaggagccacacctgcaagaaacgtgggcccagcagaggcagggtggttttgggaactcttgtcttttagtctgtcggggggctttgggtagcagatgggagggttgggctgaagactaagcagtgtttcctgctgggtgggtttgaactttgtttggaagacttagggggaacagtgaagctattgcagtggtctgagcaagggggtatcccgcctctgaccacagtggagaggggatggggctggagacgacagcagactgaacagaggcagtgacaaggatctggagggaagtggctgggcccatcccttagagggctgtgtgggggctgtggggtgtgggaggaagagaggaaggaagcccagggtaggttctgggttgctaatttgggggctgggaggatagcgtgtgacctaaacagagaatcagatttagatggaattacctatattaagcctggggatttcatatctatttgctgctgctttaccagttgaggctcaagaatgagaagcacaaaatttctggtcacattatttgcatgtgcccagactggggttaacagaatcggacagtgagcgttcctgaatcagactgcaatggggaatgaatgccttgggaggctggaagcagttgtattcgcagatattcatttggagatctctatagcgatcgaggcaaagataccccaaagactgcaagaattagccagtggaatttgaaatgccaaaattttttttcagaaaggtcaggaaagccccgtttaaaatctaaattttgccatctcaaggcagtgcagggatggattaggaggatgtggggtgacccttttcttcctttcagagccagtttctgccagacacaggaatcctccacatgagtcatagggtggagaggagacccctcagtcctttcagtaaggtgggagggcagtaccgcccggtggctaccatgaaccctgtttcagaatttctttcttaacttcgtgtgtgcccaggtgcacttgagattcactgatgttttctttagaccgaggagctcgcttcagcagttagtttcaggtgttggctctgctggcattatgcttcggcttaatgttttctgaagacttgttttctgttgtttttcattgttcttgttgtctggcttcaggccactaccttcaacctagcaagagctgagtggtgccttcagcagtgaggtagcttctgaaggccaccactctcttgctgtgtgactttggctagtttctccacctctctgtgcctcagtctcttctgtaaaacggagaacacaggagtatctccctcatagagttactttcaggtttcaatgagttaatctacataaaacaataaggatagagcctgacacaaaatcacactcaacaagttttcacaattatgattacttgacccagtaggagaaataaaaaacacaactaacttccttctaaggacatgcccaagaatccagttttagtaactttgaaggcattgtttttcaccgaaaatatctcctgccagattttttcatgtgtttgcagcttagctttaacaaggagctgaaggacggccaggcagcaaggggtggtgagtgccggtagagtgtgacgagctcgcccagccttcctccctgtaattaggagtcatgaaccatctacaccatctcccttagctaataagagatttttacatttacttacctcaaagtgacctgtctgggttttcttttcttgtggcccccactgtaggtttttggaagaagctgaccgcctgaaaagaaattataaaacatgaaaatcgctttgaggtgaccaagtccagaggcccctaactcctcccaagctggatctggggtgtaagaactgtgacttcaggtaacaaagtagtatcccctccctgccccctgtgaactcatgattcttggtagcttgcatggcagttcttcctttaggaagtgtagtttcttccaggaactctgaaacttggggtattctacctcatgcggttgtttggctggtcaaaaaagggagtgggggattctggaggtacttcatgtctgctgcatggcccaagggggccagggctccataaatcaccaagaccctgagggcagggctctgtactcattcctggccctgcttctgtaaatgttaatgacaaaataacaatgtcacccacccaacagggtctttaatatgattaaataatcatgaaatacttcttgaaggataaatcagagagaatagctaggaaatttccaaaaataaagagcagtaggagagtatttgttctgctagctattaaaatgtattctaaagcacagttgtaaaaacagtatagtactgtgatggaaataactagatcagaggaacagagtagagagtccagaaataggtgataaatcaataaaggtgtatttcaagttagtggcaatgggatgcatggactagcaaatggtgttagaaaaaatctcctatccattagagggaaataagaaattcctaagcttaggtagtatatcaaaataatttccaaatagcattaaattaaaaaaatcattaaaatcttagaaaaaagaatatttatattattttgggtaagaaaagacttaaaacatgtcacttttggtcccacatacaaatatcgtaaacaaagttaaaaagcaaaagggtgggaaaagtgtttacaacatcaatgatgaacaaagaattaatattcttagtatacaaatttattcgttcattcaatatttattgagcacttagtatgtactagaaagtattctgggcactaagggcacaagcagtaaataatgttcctgttctcctggtacttagaccctgatggagaggactgccagtgactatggtagattattgtaggtcacattttgataagggctaaggacaaaacattacgtaggtggctgggctagggaggcttggcagggtttgcattatgtggatattcaagggggcttcactgatggaatgacatgtgaagaaaaagggaaagtcattgaatgtcgagctgatagcacatttgctgtttttggaatgtcgagctcataggatttgctgatggattgaatgcgggttgtgaaagaaaggagtcagggtggcttctaggtttggggcctggcaaccagaaggattgacataggaatgactgagaggcttggcttggagatagagttttggttatggatgtttcagtttaacatctctcttgtatattcaagtgaggacgtcagggaggtggtcggccataaatatctgtaattcagggtgacatctaggctggagatataaatttgggaattgttgcagtgttgatagtatttgaaagaatgacactagctagagcccctggagagtgtgtgtagatacagaagagggcccaggacatccatgggaccctcccttagagttgagggagatggagccagctaaagagagcaaaaaggagtgaccactgaaatggaaggagtcccgtgagaagggggatctcccaagccaagagacagtgagaagggcgaggtcagctctcctctggatgtgctgatgggcaaggagagaactggccattggatctagcagtgaggaggtcactggtcaacccaacaagggctgttttatgggaatgatggggagagaatctgtttggagttggattattgagaataagaggaaaaaaactggagacagagaaatgggacaatagctggaggaggatggtattcaagtaagtttatttttcccaagatgggagttacataactcttgttttcacccaagtggaaatgattcagtagcgtggggagagtggatggtgcaggattgggctggggtgagggttctgaaatggtggtctcgaggaggtgggagaggtagaatccaggcatgagctggggaagggatcctaagtaggagcatctaaggaggtggtaggtgtgcacctgcctcttttctcagttcactaagaagcagagtcctcagcggagaatggagactaaggagacgatggaagtttgaggagagagggcaaagtatgaagtccttcatagcagaatgagaaaataaatggccaggggaatgaaggattgctgggcggcatgcaggcctctaaggggtatgtttctccagccatgtcctgttacacaggtgaacacggggtaggaggccattgtggtagaaaaacaggacatgagcagacacaacgtaagacagagaaacgcctgtaaagagaaaaagcaacatcagtaatagctgaagaatacaagtaaaaacaatgaggttttctttttttctctttagactggcaagagctcttgttggggatagaaattattgtcgcttttctggagcacagtgttacagtatgttccagaatacaacgtgtgtcccgttttgacctgtcagtcccacctttagaaatttattctaagaaataattgctcaaatgcaaggaaatatatgcacaaagatgttcaccccagcagtgcttatcaaagtgaaaaaatggcagtcatctaaacaggaggcagctggttcacttatctgtcggcctaacagtgatagtgggaaacagtagctcacactcaccctcctgttttgcagatgagggaagttgggtccagagaggggtagtgacagctccagtcctactccacggagctcagaccccctggctgtaggcaggcaccctgcccaacctcttcaactgggcttggagtcagagtcccttgcaaggcacttgtcaagcccttttcaagggccggtttgcttaatgcttttaaaatacgagttctcaaaatgttttgcaaatttgtttacaatgtcttcatttcatctcatggctttccttgcaaaggatgctgacagtggggggaaaacaggccgactgcctggccgtgatagaggggaccatattttcctgattcccaagtaagacttacagtggaagaaaggatattttctgctttcttacagtgtttacaaaagtcataacaggatgtgaggactatctggctgcaacatctgtcaccccattggtcgccagagttgattgggctgatctggctggttaggcaggtgtcccattcctccctcaccactccatgtgcgtccctcccaaagctgtatgctcagaaaggatgaccatccccgatagaggaggactggtctttggtcaagggtatatgagtagctgcaatcttctgctagggacccccaaacaagctctcaaaagtcataacaggagtacaaagataataaggaacttgcatttatttgtttccttgatcatatgtttattgattagaagaaaataaaattagcagccagccgtggtggctcacacttgaaatctcagcactttgggaggctgagacgggcagatctcttgaggtccagagttcaagaccagcctggccaacatggtgaaaccccatctctactaaaaatacaaatattagccaggtgtggtggtgtatgcctttagtcccagcttcccagcgttttggatggctgaggcacgagagtcacttgaacctgggaggtggaggtggtagtgagctgagattgcaccactgcactccagcctgggtgacagagtgagactttgtctcaaaacaaataaaaaataaaaataaaataaaattagctttgtgtgtggagaaaagggaggaaaaataattagcattgtcagagaacatctgggttatttggtcccctccgtgggaactgccctgggttttcacttctagagtttctggttctggtttaatttttccacgccacagcacagggaccgagaagctgctcagcttctctaggcttttatgtcttcaccagaaaaatgagcgggtgggcttaaatttcctacaaaaactcttaaaataaatatgatgctctttccattctatcacatgcctgttctgggtccgggggtgtgagagatgcattagtgctgctgtaaaccagccccgggtctccccccccggccccccaccaccaaacccccaagcaccaacctgggttctccaccacttttgagagctcatcgaaataaacacacctttgtgcctcttgtaacaattccagatcatccaatggcagaccagagaatggacatttcttcaaccatcagtgatttcatgtccccgggccccaccgacctgctttccagctctcttggtaccagtggtgtggattgcaaccgcaaacggaaaggcagctccactgactaccagtaaggcctttggggcatgtcttcctcttgttaaacttggtgtcagttctcgggcatggaacatctagcagccagctactgtttcatcctggaaaaggggatgggaataaaaaacccaactctaggtggcgacacagttggtttttggctttaccttcccctagtttgtaagcaagaaggagccttcagcagtgctgaggcatttaacttccacttcctgtccccaaaatgttctacacccagagaaaaagaacagccttaaggccaagttctgtcttttacccctttcttcgtcttctttctttgctcctttgagcaagagggttaagtctatgggtgtcatctcagggggttcaaagagagctttgcctgagggcctctctgaggaagacagcaagtgtcaggtgcttaatgaatgtttatggaaggaatgagtggaggtcctctctgaaaacaatttaggaacattgatgttgtccttaaacattatttaaattagtatgaacttgttatattaaatagtatttttgtttatttttagacttgttgacttttcgtttgagtaagtaaattttcacacttacagtcatcccttctatatatgtacaaacacctagggaataaggcagtgtagaatattcaaaggcacattttgttttgccgaagcacctgcgtggaatcttacccaaatgtccatttaagaggttttcttttgtttaatgagggaaaatctccgaggaggtataccccctacagcagatgtcctttctgctgaagttcacaggtcgaatttggggagcacaatggctggaggtcagatgcccactaggagatgctatgattaatatgtaagttatcccagatgattaagacagccaacacccaggggctggagagtgggtatgagggctgtgagggcgttcttccatagcagtaactccccagcagaaagactgcgagatgttggccacaaaccctttgtcttgagcaagcgctaagggagccactgatgtgttctaaggcctctgtcatctggacctgtgggttccagcctggtcaccacccaagatttcccttgtggactctggtttgctaatcttctgtaattcatggagactcaattaattaagcaaccttaatccctttcactatcattttaatgtaactgaagtcatctgtgactgtcaggcagagctttttctcacctgagattatcacctggcctcaaggaacagatagaattctagacaaaagggagaggggagtttttgtccttccgtgcggcctgcgtgatctctgaactttagaactagctggggaaactctctgcctgtgaggaaccccagggcgtctaattgggaacactgttctagaatgcccatgatatgatccagtgctcctagaaacagctatttttgcccttgggattacattgtttgaagggccatgctctctcctttcctgtgggataaaggaaaaaggagagaggcccagctggcagtccatgccctcctgataaatgtatggattggagaaggcggtgagggggatttggaactccttcctctggggatttcagtctgttttcttctactgaaccacaggatgcaacgaaacttggttttctgaagtctgtgaaagggagggagatccttgctgtgaccccaggacttctgtggccctcagccccactacgcccctccatcccaattcctaaaatctaggggttcccacctacctgagaagcagaatatttggcagtagtgcctttgaaaagctgcctggggctctgctcagtactttgttggtactttaattccaccctcctcacttcgtcccttccctgccaaatagatatgtatgcacatttatctttgatgctcaatatgttttgcaaacagaataagcttcatttatccagaatgatggggggggagaatgagaggttatatagatatttcaatcctatggttaactaagcatttttataaacactacatattcccaattttcaaacaatcagaatatggtaaaatatatgttaacacacaaactcttttgagatgataacttttgtttgataacctgagaagctggtccaggttttatagtaagttcaagttaattttcatttgttttacccttattatacatcattaattgatactgtggctgttcgaactttatgattgtttggtttctggataaatgagagccttctgtcttatgataagaagctcttctgtatgtctttattaacatgcagtcacattctcttttgttttttcagagaaagcatggacacagacaaagatgaccctcatggaaggtaccatgaacctagtaatttgaacttcagcatccttatagccattttctttgcactgttacacattctgttacttggggcagcacccatgtcctcaactggagatgagcaaggaggccgtgagcctgtgggcgctcactgtgtccctccaacccccagtccccttgtgtgtctgcagagagatgacaggatcaggcagaagaaaacagcaatgtgtaactttgccattcatctccagagaattatgtttttatcttttgctttttcctccccccaggttagaatatacagaacaccaaggaaggataaaaaatgcaaggtaagcttggaccttattttgtctacaaagcatcctagttctggttgcttagagagcagctgaggaggctctgcatgtttggtcctgtctaagagttctgttgggcactgtcacctccttagggaataggcaggtagtgggccttggccgaggtggccttctgccctccatgctctccatactggctggcctttactctttgctgtctaagcacctttaacctgaagtggatttgaaggtagcagaaatcaatcaaggctcaagtttttccccagtcttcagcagagaacgtcttcctgactggagcgccctccgcaggagacatggctcagtgatttggttcctgggctgggacttgcctctgtcaggggcccctattgcactgcgagttgcaactgaatgcaccacatggggcatgctcggtgtctcgagtagattctctgcctgggtctgtcctgcctccagccacacttgctgacctcttcccattgcgtcctcagttcttctgccgttagtaccaggctgtgttctgaggctgcgtcatgacagactgatacagggggctgcagaaattggctgccctaaggcttcaagctcttccctcggaggccagccttagcaggagctcccatggctctgtatctgcggcagctgcagcaaactacatttccatcgttgctgcacctccttaggaggaccatcaccaatggcaggtgcacatcagtcagtgtcaccctgcctcagcgggaggagtgtgacattcctcagaggaggctcctggggacagatgtagcatctgctgcacctaggtggggacctagttttgatccaaggatgacggcgttggttactgggtgccctagtcagtgaggctgtgactggaaagaattggtgccctgcccaggtcacatggccacacagcgggctcctcacagacctcagggacagcccacggggctctggatgctctgtgctatgaagccaccacctcccttctctttcctttcacccccatttcaaaatccaatttgacaaaggctgagaggaaaagaaacgaggagaaatgaacaattcagtttactctgaagagacaatttttgtagcttttctcctgaattctaaagatgaggtaaacataaaaaaattaatactgacctggcagtgagaccattttcttggagactttagttgaaaagtctaattttaaacattctgcaaattctaaatttgccttgtcagatgaacattgaaaacagttacaactcatttatttttgtcatcttttcttgatgcttggttacattttataagaaatcgtttttcatattgttgttcagggaagctcacagtcagattgaaaagcggcgtcgggataaaatgaacagttttatagatgaattggcttctttggtaccaacatgcaacgcaatgtccaggaaattagataaacttactgtgctaaggatggctgttcagcacatgaaaacattaagaggtgagaccctgggctctattgtcctttatgtccttgcccacaaatgttaccacccttgcctagaatgttcctatccctaaggcagatgtttattacttgcaattatgtagccttcagtagtatgcctttactcttcagcaacagccgtgatgccaaatgaagtgattattgagcttatgtgggttttgacatgcaattttgcagtcacacattctcagagcatagaaactgtgctttgcacgtctctgtatatgcatgtaatcaggctatgtgcctatcagagatgatactgctctgatgtctcacatcttgcctatgtttgtgcctggatcccatccttacaattataacacgcagaaatgtaggtgcacacagtgacacagaaaagtcagttcaaagatgaaaattcatcatggttcctttgaaaagtgagtcatgggttgtgggttctcgcgacattttgttgtcaggaatgaacactgaagatattttcatcttcctggaattttcccgaaccagatccactctttgtgagggaggcagtattttccttcttttctgagtgtggggagggtgagaaaacataggcagaaaagtggaagtgacttatccaaaccacaagagaaatctgaaatatatcaggcattttagtgaatgctgttcctggaattttccatagctagtcttggacttttggaggaaattggaaagtgggcgctcagtcagatctctgacctgcgtggtagaagaattgcgtctttttatatttgcacaaggccaccagaaataagaagtagctggttttgtctgactttagatcattacccaaaaatataaatgttgtatcctgtgctggaagaatggcatttaaaaattcatattagcaaagataacatgggttaaattattataaactaatttctattaaattggaaaaaagtggcaaatctcaagttacagtaaagagcagggatagggatcaataggatggttgcaacacgtcctgtctccttccctccccatggtactttgaattgttacagatccatttccttttattccttcactattctactcgctattctacagactccaaatcatttactgctggcatttttctctgttaagtgattgttctcctgaaaaatgccagattgacagccttttaaacctaagtcttgtcccctttcagtcctgggagtgcgagctgcattgactgaagcaatgcattcctccacattgccacgctcgtttaactcacccctgatgaagagtaactcacattaaatgccttccacaatatatttactcagggcctggaagactgaatggtttcccaagaacatttagagtggtgatttgaaggactaccagacaacccatttaatacagatcttaggaggagggaactctctgaggagcctctaccagtttacttccagagctgccttctttcttagaagcagattgttaaacttccttctattatctcttggttttccctgtaatgagaaaaacaggcttgttaggtctcctgtgggtaacagtgttctctcttccatggaattctctttggcttacaggattctgtccaaagccagatctaggctcatctcagttaaggcctaaacaataaaatttaaataccaggtcatagagactaggccacttacagaaggtttgaggcagcaagttagaatgagacattttctgaatatcaagtataccaattctttctctttttgcccctaaggtgccaccaatccatacacagaagcaaactacaaaccaacttttctatcagacgatgaattgaaacacctcattctcagggtatgttcaattatgggattgttttacaacgtttgtttttataaattttcaagtaagtaccagcatgtgggaatttgatgtttcaacactgagcttttttttttaggcctgcttcctctctcaggtccctccctttatcttattgtttggacaggcttcacatttcttccacaaaaccattctcctcctcttttaacctcgtctagacaaaaatggaaggtctatgccaccgcaatttaaaatcagaagagtcaggatttgttaaaaataagggggatttgagaatcacatttctgcatgaagattttaggaagggactgaaaccaacaacaattgagaatttctcttcacctgatttaaccactagcacaaaaaagtccacctaaatctttacaccaaaatctcatcaaaataacaaaactgtggctcacgcctataatcccagcactttgagaggccaagacgggcagatcacctgaggtcgagtttgagaccagcatggccaacatgttgaaaccctgtctctattaaatatataaaaattagctgggtgtggtggcagatgccttcttgggaggctgagacatgagaattgcttgaacctgggaggtggaggttgcagtaagctgagatcactccactgcactccagcttgggcaacagagtgagactctgtctcaaaaaacaaacaaacttacaaagactagtggtccaaaaaagaaaaataaatgcaagagatatatgctttcacctgcttgacttgagtgctctctctgtcttgctaaatctctgctgggagatggttgaggtggcactatgggaacctgttgtcttccatgaagaattaggtcggcacaaagctctaagttgtgttactaggtaaagtgagattaacttgggaattgaagggaaagaaactggattcagaaacgtgttcttgtagattgtaaacagatgaatagaaaaacgtaactaaaaggaaggatacccgcttccacctcccacaaagtcagggctgaccttacctgcacagccaacagaatcttcctacccatctttgagcagaagtttgcaaagctctagagtagagggtagtccatctggaattttgcatcatcactatccattttcagctctctataagcctggcctgtctgctcactccagcattctctatttatctcctcatgacgtgctatctcaaattggaaagcattcacctgcaaggaccagaagacctgatgaataaatagagtttaatttctcaagtataactggtctggagtaggttatgttgggttgctgcagtggttcaatgaggtcaataggaaccaggttctttgtctttgcactcagccacaccaagctagcatgctagcttgtttccttaatgtagccaggtacctttgccaggtctaagtagccagacccactgtaaaaacaggggtaaatgaagctctagtctggctgtcctttttatcaagaaaggatacaccttcctgaaaactcaacagtggacttcagcttattcaaaagtgtgtcacttggtcacgcctagctgcagggcagggtgcagaaacaagtgtttatagattttccagcctccctggtggagacaggcaagagagaaggggcctgggaatggtgttgggaattggcttccccaacagtgtttgccacacacactttccagagccacatgcatttgctcgattccttccagaagtgactcccacaacccaatatagtgcttcaactgtggtctgattggcctgaggttgaatgggactagtgccttccttgccaaaaaagccatctgattagtactgtatcatttggggcagctgcagtactgcctcctcccccttctctcctgaatatgaattattgttaggtcaggttttttacatcttgtataggtgcttttttgaacttaagataggacttctctttcatttctgtcaaaacctgtttgttgaatggccccacagtccagcttgtcattagtgacccttggaatctttgtgtgacttgtagatccaatacatgcctctgtgcctttcatccttgtttattcataaattcaacaaacatttttgtttacttactagatgcatggcattgttctaggaacatccaaatcaatgataaacactttagggtgggaccaggctcccgatcaagtgagtgatagtcttttggctaccactctcaggacacagttattcaaacacccaactttgcccacctctccatccttttcgtaaagatgtccgtgttctcagagaggatttgctgaggttaaaatatgaccgatgcctgtagcatctcgagagctgccgtcggtgccagcttcatgggcatgtgacctctgcagtttcacaaggccccatgcttggtttaatgccctgtcaccatcttgaaaacgtaatttttgaacaaggatccctgcattttcattttgtactgggccccacaaattatgtaactggtcctgattcccatactggtaacagatctgcagctgtagatgtgataggcctgcctctatgcctttcattcttgcgtattcatgaattcaacaaacccttttgtgtacttactagaggcttggcattgttctaggaacatccaaatcaatgacattttgggctggggtacaggcttgattattttaagaaaaagaatctatgtctttatttcatatatatatatatatatatatatatatatatatatatatgtaaaataattatcaagcagagtcctgtggatggacaaatttaaaaataaataaaacaagctccttttgcagtggcacgtgcttaatcgttttcttgttgctgcttttcttaataattttctatcagatacccatacttaccagggtatggaacaaggattatcatgctatctcagctaaatacttcatgttgggcttgtctcttctactcccttgtttatgcagcactcaagagtgatctctcttgcccgatgaaggttttgtcacctctctagcacgtgtcagtggctgtgaaatactgtccagtcccttatcacttccagggtcccagttccagggacttgcttccacagaaagccaggtctactcagatgatgttcagacagtttggccgcaggagctggacttctgcttttcctcagcaatgcaaaatggacaaactgctttctttactaagtgctttcaaaatatctttaataaagtgtatgtcagggatcagtcaactgtatcagtttacaatgtctacgttagtctacttccccatgttttgaaaactaggcagaccgtaccaaggcctctgtgtcttttattaaccagcaccatcttcccaagagtgaccctgccactggctggcccctgtggctctgtggtgctggtagtgttctcacagcttctgctccttagctgtccttcgggcccggctccttcacagatggtctgctggccagggtgctatggagttggaatgtccagagcctcccctcgctgatgcattcactgctttggaacctgctggctttcctctggagtactgaaatagctttacctgtgttgtcggttcaggcctgaccctgcccagcattacctccagggtgtcacagttcccttctgtccaggtacctttcaagccacattgccacatcaatgaaaagcctcaaaaacacttccatgagatacaagattatctgcaaggcaaacgaggaagtttttaataccctatttgttgacagaatgaggcttccagcagatggtgcttggaaagttacttccccctcactgtcatcccttgcccctgggccagcttagggacctaacttaggaaaggatcctccccagcttccttctggctgagtagcctgccagggtcttaagcaacagtgattctgttcccctctcactcatttcttctgtcccagcacaagtacatgcaccattcttttaccttctggcacattaattcatttcctagttctttgaattaaaccacatcatgaaggcccttttgtggaaaaagagaacagtttctctgtatttttccaaagagcagattaaggaccagtgaataaggtgagaaactagtccactgtgtattagaacgagggagggctgagtcataagagcaagggcatgacagagtggggcacaccctccttgtcaccggaagaccccagcaggagttgagtggttgtatgtctggaaggcagtgggtgggattcacacagcccaagctctcaggcactatagcttgggtatttacctgcttcagtctctttaccaaatgttgtcctatcttaatggctggctttattggaacatttagattttttcctgtatttaaactgaagaaggggtaagaagaatctaagcggggagttttgcttttctgaatgcaaatagtccggccctggatggagggataacatttgagagtagtagttctcagccctatgtacattagaatcacattaacgtggaagtgggatgggtttaaaaataccccagtgatcagccccatgccagaccatcagcataaaaacaaaaacaaaaaacactgctccgaatgttgagaaccactgttttagagagctccctgtacgtggaggttttcaagttgaaggcagatgatggctgagatgttggagaggggattcttgaagagtccttccaaatctcagattctctgactctccatagagttgttattattagagcaatgaaatatgattctctggaccatgataccttcaaaagaacacgtgcaagctgaattctgctttgaaatataacttactttaattggactttcttcctataataattagatgatatgcagaaacacacacacacacacacacacacacacacacacacacaatcttacagttcttcagagacgtttgttttcagcatcctgcactcaggatatcactgaaactgttagtgttcctgtgctttggatgcttagaaagcacatcctctatttgttatcagggtgattacaaattatgtttcctacagtatgagaaattgattatccatttctcctgattaggcagcagatggatttttgtttgtcgtaggatgtgaccgagggaagatactctttgtctcagagtctgtcttcaagatcctcaactacagccaggtattgttcatgctcctgttgatggtgggcagcctcacagcagtcagaagtgtcactcaattttgtcagaataattatagtatacaagtcacatgtgaacttcttccagaaaattcttaacttcttaacagataaattaatttagacttagaacaatcttgtaatatgttccgtattccccccattgaaagatctgactctgatctgatcgatagcattatggctttcttctattgctgcaaaataaatatcccacaatatgtggcaaggacagagggtaagaggctatctgacaagggagaaaggtaggcaggttaacacaataccagagaatacgtcacttggaaatccactccatactgtgtttgcagtgctgtgtcacttcttagctctattgaacctcagtttactctaaaaattaatgataacttataggatcaaataagagtaacatttataaacgcttctagaacagaacttttcacctattatgtcccccagagtttttattcatttattcattcactcacacactggtatttgcatggaagcttggtaggcagaagacttgaagaatcaaaatgacatttatgtaaattagaattaatgtaaatttaatttttccaaagatttctgctctttttagtctcagagcaaagttatggaggaagttgctgttatctctgttaatagacaaggtgactgaagcatatgatatgcgtgacttgcttgagaacagagaggctgaacagcagagctggaatcagagcccacccctatcttctgccttctgaggtcttacaggggaattccaagattgttgccttagaagagcataaactgtttatataattgagggttttcccgtcatgttatcaaaaccaacctccagatgcctccttcctggtgtcaggcaaagtggttggacatatgtacaggttcacataggaaaagtttgaggtctcatgcacaaaaacacaaaggcaacatgcagactgtgcatgcttacttgttgcataattgattttctgcatgcaattgacttgtcatgtttaacatttcatctccccagaatgatctgattggtcagagtttgtttgactacctgcatcctaaagatattgccaaagtcaaggagcagctctcctcctctgacaccgcaccccgggagcggctcatagatgcaaaaagtgagtaccagagaggcctcgcatttcctcagcagcccactcacaggcagccaaccctgagtgagcagagggcgggtgtgtgtgatgggctcagcctttccagtcctacttctctgtcctctttctggggcaccagagctatctttggctaaatggaattatttatgttctttggtcttttacataaaaagaagaaaaaaatctcaatgtccaaatttattgaaaagaagagctatttagactggattctttctgatttttagacttttcttttttctttcagaatctagaaaatcccagttgtatgctcctgagtttaaagggctaagtttgatttgttctcccagaacaaatgggctctatttacctgaattgcacacaggcagcctcataaaagtaagaaaacgtcaactataaatatggtgtttcttcaaccaaagtgttcctccttaggttggctcccccacctggctttcttcttttgcagtagtggaaccaccatccacatcgctccctctgcccccagcttcctgctactgcacacacttctgtgcaaggccccagtagctgtcatctactttagtcctgtgggaggctgtacactcctacagttaagaatgagagaatgaggactctggctgggcgcagtggctcacatctgtaatcccagcacttcgggaggctgaggcaggtggatctcttgaggtcaggggtttgcaaccaacctggccaacatggcaaaaccccgtctctactaataatacaaaaattagacaggtgtggtggtgcgtgcctgtaatccaagctacttgggaggctgaggcaggagagtttcttgaatccaggaggtgggggttgcagtaagctgagattgtaccactgactgcactccagcctgggtaacagagcaagactctgtctcagaaaaaaaaaaaaaaaaaaaaagaatgagaacacaagggagattactgggctcattccggctccaccattcactagctgtgtgaccttgagcaagttacttaacctctctctgtctcagttttctcatttatggaagagtacctatttctttgggttgttgtgaggattgaaagtgttaatgtatataaagcaggcagaacagttcctagcacatagtaagaacagtatcagtgtggcctaatgtcttgctcccaagctgtccacgttaatccctggaaaaaaataccaccagataatctccttcaagtcatctctttcattacagcacaccgcttgttcctaaaagtaaaatgcagactttggtatctgttgttctttatagtctagccttggcttttttaagtgaccttaggagaaaaatatgaatggcatttgggccttgcctttgaggctcttagcatatagtcagagaaatgagacagacagcaccctgcatagtaataggtacagccatagaaatagtgccaggcatagagaacggatgattaattctcatgtgggcgcaaggacaggcatcactgagtagatgacaaccgaggtgggtttgaaaagatgaattaatgtttgccaggtaatgaagggaggaacaaagaggaaacaatctgtgcacaggtgcaggggtgtggagccacatggcttgcttggtgctattggacaaaacgtgcacggaggggaagggctgaaccatgaagaccatttgttctgtggggacacagtgaagagctctgagttgggtggggcaggctcggattggcattctaggggagatcgcagagctggcaatgtgggaggtagatgggatgggaggaagcccagaaggagccctgggcagtggccattcctcggcacacttgctcgtgtgatggccatgggtgtgttttccctcggcttctgtactgacacctagccagtgtttggtaaggaggtgtgctcctcagaatcacctgggagcttttcaacatagtcatgctccacccccagagattctaatttggtttttccagacagcacagtccaataaaaacataatgcaaaccacaaacatgagccacatatataatttcatattttctggtagccagactttaaaaaataaaaataaatgtaaaattaactccaaaatatttcagcatgtaataattataaacaactaataagttcgttcacattcttttatttttctatactgtctttgaaatcctgtgtgtatttaacacttacagcacatttcaattcagaaaagccacatttcaagtgctcagtacctgcatgcagctagtggctaatgcattggacagcacagatctagaatggggtccaggaatctgtaggttgatcatgcatccagggtattctggcctacaagccaggttgagaacttaaggcagtccggctcccaccttgccttcccaatatccatatcctacccatccttcagtgccagcccaagttccttctcctctgggaagcacaggttgtctttgccatttatttggcactaatcatacatcaccctgtcctattattaatcttttcttggtgcacctccatttgccctttgttagccataagcgtctattgggcaagaaccccatactatatttcttttcatccccagagtacctaatccatttatttagtagcacactctgtgatttataaacatttccagactgacaacacacctgtccatgctgcatctgttaaagcctaaacttgggagatatttatctcatgtcatcattataaaacagtgaggcaggcaagaaaaggctttgctcaaggtcacactccccctcctgacagacaacactgctctcagtttatcacattttgtgtattgatttgcagctggacttccagttaaaacagatataacccctgggccatctcgattatgttctggagcacgacgttctttcttctgtaggatgaagtgtaacaggccttcagtaaaggttgaagacaaggacttcccctctacctgctcaaagaaaaaaggtaacaatttaacagtccattaaaaccctgtgacaggtgaagcatgctttctgcagcggagctctcagctgggcgttggttccatggtttctggctggccagagtggcaggtcccaggactgcagacaggaccctgcagtcctccctatgtgtagggcagttgggagcagaggagagagctgaaaagcctgatggcagagatttgtggagaggcctcctctgtttaaattgtgtttcttttaacatgattgaggaagaatactctcagccacaatcctaactgccttatgaacagccaccagtccaccaaaattactctgagctcaccagtgaccttgatgttgttaaatgcgatgaacatttttcctttgtcttccttcttgaagtgttctcttctcctggattccatgaaaccacattcttcttcctcctccccgaccccctgctgctacaggctctcttgctggcccctttgctggctgcccctctctgtcctgggctgcatctctgtctgcagtctctctctgttggtcatgtcatctactccctcagctttaaatgccaacaacttccacattcatatttccagcctagacttgtcttttgaactccagattcataaatatactgcttactaaatcaacctgctttggatatctcaggggagtctccaacaggatacgtgccgaagtaatcacctgagcctctcctccagcataaatggcactgccattcagctggctgctcatgctagaagccggggaggtgccctcacttctgcttcaccaccccactcttcaatcccgttagttatgaagtcctgccacaatgagtcccatctgcaaaagttctctgaaatgtttgtccctttccatgctgcctactttcactcagctccaggctgcccccaactctcaccaggtctcataaagtgtagacccacatgctccccacccccaacacagcagccaggatgatctttttatcagtccccttttaaaaacccttcagtgttccctattgttcttgaagaaaagctcaaaatatttaacgtgaccatgcagcccccgaccctgccactaagcacatgtgagccatgttgacttcctttgatgcctcaagccccttctgggcaatgcttctgcacatgctgtcgcttcctggttggaatttcttccctctccccatgaactcccttcacatggctctctccaacctcagactgccttatgtcttatagcaccctactggtttgctttctagtgctttcttatacttgctgttatatagttatttgtgcgattatttgtttaaagtctgtctcccccactaggctgtaaactccacaagggcatgtctgatttgtttttcactctattccagtaaccagcacagactccacgcttggcagacactccatagtggtttgcttgttggtgaagtctataggtgctccacatttaatgtgtcccaaatcgaactatcttttttctctctctctcttctagtctgttttctttcttctctgagtcagtgaatgacaccagcaaccacccaatccagaaaagttagagtcatcttcatttgtttctttcccttaagcctgatattcacagcaaatcccaacagtttgatctcagaaatttctcctgctttctttctctgctccctctcatcttcactgcactgccatagttcagtcctcctaatctcttgctgtattatagccactggcccctgaatcagccttcctacttctgttttctactgtcttccagttcatacgtcactctgctcctacagcatccaaaccacaatttgattttgctgtttctgcacttaaatacctgtagatgctctccatttcctgccttaaaaagacagaccaacattggttagaaagtaatccaaggcccttttaatcttcctccaacctgcctttccaatttgcccctcactcccagtacctccaatttcacttcaaccacacagagctcttggccagttcctatataggctgtgcctctgtgcctgtgtacgtcatcagcctttatacattctagtccctcagccactgctcatccttcttgatccacctcctctactggttttttgggggagccttcctctccctaggaagagttagatattccttccttggtgtatgtaatgaatgtccatggtataactggccctacttaagcattctgacactggatgacagtttgtttctctttccgtctgcccctttcattagatgcttacttctggagagtgaagccttgatttttttttattttttgactccctacctacatcccatcccaccatcggccgtgtacacctccatggcccaaacctagtgctgacactaaccacgaactttgctttctagcagatcgaaaaagcttctgcacaatccacagcacaggctatttgaaaagctggccacccacaaagatggggctggatgaagacaacgaaccagacaatgaggggtgtaacctcagctgcctcgtcgcaattggacgactgcattctcatgtagttccacaaccagtgaacggggaaatcagggtgaaatctatggaatatgtttctcggcacgcgatagatggaaagtttgtttttgtagaccagaggtaagagtctacatactacccttgagcaatgatggtagaggattttcaaccctgatctaaaaagcagagaagactgggccatcagctggcttttctaagaatgaagaaagaaagaaaaagctgggtgcagtggctcacacctcaaatcccagcactttttgaggccaaggtgggtggatcacttgagcccaggagtttgagactagcctgggcaacgtggcaaaaccctgtctcaactaaaaatacaaaaattagccaggcatggtgacacatacctgtagtcccatctactctggaggctgaagcaggaggatcagctgagcctcgggaggtcaaggctgcagtgagctgtgattgcaccactgcacttccgcctgggcaacagagtgagaccctgtttcaaaaaaaaagagacaaatgatgagagtctctgttaaaaaatgagattcaataggatatcatcataaatacagagatttttctgtcattctttggcatatagagacaattaagtggggtgccttgatgtccatggctaaaagaaaaacagtagggatagcatgctgtctgaatctatggaatgttccagaaccattattgtgattgaaattcttttgaatctaggacttggaagcaattatttagtcctgagctgtccaataaaatactcgttggccatggtagcctcccatgtggctaacggcacagacatagaacatttccatcatcacagaaagtcttgttggacagcgttgatctaatccaacctccttattttatggatgaagaacagaggccagcctggggactggtctcctgtaggattcacaattaattggtaatagacctggaccaaggacccaggtgtcccaaatttactgctgcctactgctttccctcagaatatgcacaggctaataatttttctggctactagagacagccacaacatgctggaaaaagagacagcctcagctgtcttgtggcctcagctgctgcagcttctggcatttggttgtcctgataaaaaggaggcagcaaaaactagaagccttgcactgaggtttagatttataccacattttaatctaattaatgtggttccttttttaaagacagatctcagtctgtcacccaggctagatctagtgcagtggcgagatcttggcttactgtagccttgacctcccgggctcaagcagtcctcccacctcagcctcccaggtagctgtgaccataggcatgtgccaccatacccagctcattgttctgtgtttttggtaaagacagggtttcaccatgttgcccaagctaatcttgaattcctgagctcagacaatctgcccaactcggcctcccaaagtgctgggatgacaggcatgaaccaccatgcccgactggttgcaatttttaaagccccctcagatttgatttcttgtgataatagtccctttacaaaggctttgctctgtttccctctatttttatagccttgattaaattcagatgcctgaaaaaaagagagaaagatccacacagtgagccctctgaaaatccatccagctcttttgcctgcagctttgaccttgctctcataggctgtagcagggtttatccattgcaaagttgcaattaatcatctgaatggctttttcttctttaaatattcctttattcccttttagggcaacagctattttggcatatttaccacaagaacttctaggcacatcgtgttatgaatattttcaccaagatgacataggacatcttgcagaatgtcataggcaaggtaagctaggatgtatgaaagatcttaagttgaaagtgtccccttgcttctagactagtcaacatgaccttccagggaaatctgtccactgaggatgtagagtcagccagcctaggactcttcaggtcagaacatctgtgtgaagaggaagctgatacctgcaggcactgtttatcccccttgtagttgccctgtgctgactgcatggcagtttctgaaagacatctcttgttcagagggttttcccagaccctgtaaagatttagtatggcccagactgatctgattctcttttccattcaagcctgcactacctcctgtgttttctgtcttgactaatgctgtggcttcatgtgcaggctcctgagagagaccaacattgaccccttctttcactgtgtctccaccagatcctgttcattcacctcagacatgcatttccaaaagtctactttttaccacctctgccatcaccctggttcaggccctcgtgcctacttagagacctgtgatagacttctcagggtttctctgatccctctcacccccagttcatcttccatagttatcctatttatccccagatagattgagcctggtaacatcagcctgcttaaaaacctcctgctttagactcaagcccaaatgcttttgacaggcaatcaaatgtgagaccttccaccttctggccccagcccacctcctcagtttcagtccccatccctgcctgcagaggcctgtgctccaggcacactgacctcactggcctctccccaaccagaccctgctgctcctcaggcactgctgggttcttccctccctccttctcttggcaaactcgtgttcatccctcaaggctctgatctcttctccctgtatagccttccctcactactcttcttgagggcaggagtcatagcctgtctcctcttgtatctccagtgcctggcacatgagaagggctcattacatgttacatgaaagaatgaggttgaataggtgagtagcctctgttgatttggatgttcttagaaatgagataagttctatattgcccttgggctttgtgattgagataaagcatgacattttggacagtgccttctcatttgctggtggtcatgttagagctgattccagttagatgtataacatgcagtcagtaattccctagagcctcaattttacagactatggaaaatcatgacagcttcacaaatgaattgaaaggctctgagttagaccctcagaaacaacctatttcctgagtgttgaccactgcagtttccttggcttactaaagagcgatgtcgttggagctcaagtacctttaatattttgtattggatgtcctgtttaatactttggtctgagaaaacaacaatgtccatgttttctttacattttcagttttacagacgagagaaaaaattacaactaattgctataaatttaaaatcaaagatggttcttttatcacactacggagtcgatggttcagtttcatgaacccttggaccaaggaagtagaatatattgtctcaactaacactgttgttttgtaagtacttttcctatatctgaagctccccttgcttcaaacagatgcctagggttcctcatctgggaaatggggtgcaggcaacatccagtatcacatcctttaatgccatcttgctaatacctgtgaagcctcaggactggcagaagctagaaaggattgttaacaaagggacaagcttcaggacttgtaccatgcaggccctggcttatgaaactgctccaggaaatagcaacatttccttccagataaagcagctaacctttgaattccacaggccctgcaccctaggcatccacttgtgctgctgtggaggaaggggttggcaatctatgaaaggctcattcaggcactagctcacactggccttggctgaggatggggaggtctccatacctgtcaggcagggggcccaagcactggcagctggaatgccatctcaaaaggctgctacctgctagatgagcagagggaggtgaaggagcctctctttggccaggcctgctccccacttttccttccccatagtgtccaaaaccccacctatggtaagagctgtgtgaggggccggggctaggtgcactgcaggctggcaggaggaggtgctgtaatgatggcagtaggttactgcagccaccacctctgctgaactgtgtcccacacatattaggaaggcctaggcaggcagtggggccaaaggccaggatgctatccattatattatcaaacagtgagacctgtttacccactcagacagacacttcattttctggcctgtccaggtccagagtggacaccggacaccttggccaagttgaatggtgcacagttctgagcaggcctgactcacgtttccttattgctgggatgttcacagagccaacgtcctggaaggcggggacccaaccttcccacagctcacagcatccccccacagcatggacagcatgctgccctctggagaaggtaactatgtgctgctggggccctggggcttgcccgtgggaaggtgcttgtggtcaaatatcctcccctaaagtattcagggtcccctccattcatattctgtggaacaagggaggcctcgaggggatgatgtgcggatttccccatgaatgcagaggacactgtcatgtcactttctctgttgagccggaatactaggagctcactgctgcacttcccaaagctgctggcccctggaagcccttgagctcgcaaactccctactccccttgtgctttcctcctgtgttggctagtggccatgatgtgaagtgctctttcgtgactgtcactaactcctgtggttggcaggcaggtgtctttcggcaccagggtgtgtaccatacccactgggctcccttctcaggctcagccttggccctgcccctgctgtccacgctggactcatccttcctgggaccatccccacatgcatggctgcagcccccatcgatgactcccacatccacatctcctggcccagtctctctcccgagctccagatctgtctctccaaatgcctcatagacagaaccacctggagtctcagaggcacctgaaattcagaatatcccaagctgattttctgcactcccctacctgattggttgtttaagccagaaacctggctgttgtctctcccccattatatctaaacacggagtcctgaaccttctatctcttaaacttcgtcaccactattgctatttcaccctcctcatctgctgcctggattattgcaaatcacttcgcaactctagtccccctctccccaccccatcctccattgtagttcattctccctgccgtggactttctaataacccagttctcatttgtgccttttctgtgtatcgtcctttggtactcctcattcccttgtggaaactgtccaaattcgttagtacggcatccaagaggcccctcatgatcggattggtacctgctgccccagtttcatctatcatgctctcatcatcatttatgatgaattccttggaggagtctcccaagttttaacctgcctcagtgctcctgcacgtgttggttgctgtgcctggaatgctttctcctccttacctctctgccaagctaattcatattcatctctcaagactcagctcggggttaacttgctccagaagctgcacctggccccagatgagttggttgcctcgtgcttgcctgtcaaacttacaacattttgctttagccattgttcatcttgttggttttcctgttaaactgtgagctccttgagggcagggacttgtctctgtaaccctggcacatacagtggtcttcaataaacgttttttttcagtgcatgaagggaaagaattagatgctgtatgaagggaaaaaactggcctcagatcctagaaggaaacttgagcctttccctgctggaatgccttttcctgacaagctgtagccctaaagtccctcaaggcacaactctgatgttgaactgcaaatggatcatgggataaactggttttactttaatacataatagtatttcttcctcagttttcccctttcctactctcagattcctttgttgtaggtggcccaaagaggacccaccccactgttccagggattccagggggaacccgggctggggcaggaaaaataggccgaatgattgctgaggaaatcatggaaatccacaggcaagtaacaccttctagttcctctgttaaaccagtggttctcaacccagggaaattttttcccccaggcaatattttgcaatgtcaggagacatttttggtcttcacaactgggtgggaggttgctacttaaacatcctgtggatagagaccagggatgctgcttgttaaacatcctacagtaaacaggacagttccctcctccccacccaacaaagaattatccaatccaaaatgttagtagtgcctagattaagaaatcctgccttaaataaagaagctaaaccaaaatagcccagcgctaaagagaattcttgagaagacttaactttcttatggctcaaggagcttctcagtgcggatagatgtacctttactttacaggaatgcaggagtagagctgtgaactatcagagtgatctggaccttaacaaaacattcactttttttcaatcaaagagctgcccaggattagtactagaaaccaagcagatcagctagttattactagctgtcttgggagagacttcctttccatatgaaagagaaggagcttagaagcagtccacctgggtctgagtcctgggcctgtctctctacctggctatgctgagacttacttaacctcttgctctctgttgatttaaaccataaaaagaaagcactatttcccaagaattgtgttaggattgtgagggcactcaggaaagttccaggaacacagcctgacatatagtgagtgcttaaaaattaattaaatctgtctttaagagcagtcgagagggaagcagttatcataagtctgtccaaatttggggaatagagaaggtggtaaccagattcttcagaacgaaacttaatgtaacataagaaaaggaagaaaacactgctgccgctggattctctcaggagaattagaggctggcctgttttccaattggccataaaggggctgttatccccctataggtaacacagctcttttccaaccccacaggattagtgggtgtgacttctgcatcaggaaggagacatgagggtagtgtgcagtgtaatcaggttcaaaccctatactttgcatttgcataccctgtattttgcttgagaccatccaagaacagtatcaaacagtccttgacctcaagaattttaaaatcttttataagtctattttctttatgataacaggaaaaagggagggtgcatgggccaaagcaagcaaaagaggaaagatttgaacttggccttagccagggtttgcaataagagtggatgttccctctagaaaagccagggctattcttgagtgggcatgtgagtggcaaattcagggtcaagaaacaagctacctaactgggcaggctttgtgtaggaaggagacacagagctatgataggcgattaagaaacacaagaaatgatactgtgcagtttggaagaaacctgtaagaccccatttgttgtaggatgctgaacaagcatccaaagtcttgtgttacgctttgtggaagttgcattggaatagggagagatgaaggtgggcatgtttgacaactcaggaatgaggccttatcctacagagatgacactgccaaaagagaaatcaatcatctaaggtctagcgtttgaagatgaaatcaggaatgatgaaacagcaattccaagatgagaaacctgggaaaatagtggtttcatagacataagtagagaaaggtgggggacactcagcaatttttccgtaagcaattagcagccgtttgtgcatgctgagaatacatgatatgtagttgtaaactgccgttaagaagcttctaatccagaaagaaaacttgttcactcataaatctagagaactaggcagtacaagaaccaaaagacttctgggtggtggaggagtggtctctgggtcacccaaaagctacattcatccatgtaggagctgagagtcctgtggttacacaactgccatcacactctccctaaactgtagctgcaatgccaagtgatggattctttcctgaggtccttcagcctgacaagtatttaggtggatttacagttctaagtcttcccttctataaatcttctgagagatatgctagataagaaaggcctggacccatttttcatcaaccactgccttcgaaggctgcttttcctgtcactactactaggctaccttttagaccctggtgccgtccatgtcctaagagtattcactagctaaacagtgtttgtggagaaggggacaaattgttttctgtggatcaaagatggaggttgatcttagaagttctcctccaattcacctggattctgtgaggaaataaaactggccacttacttgaaattcaccaactgaatgcaaactccaatccaagggctttgtcagtgagatgcttgactctagggactgcattctagatcaggtgcctgtagaacaaatccagcttgtcatctgtttttgtaaataaagttttattggaacacagccacaccgattcgtatctgtggctgctttcaagctgcagaggcagagttgagcatttgtgacaagacaccatatggcctagagagcctactatctggccccttacagaaaaagcttgccaaaccctaatctagatcttcatcccctttctcacctttaccccttaacaaagcacatacactccactgaaaaaagaaaaggcagtgtaattctcttttctgacaggataagagggtcatcgccttctagctgtggctccagcccattgaacatcacgagtacgcctccccctgatgcctcttctccaggaggcaagaaggtaagactgatgattcttagcctaagctagagaacctcttgcccaagatctgaaatgttgggggtgggagtatggaattgcaactgcgattgctgaaacaatttggactacttcctccttgaagtaaatgcatctgtgtgaggctggatacaaagcatactggtagggctagggaggcttgctgacatcctcagaggctttcttccatgtgagtggaagaagggagaaagaataaggaatggggaactgtcagttcatttaattgagggagcaattcaagagttcccatgagggaaagattattgagtacctcacatagaaaagtttctcattttctgccaggaattttcaagggagaaaatattagtgtctagggcaggcaatggaaacagcaatgccaccagcagtgctttggaaatcaagccatgctttatagctgcagaatacttggggatctgctgcctgggggttccattggtgtgacagcattggatccaagcagtggatcaatcaccagccctcatgaagagcttgctataagactacactataaataggtttaggaaccagtcatttgttttcatctttgctggagaacttataagcctaggcccatcttaatcgtaaattataaatctgtttatattgcctgatgccagtagagcttaggacagtttaaaggccatcattttggacacaatggcttcctttccccatctcctaaaacagagagagagaatatcaggaatttccataggcaggactcctagggcacaaaccatcaaaagcagggcaaggattttcaaaactgagctcctcggaggtttgttcaggttaccaagagctgtggtgttaccaggtgggatgggcgtggggatagttgctaaggagagagggtaagagtagaaatcctgcttctacaagggcagcaatacttcttttttatacaggaatcttctgcaaacatttctatttgaaaaagcgttttgctccccccaaaaaaggttgaaagttaacaaattaatgggtaagactacaaagtaagacctgggttcgaagcttggccttgccatgtgctagttatgtgaacttgtacaactttcaagccctagttttctttataatggagctaataatggttagggtagccagcatctttgcacgaggtcctactgtgagataatatatgtgaaagtgcttggcccaaaataccactgacagatgaagtctgagcttggtgtcccgtgacccccgcccccctgcccacaacacacacactgcttgccagctgtcttcttagctgttcttctgttatacctccaggtccttcctgcatattggatccaccatcttcttagggtggtcttccagtctctgcttcttaagttaacttttaggcacttgacttgactcctggtattaccaaggattctacttcttggttttgaaaggttatcagtccagtataggcttaaatattactcaaagaactttcatatacattgtctcatctcaccttcacaacattatagtgacaagatccaggctcctcagcgttcgttttataagtatggcccccaggctacaatcctgggctcatggcttccaattcttttcacatcaacaactaccagaaatcaaaagctgtgctctgcatcataaagccccagctatttttgaggcacttatgaaaattctcccttttctttgagaagaatggattataaaatggatctgtgagaagaaatttggatgtgttctcacgagatgagtcctgggcagcaggacttataagaaaagcagcttaaacaagacagttaaaactgacagcagtattaaatggtgcaccatacccagccctttccagtcactttcaaatttggaaggtccaaaaatgaaccatttagcctgcagttgtttgtcaggatcaagctaaaaaggaagcctaagtgagcctccataggtcgcaagagagtacagacatccagaagcactaaggaaaattcagataaagcagcagttctacaaatgtcatctgcagtctttttccagaaagagagggggcacaagatccttttaagggtctgcaaggttaaagctattttcttaataacattaaaacgttaattttttccctgtattgataatgtgcactattcatactaaaagcacggttgggtaaaattgctggcattttacaaaaatcagacaagtggcaccaaactatactagtagtcattgtattcttcaccaccacacactcacagtaaaaaaatagtttaaagccagtttcatttaagattgtccatcatggctaggtgcagtggctcacccctgtaatctcagcactctgggaagctgaggcaggcaaactgcttgagtccagcagttccaggcaagtctgggcaacatagagaaatcccatctctactaaaaaatacaaaaaaaattatccaggtgtggtggtgtacctgtaatcccagctactccggggactgaggtgggagaatcacctgagcccaggaggttgaggctgcagtgagctgagattgtgccactgtactccagcctgggcaaccagagtgagaccctatcaaggagggaaggaggaaaggaaggaagggagtgagggagggagggaaaatgtccatcattacttttataaaattctcaagcacacatctttttaatgctctgtgacaaaatgagaagtacacagaacttgtgctgcataccaaagtatgatgtttgtctcaaaaactacttgtgtgattaagttgtgagttgaactagctactattttcattggacaccatttttattgtatatggtcattcggttttgggtatttagaatactttttttttggaaatgaatgaagtgaacctgtcactttaaggaaaatgactgacatttgttgccaatgataaaatctgagctttcaagcaaaaattggaatttttagaaaacttgtctctgctactttgaccttgagatcttcctaaaacttaaaaaatgttgttgatgagatagggagtattaataatagtgatattttgatgctctataatgaaatgtgtcaatatatagaagatctgcataactcagtgaaccaatattttgtaactaaacaatgcaaggtatttcaaaatcatgtaagggtaaaagatccatcctaagtgccaagatataaagagtacaaaacattcattgatatggtttcagattccacattgcaactcacctttaagaaacttctacgtgtcaagttttgaagtggtatcaaaaaagaatacaattatttgaaaagtctattaaaatatgcctcccttttccaactacttatctgtgggaggttggatttccttcatatacttgaatcacaagacgtatctaaatagactgaatggaaaaacatatatgagaatccagttgaaaattattaagccagacattagatttgcaaaaatgtaagataatactctgcctggtaattttttgttactgttttagaaaatagttatttttcattaaaatactattcattatttatgttaacatgtagcgggtttattacatttaagaaatctattagttttaatttcaaatacagtaaatattgataaatacagcctacataagcaaaagttctttggagtcctcaatgatttttttaagagtgtaaaagggtccctagaccaaaacgttgctgtggaaataaagtaagttataatgccacctgctggcaaagcctgaaatcattgctgctcctgaaagcagcagctaccaaactgtttcctcacgtatatccagataggtctcaaagaatgctcttctttgagactcagccaggggaaggcagctggggtgagtgggggagattttgagacagagttctcttactgagtagtagtaataatcctccccagtagcctgtcttaacttaaaccacaggttactgaagttggcacctgtagtataagagatttacttctgttttcttcatttgactccttgagctgtgtctcttcacagcttgttaactccactttttcttcttcagaaatatctgtcactataagatgttttattcccttataggggaaacgtctagctgggctcattgaagtttaggcattggtcctaaagaaatatgtgggcatcatgattccaggcagttgaatgctcttgggattttattcagcctttaagttgcctctgtgggctcactaaaatggagagaaaagaatagttcgggggagaggttttttcttactctgaccatgtctgtctaacagttccttgtttgaaatcatccaatagaaaactgaagccatttgaagcttctccccaccccaccccatgcttcattttccttttggcattgctcataatactgattcaaacttcacacttccctccttttgtttgtagattttaaatggagggactccagacattccttccagtggcctactatcaggccaggctcaggagaacccaggttatccatattctgatagttcttctattcttggtaagtggcatcattattcgtttccattgcaatgagcttgcaaaacatcttacataaagtcaattttaagaactgaactgtgtgaaacaagctaatcctagataaatttgataggaacagaataaaagtttaaaatttgtttaaatctctaaaaagttgaccagtatttgagttttggtggaggtccaagtttgtgcctggaactcaagaggaggctacagctacctagacataggctttctcccatgtggggcataatctcttcagagagagaaggctaatgaaggttcagagataatgcctagaagggtgattagtaagcatatcagaaggtattaaaagtcattaagtgaaaagagtttgcttttcccatcacatccatctttttctcccctgggctttctagatctgtttttttcctaaactctcccttcctatttgcctttctttttgtaactcctcttaactggttacatcagattattaaaataagcttgactcaaatatttttaacatttactaaattttaagcgctttgtacttatttctaaaatgatcatttgattccttagagctgtctcttcacaacgtaaccccacttatttcttacgtatttttaaaaaattggttctttcctctaaaaaacagcgatataaaaaaagatagccatgcagcccaaaaagcagcatctcaccctaccattaaatgtaactttcttattaaaaatgtgcttaggaattgcttacttaatctgaagatgctttaaaaaagaaatcactgaccagtctttatctcctcccacaggtgagaacccccacataggtatagacatgattgacaacgaccaaggatcaagtagtcccagtaatgatgaggcagcaatggctgtcatcatgagcctcttggaagcagatgctggactgggtggccctgttgactttagtgacttgccatggccgctgtaaacactacatgttgctttggcaacagctatagtatcaaagtgcattactggtggagttttacagtctgtgaagcttactggataaggagagaatagcttttatgtactgacttcataaaagccatctcagagccattgatacaagtcaatcttactatatgtaacttcagacaaagtggaactaagcctgctccagtgtttcctcatcattgattattgggctagctgtggatagcttgcattaattgtatattttggattctgtttgtgttgaattttttaatcattgtgcacagaagcatcattggtagcttttatatgcaaatggtcatttcagatgtatggtgtttttacactacaaagaagtcccccatgtggatatttcttatactaattgtatcataaagccgtttattcttccttgt

SEQ ID NO: 15454 - DNA, 31471 bp, Homo sapiens
atgattaatatgtaagttatcccagatgattaagacagccaacacccaggggctggagagtgggtatgagggctgtgagggcgttcttccatagcagtaactccccagcagaaagactgcgagatgttggccacaaaccctttgtcttgagcaagcgctaagggagccactgatgtgttctaaggcctctgtcatctggacctgtgggttccagcctggtcaccacccaagatttcccttgtggactctggtttgctaatcttctgtaattcatggagactcaattaattaagcaaccttaatccctttcactatcattttaatgtaactgaagtcatctgtgactgtcaggcagagctttttctcacctgagattatcacctggcctcaaggaacagatagaattctagacaaaagggagaggggagtttttgtccttccgtgcggcctgcgtgatctctgaactttagaactagctggggaaactctctgcctgtgaggaaccccagggcgtctaattgggaacactgttctagaatgcccatgatatgatccagtgctcctagaaacagctatttttgcccttgggattacattgtttgaagggccatgctctctcctttcctgtgggataaaggaaaaaggagagaggcccagctggcagtccatgccctcctgataaatgtatggattggagaaggcggtgagggggatttggaactccttcctctggggatttcagtctgttttcttctactgaaccacaggatgcaacgaaacttggttttctgaagtctgtgaaagggagggagatccttgctgtgaccccaggacttctgtggccctcagccccactacgcccctccatcccaattcctaaaatctaggggttcccacctacctgagaagcagaatatttggcagtagtgcctttgaaaagctgcctggggctctgctcagtactttgttggtactttaattccaccctcctcacttcgtcccttccctgccaaatagatatgtatgcacatttatctttgatgctcaatatgttttgcaaacagaataagcttcatttatccagaatgatggggggggagaatgagaggttatatagatatttcaatcctatggttaactaagcatttttataaacactacatattcccaattttcaaacaatcagaatatggtaaaatatatgttaacacacaaactcttttgagatgataacttttgtttgataacctgagaagctggtccaggttttatagtaagttcaagttaattttcatttgttttacccttattatacatcattaattgatactgtggctgttcgaactttatgattgtttggtttctggataaatgagagccttctgtcttatgataagaagctcttctgtatgtctttattaacatgcagtcacattctcttttgttttttcagagaaagcatggacacagacaaagatgaccctcatggaaggtaccatgaacctagtaatttgaacttcagcatccttatagccattttctttgcactgttacacattctgttacttggggcagcacccatgtcctcaactggagatgagcaaggaggccgtgagcctgtgggcgctcactgtgtccctccaacccccagtccccttgtgtgtctgcagagagatgacaggatcaggcagaagaaaacagcaatgtgtaactttgccattcatctccagagaattatgtttttatcttttgctttttcctccccccaggttagaatatacagaacaccaaggaaggataaaaaatgcaaggtaagcttggaccttattttgtctacaaagcatcctagttctggttgcttagagagcagctgaggaggctctgcatgtttggtcctgtctaagagttctgttgggcactgtcacctccttagggaataggcaggtagtgggccttggccgaggtggccttctgccctccatgctctccatactggctggcctttactctttgctgtctaagcacctttaacctgaagtggatttgaaggtagcagaaatcaatcaaggctcaagtttttccccagtcttcagcagagaacgtcttcctgactggagcgccctccgcaggagacatggctcagtgatttggttcctgggctgggacttgcctctgtcaggggcccctattgcactgcgagttgcaactgaatgcaccacatggggcatgctcggtgtctcgagtagattctctgcctgggtctgtcctgcctccagccacacttgctgacctcttcccattgcgtcctcagttcttctgccgttagtaccaggctgtgttctgaggctgcgtcatgacagactgatacagggggctgcagaaattggctgccctaaggcttcaagctcttccctcggaggccagccttagcaggagctcccatggctctgtatctgcggcagctgcagcaaactacatttccatcgttgctgcacctccttaggaggaccatcaccaatggcaggtgcacatcagtcagtgtcaccctgcctcagcgggaggagtgtgacattcctcagaggaggctcctggggacagatgtagcatctgctgcacctaggtggggacctagttttgatccaaggatgacggcgttggttactgggtgccctagtcagtgaggctgtgactggaaagaattggtgccctgcccaggtcacatggccacacagcgggctcctcacagacctcagggacagcccacggggctctggatgctctgtgctatgaagccaccacctcccttctctttcctttcacccccatttcaaaatccaatttgacaaaggctgagaggaaaagaaacgaggagaaatgaacaattcagtttactctgaagagacaatttttgtagcttttctcctgaattctaaagatgaggtaaacataaaaaaattaatactgacctggcagtgagaccattttcttggagactttagttgaaaagtctaattttaaacattctgcaaattctaaatttgccttgtcagatgaacattgaaaacagttacaactcatttatttttgtcatcttttcttgatgcttggttacattttataagaaatcgtttttcatattgttgttcagggaagctcacagtcagattgaaaagcggcgtcgggataaaatgaacagttttatagatgaattggcttctttggtaccaacatgcaacgcaatgtccaggaaattagataaacttactgtgctaaggatggctgttcagcacatgaaaacattaagaggtgagaccctgggctctattgtcctttatgtccttgcccacaaatgttaccacccttgcctagaatgttcctatccctaaggcagatgtttattacttgcaattatgtagccttcagtagtatgcctttactcttcagcaacagccgtgatgccaaatgaagtgattattgagcttatgtgggttttgacatgcaattttgcagtcacacattctcagagcatagaaactgtgctttgcacgtctctgtatatgcatgtaatcaggctatgtgcctatcagagatgatactgctctgatgtctcacatcttgcctatgtttgtgcctggatcccatccttacaattataacacgcagaaatgtaggtgcacacagtgacacagaaaagtcagttcaaagatgaaaattcatcatggttcctttgaaaagtgagtcatgggttgtgggttctcgcgacattttgttgtcaggaatgaacactgaagatattttcatcttcctggaattttcccgaaccagatccactctttgtgagggaggcagtattttccttcttttctgagtgtggggagggtgagaaaacataggcagaaaagtggaagtgacttatccaaaccacaagagaaatctgaaatatatcaggcattttagtgaatgctgttcctggaattttccatagctagtcttggacttttggaggaaattggaaagtgggcgctcagtcagatctctgacctgcgtggtagaagaattgcgtctttttatatttgcacaaggccaccagaaataagaagtagctggttttgtctgactttagatcattacccaaaaatataaatgttgtatcctgtgctggaagaatggcatttaaaaattcatattagcaaagataacatgggttaaattattataaactaatttctattaaattggaaaaaagtggcaaatctcaagttacagtaaagagcagggatagggatcaataggatggttgcaacacgtcctgtctccttccctccccatggtactttgaattgttacagatccatttccttttattccttcactattctactcgctattctacagactccaaatcatttactgctggcatttttctctgttaagtgattgttctcctgaaaaatgccagattgacagccttttaaacctaagtcttgtcccctttcagtcctgggagtgcgagctgcattgactgaagcaatgcattcctccacattgccacgctcgtttaactcacccctgatgaagagtaactcacattaaatgccttccacaatatatttactcagggcctggaagactgaatggtttcccaagaacatttagagtggtgatttgaaggactaccagacaacccatttaatacagatcttaggaggagggaactctctgaggagcctctaccagtttacttccagagctgccttctttcttagaagcagattgttaaacttccttctattatctcttggttttccctgtaatgagaaaaacaggcttgttaggtctcctgtgggtaacagtgttctctcttccatggaattctctttggcttacaggattctgtccaaagccagatctaggctcatctcagttaaggcctaaacaataaaatttaaataccaggtcatagagactaggccacttacagaaggtttgaggcagcaagttagaatgagacattttctgaatatcaagtataccaattctttctctttttgcccctaaggtgccaccaatccatacacagaagcaaactacaaaccaacttttctatcagacgatgaattgaaacacctcattctcagggtatgttcaattatgggattgttttacaacgtttgtttttataaattttcaagtaagtaccagcatgtgggaatttgatgtttcaacactgagcttttttttttaggcctgcttcctctctcaggtccctccctttatcttattgtttggacaggcttcacatttcttccacaaaaccattctcctcctcttttaacctcgtctagacaaaaatggaaggtctatgccaccgcaatttaaaatcagaagagtcaggatttgttaaaaataagggggatttgagaatcacatttctgcatgaagattttaggaagggactgaaaccaacaacaattgagaatttctcttcacctgatttaaccactagcacaaaaaagtccacctaaatctttacaccaaaatctcatcaaaataacaaaactgtggctcacgcctataatcccagcactttgagaggccaagacgggcagatcacctgaggtcgagtttgagaccagcatggccaacatgttgaaaccctgtctctattaaatatataaaaattagctgggtgtggtggcagatgccttcttgggaggctgagacatgagaattgcttgaacctgggaggtggaggttgcagtaagctgagatcactccactgcactccagcttgggcaacagagtgagactctgtctcaaaaaacaaacaaacttacaaagactagtggtccaaaaaagaaaaataaatgcaagagatatatgctttcacctgcttgacttgagtgctctctctgtcttgctaaatctctgctgggagatggttgaggtggcactatgggaacctgttgtcttccatgaagaattaggtcggcacaaagctctaagttgtgttactaggtaaagtgagattaacttgggaattgaagggaaagaaactggattcagaaacgtgttcttgtagattgtaaacagatgaatagaaaaacgtaactaaaaggaaggatacccgcttccacctcccacaaagtcagggctgaccttacctgcacagccaacagaatcttcctacccatctttgagcagaagtttgcaaagctctagagtagagggtagtccatctggaattttgcatcatcactatccattttcagctctctataagcctggcctgtctgctcactccagcattctctatttatctcctcatgacgtgctatctcaaattggaaagcattcacctgcaaggaccagaagacctgatgaataaatagagtttaatttctcaagtataactggtctggagtaggttatgttgggttgctgcagtggttcaatgaggtcaataggaaccaggttctttgtctttgcactcagccacaccaagctagcatgctagcttgtttccttaatgtagccaggtacctttgccaggtctaagtagccagacccactgtaaaaacaggggtaaatgaagctctagtctggctgtcctttttatcaagaaaggatacaccttcctgaaaactcaacagtggacttcagcttattcaaaagtgtgtcacttggtcacgcctagctgcagggcagggtgcagaaacaagtgtttatagattttccagcctccctggtggagacaggcaagagagaaggggcctgggaatggtgttgggaattggcttccccaacagtgtttgccacacacactttccagagccacatgcatttgctcgattccttccagaagtgactcccacaacccaatatagtgcttcaactgtggtctgattggcctgaggttgaatgggactagtgccttccttgccaaaaaagccatctgattagtactgtatcatttggggcagctgcagtactgcctcctcccccttctctcctgaatatgaattattgttaggtcaggttttttacatcttgtataggtgcttttttgaacttaagataggacttctctttcatttctgtcaaaacctgtttgttgaatggccccacagtccagcttgtcattagtgacccttggaatctttgtgtgacttgtagatccaatacatgcctctgtgcctttcatccttgtttattcataaattcaacaaacatttttgtttacttactagatgcatggcattgttctaggaacatccaaatcaatgataaacactttagggtgggaccaggctcccgatcaagtgagtgatagtcttttggctaccactctcaggacacagttattcaaacacccaactttgcccacctctccatccttttcgtaaagatgtccgtgttctcagagaggatttgctgaggttaaaatatgaccgatgcctgtagcatctcgagagctgccgtcggtgccagcttcatgggcatgtgacctctgcagtttcacaaggccccatgcttggtttaatgccctgtcaccatcttgaaaacgtaatttttgaacaaggatccctgcattttcattttgtactgggccccacaaattatgtaactggtcctgattcccatactggtaacagatctgcagctgtagatgtgataggcctgcctctatgcctttcattcttgcgtattcatgaattcaacaaacccttttgtgtacttactagaggcttggcattgttctaggaacatccaaatcaatgacattttgggctggggtacaggcttgattattttaagaaaaagaatctatgtctttatttcatatatatatatatatatatatatatatatatatatatatgtaaaataattatcaagcagagtcctgtggatggacaaatttaaaaataaataaaacaagctccttttgcagtggcacgtgcttaatcgttttcttgttgctgcttttcttaataattttctatcagatacccatacttaccagggtatggaacaaggattatcatgctatctcagctaaatacttcatgttgggcttgtctcttctactcccttgtttatgcagcactcaagagtgatctctcttgcccgatgaaggttttgtcacctctctagcacgtgtcagtggctgtgaaatactgtccagtcccttatcacttccagggtcccagttccagggacttgcttccacagaaagccaggtctactcagatgatgttcagacagtttggccgcaggagctggacttctgcttttcctcagcaatgcaaaatggacaaactgctttctttactaagtgctttcaaaatatctttaataaagtgtatgtcagggatcagtcaactgtatcagtttacaatgtctacgttagtctacttccccatgttttgaaaactaggcagaccgtaccaaggcctctgtgtcttttattaaccagcaccatcttcccaagagtgaccctgccactggctggcccctgtggctctgtggtgctggtagtgttctcacagcttctgctccttagctgtccttcgggcccggctccttcacagatggtctgctggccagggtgctatggagttggaatgtccagagcctcccctcgctgatgcattcactgctttggaacctgctggctttcctctggagtactgaaatagctttacctgtgttgtcggttcaggcctgaccctgcccagcattacctccagggtgtcacagttcccttctgtccaggtacctttcaagccacattgccacatcaatgaaaagcctcaaaaacacttccatgagatacaagattatctgcaaggcaaacgaggaagtttttaataccctatttgttgacagaatgaggcttccagcagatggtgcttggaaagttacttccccctcactgtcatcccttgcccctgggccagcttagggacctaacttaggaaaggatcctccccagcttccttctggctgagtagcctgccagggtcttaagcaacagtgattctgttcccctctcactcatttcttctgtcccagcacaagtacatgcaccattcttttaccttctggcacattaattcatttcctagttctttgaattaaaccacatcatgaaggcccttttgtggaaaaagagaacagtttctctgtatttttccaaagagcagattaaggaccagtgaataaggtgagaaactagtccactgtgtattagaacgagggagggctgagtcataagagcaagggcatgacagagtggggcacaccctccttgtcaccggaagaccccagcaggagttgagtggttgtatgtctggaaggcagtgggtgggattcacacagcccaagctctcaggcactatagcttgggtatttacctgcttcagtctctttaccaaatgttgtcctatcttaatggctggctttattggaacatttagattttttcctgtatttaaactgaagaaggggtaagaagaatctaagcggggagttttgcttttctgaatgcaaatagtccggccctggatggagggataacatttgagagtagtagttctcagccctatgtacattagaatcacattaacgtggaagtgggatgggtttaaaaataccccagtgatcagccccatgccagaccatcagcataaaaacaaaaacaaaaaacactgctccgaatgttgagaaccactgttttagagagctccctgtacgtggaggttttcaagttgaaggcagatgatggctgagatgttggagaggggattcttgaagagtccttccaaatctcagattctctgactctccatagagttgttattattagagcaatgaaatatgattctctggaccatgataccttcaaaagaacacgtgcaagctgaattctgctttgaaatataacttactttaattggactttcttcctataataattagatgatatgcagaaacacacacacacacacacacacacacacacacacacacaatcttacagttcttcagagacgtttgttttcagcatcctgcactcaggatatcactgaaactgttagtgttcctgtgctttggatgcttagaaagcacatcctctatttgttatcagggtgattacaaattatgtttcctacagtatgagaaattgattatccatttctcctgattaggcagcagatggatttttgtttgtcgtaggatgtgaccgagggaagatactctttgtctcagagtctgtcttcaagatcctcaactacagccaggtattgttcatgctcctgttgatggtgggcagcctcacagcagtcagaagtgtcactcaattttgtcagaataattatagtatacaagtcacatgtgaacttcttccagaaaattcttaacttcttaacagataaattaatttagacttagaacaatcttgtaatatgttccgtattccccccattgaaagatctgactctgatctgatcgatagcattatggctttcttctattgctgcaaaataaatatcccacaatatgtggcaaggacagagggtaagaggctatctgacaagggagaaaggtaggcaggttaacacaataccagagaatacgtcacttggaaatccactccatactgtgtttgcagtgctgtgtcacttcttagctctattgaacctcagtttactctaaaaattaatgataacttataggatcaaataagagtaacatttataaacgcttctagaacagaacttttcacctattatgtcccccagagtttttattcatttattcattcactcacacactggtatttgcatggaagcttggtaggcagaagacttgaagaatcaaaatgacatttatgtaaattagaattaatgtaaatttaatttttccaaagatttctgctctttttagtctcagagcaaagttatggaggaagttgctgttatctctgttaatagacaaggtgactgaagcatatgatatgcgtgacttgcttgagaacagagaggctgaacagcagagctggaatcagagcccacccctatcttctgccttctgaggtcttacaggggaattccaagattgttgccttagaagagcataaactgtttatataattgagggttttcccgtcatgttatcaaaaccaacctccagatgcctccttcctggtgtcaggcaaagtggttggacatatgtacaggttcacataggaaaagtttgaggtctcatgcacaaaaacacaaaggcaacatgcagactgtgcatgcttacttgttgcataattgattttctgcatgcaattgacttgtcatgtttaacatttcatctccccagaatgatctgattggtcagagtttgtttgactacctgcatcctaaagatattgccaaagtcaaggagcagctctcctcctctgacaccgcaccccgggagcggctcatagatgcaaaaagtgagtaccagagaggcctcgcatttcctcagcagcccactcacaggcagccaaccctgagtgagcagagggcgggtgtgtgtgatgggctcagcctttccagtcctacttctctgtcctctttctggggcaccagagctatctttggctaaatggaattatttatgttctttggtcttttacataaaaagaagaaaaaaatctcaatgtccaaatttattgaaaagaagagctatttagactggattctttctgatttttagacttttcttttttctttcagaatctagaaaatcccagttgtatgctcctgagtttaaagggctaagtttgatttgttctcccagaacaaatgggctctatttacctgaattgcacacaggcagcctcataaaagtaagaaaacgtcaactataaatatggtgtttcttcaaccaaagtgttcctccttaggttggctcccccacctggctttcttcttttgcagtagtggaaccaccatccacatcgctccctctgcccccagcttcctgctactgcacacacttctgtgcaaggccccagtagctgtcatctactttagtcctgtgggaggctgtacactcctacagttaagaatgagagaatgaggactctggctgggcgcagtggctcacatctgtaatcccagcacttcgggaggctgaggcaggtggatctcttgaggtcaggggtttgcaaccaacctggccaacatggcaaaaccccgtctctactaataatacaaaaattagacaggtgtggtggtgcgtgcctgtaatccaagctacttgggaggctgaggcaggagagtttcttgaatccaggaggtgggggttgcagtaagctgagattgtaccactgactgcactccagcctgggtaacagagcaagactctgtctcagaaaaaaaaaaaaaaaaaaaaagaatgagaacacaagggagattactgggctcattccggctccaccattcactagctgtgtgaccttgagcaagttacttaacctctctctgtctcagttttctcatttatggaagagtacctatttctttgggttgttgtgaggattgaaagtgttaatgtatataaagcaggcagaacagttcctagcacatagtaagaacagtatcagtgtggcctaatgtcttgctcccaagctgtccacgttaatccctggaaaaaaataccaccagataatctccttcaagtcatctctttcattacagcacaccgcttgttcctaaaagtaaaatgcagactttggtatctgttgttctttatagtctagccttggcttttttaagtgaccttaggagaaaaatatgaatggcatttgggccttgcctttgaggctcttagcatatagtcagagaaatgagacagacagcaccctgcatagtaataggtacagccatagaaatagtgccaggcatagagaacggatgattaattctcatgtgggcgcaaggacaggcatcactgagtagatgacaaccgaggtgggtttgaaaagatgaattaatgtttgccaggtaatgaagggaggaacaaagaggaaacaatctgtgcacaggtgcaggggtgtggagccacatggcttgcttggtgctattggacaaaacgtgcacggaggggaagggctgaaccatgaagaccatttgttctgtggggacacagtgaagagctctgagttgggtggggcaggctcggattggcattctaggggagatcgcagagctggcaatgtgggaggtagatgggatgggaggaagcccagaaggagccctgggcagtggccattcctcggcacacttgctcgtgtgatggccatgggtgtgttttccctcggcttctgtactgacacctagccagtgtttggtaaggaggtgtgctcctcagaatcacctgggagcttttcaacatagtcatgctccacccccagagattctaatttggtttttccagacagcacagtccaataaaaacataatgcaaaccacaaacatgagccacatatataatttcatattttctggtagccagactttaaaaaataaaaataaatgtaaaattaactccaaaatatttcagcatgtaataattataaacaactaataagttcgttcacattcttttatttttctatactgtctttgaaatcctgtgtgtatttaacacttacagcacatttcaattcagaaaagccacatttcaagtgctcagtacctgcatgcagctagtggctaatgcattggacagcacagatctagaatggggtccaggaatctgtaggttgatcatgcatccagggtattctggcctacaagccaggttgagaacttaaggcagtccggctcccaccttgccttcccaatatccatatcctacccatccttcagtgccagcccaagttccttctcctctgggaagcacaggttgtctttgccatttatttggcactaatcatacatcaccctgtcctattattaatcttttcttggtgcacctccatttgccctttgttagccataagcgtctattgggcaagaaccccatactatatttcttttcatccccagagtacctaatccatttatttagtagcacactctgtgatttataaacatttccagactgacaacacacctgtccatgctgcatctgttaaagcctaaacttgggagatatttatctcatgtcatcattataaaacagtgaggcaggcaagaaaaggctttgctcaaggtcacactccccctcctgacagacaacactgctctcagtttatcacattttgtgtattgatttgcagctggacttccagttaaaacagatataacccctgggccatctcgattatgttctggagcacgacgttctttcttctgtaggatgaagtgtaacaggccttcagtaaaggttgaagacaaggacttcccctctacctgctcaaagaaaaaaggtaacaatttaacagtccattaaaaccctgtgacaggtgaagcatgctttctgcagcggagctctcagctgggcgttggttccatggtttctggctggccagagtggcaggtcccaggactgcagacaggaccctgcagtcctccctatgtgtagggcagttgggagcagaggagagagctgaaaagcctgatggcagagatttgtggagaggcctcctctgtttaaattgtgtttcttttaacatgattgaggaagaatactctcagccacaatcctaactgccttatgaacagccaccagtccaccaaaattactctgagctcaccagtgaccttgatgttgttaaatgcgatgaacatttttcctttgtcttccttcttgaagtgttctcttctcctggattccatgaaaccacattcttcttcctcctccccgaccccctgctgctacaggctctcttgctggcccctttgctggctgcccctctctgtcctgggctgcatctctgtctgcagtctctctctgttggtcatgtcatctactccctcagctttaaatgccaacaacttccacattcatatttccagcctagacttgtcttttgaactccagattcataaatatactgcttactaaatcaacctgctttggatatctcaggggagtctccaacaggatacgtgccgaagtaatcacctgagcctctcctccagcataaatggcactgccattcagctggctgctcatgctagaagccggggaggtgccctcacttctgcttcaccaccccactcttcaatcccgttagttatgaagtcctgccacaatgagtcccatctgcaaaagttctctgaaatgtttgtccctttccatgctgcctactttcactcagctccaggctgcccccaactctcaccaggtctcataaagtgtagacccacatgctccccacccccaacacagcagccaggatgatctttttatcagtccccttttaaaaacccttcagtgttccctattgttcttgaagaaaagctcaaaatatttaacgtgaccatgcagcccccgaccctgccactaagcacatgtgagccatgttgacttcctttgatgcctcaagccccttctgggcaatgcttctgcacatgctgtcgcttcctggttggaatttcttccctctccccatgaactcccttcacatggctctctccaacctcagactgccttatgtcttatagcaccctactggtttgctttctagtgctttcttatacttgctgttatatagttatttgtgcgattatttgtttaaagtctgtctcccccactaggctgtaaactccacaagggcatgtctgatttgtttttcactctattccagtaaccagcacagactccacgcttggcagacactccatagtggtttgcttgttggtgaagtctataggtgctccacatttaatgtgtcccaaatcgaactatcttttttctctctctctcttctagtctgttttctttcttctctgagtcagtgaatgacaccagcaaccacccaatccagaaaagttagagtcatcttcatttgtttctttcccttaagcctgatattcacagcaaatcccaacagtttgatctcagaaatttctcctgctttctttctctgctccctctcatcttcactgcactgccatagttcagtcctcctaatctcttgctgtattatagccactggcccctgaatcagccttcctacttctgttttctactgtcttccagttcatacgtcactctgctcctacagcatccaaaccacaatttgattttgctgtttctgcacttaaatacctgtagatgctctccatttcctgccttaaaaagacagaccaacattggttagaaagtaatccaaggcccttttaatcttcctccaacctgcctttccaatttgcccctcactcccagtacctccaatttcacttcaaccacacagagctcttggccagttcctatataggctgtgcctctgtgcctgtgtacgtcatcagcctttatacattctagtccctcagccactgctcatccttcttgatccacctcctctactggttttttgggggagccttcctctccctaggaagagttagatattccttccttggtgtatgtaatgaatgtccatggtataactggccctacttaagcattctgacactggatgacagtttgtttctctttccgtctgcccctttcattagatgcttacttctggagagtgaagccttgatttttttttattttttgactccctacctacatcccatcccaccatcggccgtgtacacctccatggcccaaacctagtgctgacactaaccacgaactttgctttctagcagatcgaaaaagcttctgcacaatccacagcacaggctatttgaaaagctggccacccacaaagatggggctggatgaagacaacgaaccagacaatgaggggtgtaacctcagctgcctcgtcgcaattggacgactgcattctcatgtagttccacaaccagtgaacggggaaatcagggtgaaatctatggaatatgtttctcggcacgcgatagatggaaagtttgtttttgtagaccagaggtaagagtctacatactacccttgagcaatgatggtagaggattttcaaccctgatctaaaaagcagagaagactgggccatcagctggcttttctaagaatgaagaaagaaagaaaaagctgggtgcagtggctcacacctcaaatcccagcactttttgaggccaaggtgggtggatcacttgagcccaggagtttgagactagcctgggcaacgtggcaaaaccctgtctcaactaaaaatacaaaaattagccaggcatggtgacacatacctgtagtcccatctactctggaggctgaagcaggaggatcagctgagcctcgggaggtcaaggctgcagtgagctgtgattgcaccactgcacttccgcctgggcaacagagtgagaccctgtttcaaaaaaaaagagacaaatgatgagagtctctgttaaaaaatgagattcaataggatatcatcataaatacagagatttttctgtcattctttggcatatagagacaattaagtggggtgccttgatgtccatggctaaaagaaaaacagtagggatagcatgctgtctgaatctatggaatgttccagaaccattattgtgattgaaattcttttgaatctaggacttggaagcaattatttagtcctgagctgtccaataaaatactcgttggccatggtagcctcccatgtggctaacggcacagacatagaacatttccatcatcacagaaagtcttgttggacagcgttgatctaatccaacctccttattttatggatgaagaacagaggccagcctggggactggtctcctgtaggattcacaattaattggtaatagacctggaccaaggacccaggtgtcccaaatttactgctgcctactgctttccctcagaatatgcacaggctaataatttttctggctactagagacagccacaacatgctggaaaaagagacagcctcagctgtcttgtggcctcagctgctgcagcttctggcatttggttgtcctgataaaaaggaggcagcaaaaactagaagccttgcactgaggtttagatttataccacattttaatctaattaatgtggttccttttttaaagacagatctcagtctgtcacccaggctagatctagtgcagtggcgagatcttggcttactgtagccttgacctcccgggctcaagcagtcctcccacctcagcctcccaggtagctgtgaccataggcatgtgccaccatacccagctcattgttctgtgtttttggtaaagacagggtttcaccatgttgcccaagctaatcttgaattcctgagctcagacaatctgcccaactcggcctcccaaagtgctgggatgacaggcatgaaccaccatgcccgactggttgcaatttttaaagccccctcagatttgatttcttgtgataatagtccctttacaaaggctttgctctgtttccctctatttttatagccttgattaaattcagatgcctgaaaaaaagagagaaagatccacacagtgagccctctgaaaatccatccagctcttttgcctgcagctttgaccttgctctcataggctgtagcagggtttatccattgcaaagttgcaattaatcatctgaatggctttttcttctttaaatattcctttattcccttttagggcaacagctattttggcatatttaccacaagaacttctaggcacatcgtgttatgaatattttcaccaagatgacataggacatcttgcagaatgtcataggcaaggtaagctaggatgtatgaaagatcttaagttgaaagtgtccccttgcttctagactagtcaacatgaccttccagggaaatctgtccactgaggatgtagagtcagccagcctaggactcttcaggtcagaacatctgtgtgaagaggaagctgatacctgcaggcactgtttatcccccttgtagttgccctgtgctgactgcatggcagtttctgaaagacatctcttgttcagagggttttcccagaccctgtaaagatttagtatggcccagactgatctgattctcttttccattcaagcctgcactacctcctgtgttttctgtcttgactaatgctgtggcttcatgtgcaggctcctgagagagaccaacattgaccccttctttcactgtgtctccaccagatcctgttcattcacctcagacatgcatttccaaaagtctactttttaccacctctgccatcaccctggttcaggccctcgtgcctacttagagacctgtgatagacttctcagggtttctctgatccctctcacccccagttcatcttccatagttatcctatttatccccagatagattgagcctggtaacatcagcctgcttaaaaacctcctgctttagactcaagcccaaatgcttttgacaggcaatcaaatgtgagaccttccaccttctggccccagcccacctcctcagtttcagtccccatccctgcctgcagaggcctgtgctccaggcacactgacctcactggcctctccccaaccagaccctgctgctcctcaggcactgctgggttcttccctccctccttctcttggcaaactcgtgttcatccctcaaggctctgatctcttctccctgtatagccttccctcactactcttcttgagggcaggagtcatagcctgtctcctcttgtatctccagtgcctggcacatgagaagggctcattacatgttacatgaaagaatgaggttgaataggtgagtagcctctgttgatttggatgttcttagaaatgagataagttctatattgcccttgggctttgtgattgagataaagcatgacattttggacagtgccttctcatttgctggtggtcatgttagagctgattccagttagatgtataacatgcagtcagtaattccctagagcctcaattttacagactatggaaaatcatgacagcttcacaaatgaattgaaaggctctgagttagaccctcagaaacaacctatttcctgagtgttgaccactgcagtttccttggcttactaaagagcgatgtcgttggagctcaagtacctttaatattttgtattggatgtcctgtttaatactttggtctgagaaaacaacaatgtccatgttttctttacattttcagttttacagacgagagaaaaaattacaactaattgctataaatttaaaatcaaagatggttcttttatcacactacggagtcgatggttcagtttcatgaacccttggaccaaggaagtagaatatattgtctcaactaacactgttgttttgtaagtacttttcctatatctgaagctccccttgcttcaaacagatgcctagggttcctcatctgggaaatggggtgcaggcaacatccagtatcacatcctttaatgccatcttgctaatacctgtgaagcctcaggactggcagaagctagaaaggattgttaacaaagggacaagcttcaggacttgtaccatgcaggccctggcttatgaaactgctccaggaaatagcaacatttccttccagataaagcagctaacctttgaattccacaggccctgcaccctaggcatccacttgtgctgctgtggaggaaggggttggcaatctatgaaaggctcattcaggcactagctcacactggccttggctgaggatggggaggtctccatacctgtcaggcagggggcccaagcactggcagctggaatgccatctcaaaaggctgctacctgctagatgagcagagggaggtgaaggagcctctctttggccaggcctgctccccacttttccttccccatagtgtccaaaaccccacctatggtaagagctgtgtgaggggccggggctaggtgcactgcaggctggcaggaggaggtgctgtaatgatggcagtaggttactgcagccaccacctctgctgaactgtgtcccacacatattaggaaggcctaggcaggcagtggggccaaaggccaggatgctatccattatattatcaaacagtgagacctgtttacccactcagacagacacttcattttctggcctgtccaggtccagagtggacaccggacaccttggccaagttgaatggtgcacagttctgagcaggcctgactcacgtttccttattgctgggatgttcacagagccaacgtcctggaaggcggggacccaaccttcccacagctcacagcatccccccacagcatggacagcatgctgccctctggagaaggtaactatgtgctgctggggccctggggcttgcccgtgggaaggtgcttgtggtcaaatatcctcccctaaagtattcagggtcccctccattcatattctgtggaacaagggaggcctcgaggggatgatgtgcggatttccccatgaatgcagaggacactgtcatgtcactttctctgttgagccggaatactaggagctcactgctgcacttcccaaagctgctggcccctggaagcccttgagctcgcaaactccctactccccttgtgctttcctcctgtgttggctagtggccatgatgtgaagtgctctttcgtgactgtcactaactcctgtggttggcaggcaggtgtctttcggcaccagggtgtgtaccatacccactgggctcccttctcaggctcagccttggccctgcccctgctgtccacgctggactcatccttcctgggaccatccccacatgcatggctgcagcccccatcgatgactcccacatccacatctcctggcccagtctctctcccgagctccagatctgtctctccaaatgcctcatagacagaaccacctggagtctcagaggcacctgaaattcagaatatcccaagctgattttctgcactcccctacctgattggttgtttaagccagaaacctggctgttgtctctcccccattatatctaaacacggagtcctgaaccttctatctcttaaacttcgtcaccactattgctatttcaccctcctcatctgctgcctggattattgcaaatcacttcgcaactctagtccccctctccccaccccatcctccattgtagttcattctccctgccgtggactttctaataacccagttctcatttgtgccttttctgtgtatcgtcctttggtactcctcattcccttgtggaaactgtccaaattcgttagtacggcatccaagaggcccctcatgatcggattggtacctgctgccccagtttcatctatcatgctctcatcatcatttatgatgaattccttggaggagtctcccaagttttaacctgcctcagtgctcctgcacgtgttggttgctgtgcctggaatgctttctcctccttacctctctgccaagctaattcatattcatctctcaagactcagctcggggttaacttgctccagaagctgcacctggccccagatgagttggttgcctcgtgcttgcctgtcaaacttacaacattttgctttagccattgttcatcttgttggttttcctgttaaactgtgagctccttgagggcagggacttgtctctgtaaccctggcacatacagtggtcttcaataaacgttttttttcagtgcatgaagggaaagaattagatgctgtatgaagggaaaaaactggcctcagatcctagaaggaaacttgagcctttccctgctggaatgccttttcctgacaagctgtagccctaaagtccctcaaggcacaactctgatgttgaactgcaaatggatcatgggataaactggttttactttaatacataatagtatttcttcctcagttttcccctttcctactctcagattcctttgttgtaggtggcccaaagaggacccaccccactgttccagggattccagggggaacccgggctggggcaggaaaaataggccgaatgattgctgaggaaatcatggaaatccacaggcaagtaacaccttctagttcctctgttaaaccagtggttctcaacccagggaaattttttcccccaggcaatattttgcaatgtcaggagacatttttggtcttcacaactgggtgggaggttgctacttaaacatcctgtggatagagaccagggatgctgcttgttaaacatcctacagtaaacaggacagttccctcctccccacccaacaaagaattatccaatccaaaatgttagtagtgcctagattaagaaatcctgccttaaataaagaagctaaaccaaaatagcccagcgctaaagagaattcttgagaagacttaactttcttatggctcaaggagcttctcagtgcggatagatgtacctttactttacaggaatgcaggagtagagctgtgaactatcagagtgatctggaccttaacaaaacattcactttttttcaatcaaagagctgcccaggattagtactagaaaccaagcagatcagctagttattactagctgtcttgggagagacttcctttccatatgaaagagaaggagcttagaagcagtccacctgggtctgagtcctgggcctgtctctctacctggctatgctgagacttacttaacctcttgctctctgttgatttaaaccataaaaagaaagcactatttcccaagaattgtgttaggattgtgagggcactcaggaaagttccaggaacacagcctgacatatagtgagtgcttaaaaattaattaaatctgtctttaagagcagtcgagagggaagcagttatcataagtctgtccaaatttggggaatagagaaggtggtaaccagattcttcagaacgaaacttaatgtaacataagaaaaggaagaaaacactgctgccgctggattctctcaggagaattagaggctggcctgttttccaattggccataaaggggctgttatccccctataggtaacacagctcttttccaaccccacaggattagtgggtgtgacttctgcatcaggaaggagacatgagggtagtgtgcagtgtaatcaggttcaaaccctatactttgcatttgcataccctgtattttgcttgagaccatccaagaacagtatcaaacagtccttgacctcaagaattttaaaatcttttataagtctattttctttatgataacaggaaaaagggagggtgcatgggccaaagcaagcaaaagaggaaagatttgaacttggccttagccagggtttgcaataagagtggatgttccctctagaaaagccagggctattcttgagtgggcatgtgagtggcaaattcagggtcaagaaacaagctacctaactgggcaggctttgtgtaggaaggagacacagagctatgataggcgattaagaaacacaagaaatgatactgtgcagtttggaagaaacctgtaagaccccatttgttgtaggatgctgaacaagcatccaaagtcttgtgttacgctttgtggaagttgcattggaatagggagagatgaaggtgggcatgtttgacaactcaggaatgaggccttatcctacagagatgacactgccaaaagagaaatcaatcatctaaggtctagcgtttgaagatgaaatcaggaatgatgaaacagcaattccaagatgagaaacctgggaaaatagtggtttcatagacataagtagagaaaggtgggggacactcagcaatttttccgtaagcaattagcagccgtttgtgcatgctgagaatacatgatatgtagttgtaaactgccgttaagaagcttctaatccagaaagaaaacttgttcactcataaatctagagaactaggcagtacaagaaccaaaagacttctgggtggtggaggagtggtctctgggtcacccaaaagctacattcatccatgtaggagctgagagtcctgtggttacacaactgccatcacactctccctaaactgtagctgcaatgccaagtgatggattctttcctgaggtccttcagcctgacaagtatttaggtggatttacagttctaagtcttcccttctataaatcttctgagagatatgctagataagaaaggcctggacccatttttcatcaaccactgccttcgaaggctgcttttcctgtcactactactaggctaccttttagaccctggtgccgtccatgtcctaagagtattcactagctaaacagtgtttgtggagaaggggacaaattgttttctgtggatcaaagatggaggttgatcttagaagttctcctccaattcacctggattctgtgaggaaataaaactggccacttacttgaaattcaccaactgaatgcaaactccaatccaagggctttgtcagtgagatgcttgactctagggactgcattctagatcaggtgcctgtagaacaaatccagcttgtcatctgtttttgtaaataaagttttattggaacacagccacaccgattcgtatctgtggctgctttcaagctgcagaggcagagttgagcatttgtgacaagacaccatatggcctagagagcctactatctggccccttacagaaaaagcttgccaaaccctaatctagatcttcatcccctttctcacctttaccccttaacaaagcacatacactccactgaaaaaagaaaaggcagtgtaattctcttttctgacaggataagagggtcatcgccttctagctgtggctccagcccattgaacatcacgagtacgcctccccctgatgcctcttctccaggaggcaagaaggtaagactgatgattcttagcctaagctagagaacctcttgcccaagatctgaaatgttgggggtgggagtatggaattgcaactgcgattgctgaaacaatttggactacttcctccttgaagtaaatgcatctgtgtgaggctggatacaaagcatactggtagggctagggaggcttgctgacatcctcagaggctttcttccatgtgagtggaagaagggagaaagaataaggaatggggaactgtcagttcatttaattgagggagcaattcaagagttcccatgagggaaagattattgagtacctcacatagaaaagtttctcattttctgccaggaattttcaagggagaaaatattagtgtctagggcaggcaatggaaacagcaatgccaccagcagtgctttggaaatcaagccatgctttatagctgcagaatacttggggatctgctgcctgggggttccattggtgtgacagcattggatccaagcagtggatcaatcaccagccctcatgaagagcttgctataagactacactataaataggtttaggaaccagtcatttgttttcatctttgctggagaacttataagcctaggcccatcttaatcgtaaattataaatctgtttatattgcctgatgccagtagagcttaggacagtttaaaggccatcattttggacacaatggcttcctttccccatctcctaaaacagagagagagaatatcaggaatttccataggcaggactcctagggcacaaaccatcaaaagcagggcaaggattttcaaaactgagctcctcggaggtttgttcaggttaccaagagctgtggtgttaccaggtgggatgggcgtggggatagttgctaaggagagagggtaagagtagaaatcctgcttctacaagggcagcaatacttcttttttatacaggaatcttctgcaaacatttctatttgaaaaagcgttttgctccccccaaaaaaggttgaaagttaacaaattaatgggtaagactacaaagtaagacctgggttcgaagcttggccttgccatgtgctagttatgtgaacttgtacaactttcaagccctagttttctttataatggagctaataatggttagggtagccagcatctttgcacgaggtcctactgtgagataatatatgtgaaagtgcttggcccaaaataccactgacagatgaagtctgagcttggtgtcccgtgacccccgcccccctgcccacaacacacacactgcttgccagctgtcttcttagctgttcttctgttatacctccaggtccttcctgcatattggatccaccatcttcttagggtggtcttccagtctctgcttcttaagttaacttttaggcacttgacttgactcctggtattaccaaggattctacttcttggttttgaaaggttatcagtccagtataggcttaaatattactcaaagaactttcatatacattgtctcatctcaccttcacaacattatagtgacaagatccaggctcctcagcgttcgttttataagtatggcccccaggctacaatcctgggctcatggcttccaattcttttcacatcaacaactaccagaaatcaaaagctgtgctctgcatcataaagccccagctatttttgaggcacttatgaaaattctcccttttctttgagaagaatggattataaaatggatctgtgagaagaaatttggatgtgttctcacgagatgagtcctgggcagcaggacttataagaaaagcagcttaaacaagacagttaaaactgacagcagtattaaatggtgcaccatacccagccctttccagtcactttcaaatttggaaggtccaaaaatgaaccatttagcctgcagttgtttgtcaggatcaagctaaaaaggaagcctaagtgagcctccataggtcgcaagagagtacagacatccagaagcactaaggaaaattcagataaagcagcagttctacaaatgtcatctgcagtctttttccagaaagagagggggcacaagatccttttaagggtctgcaaggttaaagctattttcttaataacattaaaacgttaattttttccctgtattgataatgtgcactattcatactaaaagcacggttgggtaaaattgctggcattttacaaaaatcagacaagtggcaccaaactatactagtagtcattgtattcttcaccaccacacactcacagtaaaaaaatagtttaaagccagtttcatttaagattgtccatcatggctaggtgcagtggctcacccctgtaatctcagcactctgggaagctgaggcaggcaaactgcttgagtccagcagttccaggcaagtctgggcaacatagagaaatcccatctctactaaaaaatacaaaaaaaattatccaggtgtggtggtgtacctgtaatcccagctactccggggactgaggtgggagaatcacctgagcccaggaggttgaggctgcagtgagctgagattgtgccactgtactccagcctgggcaaccagagtgagaccctatcaaggagggaaggaggaaaggaaggaagggagtgagggagggagggaaaatgtccatcattacttttataaaattctcaagcacacatctttttaatgctctgtgacaaaatgagaagtacacagaacttgtgctgcataccaaagtatgatgtttgtctcaaaaactacttgtgtgattaagttgtgagttgaactagctactattttcattggacaccatttttattgtatatggtcattcggttttgggtatttagaatactttttttttggaaatgaatgaagtgaacctgtcactttaaggaaaatgactgacatttgttgccaatgataaaatctgagctttcaagcaaaaattggaatttttagaaaacttgtctctgctactttgaccttgagatcttcctaaaacttaaaaaatgttgttgatgagatagggagtattaataatagtgatattttgatgctctataatgaaatgtgtcaatatatagaagatctgcataactcagtgaaccaatattttgtaactaaacaatgcaaggtatttcaaaatcatgtaagggtaaaagatccatcctaagtgccaagatataaagagtacaaaacattcattgatatggtttcagattccacattgcaactcacctttaagaaacttctacgtgtcaagttttgaagtggtatcaaaaaagaatacaattatttgaaaagtctattaaaatatgcctcccttttccaactacttatctgtgggaggttggatttccttcatatacttgaatcacaagacgtatctaaatagactgaatggaaaaacatatatgagaatccagttgaaaattattaagccagacattagatttgcaaaaatgtaagataatactctgcctggtaattttttgttactgttttagaaaatagttatttttcattaaaatactattcattatttatgttaacatgtagcgggtttattacatttaagaaatctattagttttaatttcaaatacagtaaatattgataaatacagcctacataagcaaaagttctttggagtcctcaatgatttttttaagagtgtaaaagggtccctagaccaaaacgttgctgtggaaataaagtaagttataatgccacctgctggcaaagcctgaaatcattgctgctcctgaaagcagcagctaccaaactgtttcctcacgtatatccagataggtctcaaagaatgctcttctttgagactcagccaggggaaggcagctggggtgagtgggggagattttgagacagagttctcttactgagtagtagtaataatcctccccagtagcctgtcttaacttaaaccacaggttactgaagttggcacctgtagtataagagatttacttctgttttcttcatttgactccttgagctgtgtctcttcacagcttgttaactccactttttcttcttcagaaatatctgtcactataagatgttttattcccttataggggaaacgtctagctgggctcattgaagtttaggcattggtcctaaagaaatatgtgggcatcatgattccaggcagttgaatgctcttgggattttattcagcctttaagttgcctctgtgggctcactaaaatggagagaaaagaatagttcgggggagaggttttttcttactctgaccatgtctgtctaacagttccttgtttgaaatcatccaatagaaaactgaagccatttgaagcttctccccaccccaccccatgcttcattttccttttggcattgctcataatactgattcaaacttcacacttccctccttttgtttgtagattttaaatggagggactccagacattccttccagtggcctactatcaggccaggctcaggagaacccaggttatccatattctgatagttcttctattcttggtaagtggcatcattattcgtttccattgcaatgagcttgcaaaacatcttacataaagtcaattttaagaactgaactgtgtgaaacaagctaatcctagataaatttgataggaacagaataaaagtttaaaatttgtttaaatctctaaaaagttgaccagtatttgagttttggtggaggtccaagtttgtgcctggaactcaagaggaggctacagctacctagacataggctttctcccatgtggggcataatctcttcagagagagaaggctaatgaaggttcagagataatgcctagaagggtgattagtaagcatatcagaaggtattaaaagtcattaagtgaaaagagtttgcttttcccatcacatccatctttttctcccctgggctttctagatctgtttttttcctaaactctcccttcctatttgcctttctttttgtaactcctcttaactggttacatcagattattaaaataagcttgactcaaatatttttaacatttactaaattttaagcgctttgtacttatttctaaaatgatcatttgattccttagagctgtctcttcacaacgtaaccccacttatttcttacgtatttttaaaaaattggttctttcctctaaaaaacagcgatataaaaaaagatagccatgcagcccaaaaagcagcatctcaccctaccattaaatgtaactttcttattaaaaatgtgcttaggaattgcttacttaatctgaagatgctttaaaaaagaaatcactgaccagtctttatctcctcccacaggtgagaacccccacataggtatagacatgattgacaacgaccaaggatcaagtagtcccagtaatgatgaggcagcaatggctgtcatcatgagcctcttggaagcagatgctggactgggtggccctgttgactttagtgacttgccatggccgctgtaa

SEQ ID NO: 15455 - DNA, 109385 bp, Homo sapiens
gggatccgagtgcgggcgcgggcgcgggcgctcccggcgagccacggtgagtgtcaggccggcggcggccagcgacgcgatcccgcgcaccccgtcgggggccgttagcaccctcgcgggcgctgcgcccctgccgccgccccgggggcaacccggccgccgaagaaccctgcccgacgtgcccgctgccggccttaaagggcccgtgaccgctccctgcccccacccgggccgtggggaggctgcgccccttaaaggcgccgcgcccgtccgcccccatcctcctcgcgggggctgccgctgcgggctagggcaggcagaggtgctgcaggagcccttaaaggggccgggaaagtgttcgctggagtacccaccgcccttccgcgggcatcgctacctggcggggggagggggcagctagctgcctcttaaagggatagctctgcccttgggggcagtgactcggccgaagaggactcctagatgtgtccccgggagcttcggggatccccgaggggaccatgcctggtggctgcccctcaagggcgttgggcgaacggtgccgcgtctgcccttcctccccgcttcacttccctttcgggagcccgcgaggctgggtgggggcggggagggcgtctccgtcgggcttggggagtccaagtccgcccgccccttcggccctgtagccagggctggcgctgcacccgggaatccccggccggcacggggccgaccccagcctgcgaactttcgtggggcctgtgccgtccaggtcctgggcggccctcaaggatgccccgtgggtctgcgggcaggtgcgcgtcggcctggggatgtcgcccggagcccgggtgcgggccggccttggagtcccagagctccgcggagggcgcagcgagcctggctccagctccgggtttgacagatgtcagggaagaaaaggttcccgctcggctattgccgggcgttgacatcccagagagcttcccgtttgcttggaagaagacgaggaaggtagaggtgaacgtcgaccttgtggggcgcatgttagcctccccgaggggtcgcgagagccggcagcggggtgagctcaggtgcccgccggcaggagctggggagggaaggggagtgctggacaccggcgcctgctgtcaagttctcgccggccggtgagagacccgctgccgccgcgcaccccgcacctcctgacccctctcccctctccgcctcggccccttcccggtcacctagcgttgttttggcgctttggcgcttgcggtctcttccttcttccaccgctactcctcagcgaggaattattagccaagttttctcacccagcttccaaaaatcagattccgtatttgtgaacaagcttttcttgacactacccgtatacccgtatttccagcatcgtcgttttattaaacatccataaaagctgccccttagatgcattcatttcccacgacacctgcttgcttgtcatttgtccttctgacatctgctgttgttcacccctttaatctattattaaatgacaactattattttaattcttctggtctcattgatatccggatctgtgaatttgggttggtggagtttttaattaatgtacccgttgaatcatgagcttaaaataatcattgctgctcctgagcagttttgaataatatcatgctctctctgcttgcaagacttaaaaaaattcgctggtgttatatttgatttccatatcaatggaattcccaaatatttttgaaaatacaaaattcagtctttcagtccatgttttgttactcagatcattttactgataagtctttaacgcagcttatagaacatatttagaaggtttggaaatttcctggacaggatttgaaattgcctgtatcatctgaagctggttctgtagaagcattttggttttgattgtagatgcagccagtgaatgataacaataagttaaaactgtagttaaatttgttctttattcaaccctctgaagaacgaacagatctggtagaaaagcactaacctgggagttaggagctggacatcctggttctagtttaggcttgggctctcatggccgttccagtcggggcaagttattaaagatttctaggttgtgtttgcctctgatggaaagtaagacggttgaactaggtgatctcaaaggttcctctcttttgaagttctgtaagtctctaaatatttaatacatttgaattcaggttggtatttacctcctggcacctccagaatatctgagctgaagccctattttcataagaaagttaagcagatcaacagatggtgttttgaagaatccatttcaaatgatttataaaatgatgactacttacgagtttgtctgctatttgcagaagaggtttgcatgccacagggcaggaaaaggaagtggccatgttttcagatttatcccttcacaccaacaatctctgtggaatttatatgctaaaagatggagaagcaccatagaaagatttggctgtattaacaaaactgcatatgaaaaggtaaaaactagatagttaatatctctctttggtgtaagggttataatgtatctgagctttctttgtgatttcatcatcaactctcactgtggtaggaaaatcaatattaaataaacagtttcagccccgtgattacatgcagtgattttaggaagcatcatgataactaaagtaggtacttgcagggaagtaaaatatcctttctagaccttgaggtttcgttgggagctagggacacaggcatgttatccttctccacagtcttttttcattgtcaccttatcacaagactcagatttatcccaaatacccaccttgtcttttcttctccctctcatgaaataagacctgctctgactcaaccccctcagcatctcttacttcccacccaaaatgtcctgtctctatccccatcgtcccctcatctcctcccaattcagagaaagcaagtggacctctcctctgttccttttcttggcctctcaccatgggcaagtgcctgggctctggtggcagaagaatccatggctcaggtttgggctttgtggtcttggatgtgtgcttgactcctctgacctcaggtttctcctcttggtgtaatggcagtgcctgcctcgtggagtctgtgtgaggattaagggagatggtgcatgtaaaaggcctggcacacaggaagcctttcctttgtgccagctgccattccttctcacctctacccgggtcctatcactagaatattatttgtgctgtttgtccttagtctcccctgccccaccctgaaaaccttaggcttgacttaggagaggaaggatggaagaggcagagtcagacttgtggtgagcctgctgtgtaccaggcaatttacatgtgtctttacttggtaccctgggttcgtaagcctctctttcctccctcctgccagcctcccccactctcccatctcctgctccattcttagtacctgccctctggcttctctcgctaccacctttctttatatttcttctcaaagttttctccaaaactttgtcgtgagttcctggggcccatctgcccatccttattcctgagtggttgttcttggcccctttgcagtatttcttttatttttttaaacatggtctcagtcttgcctggttggagtgcagtggtgcaatcgtggctcactgcagcctcccaagtctcaggtaatcctcctgcctcagcctccagagtagctgagcctacagacacgtgccatcacacctggctcatttttgtatttttattagagatggagttttgccatgttgcccaggctggtctcaaactcctgggctcaagtgacccacctgcactggcctcccaaagtgctgggattacaggcgtgagtcactgtgctcagcccctttgaagcttttacctcacttgttttttgtcctttgaaatcctttcctctctcagcctttgggtcatgctggtttcttgattctcttcctgcacccctgtaaagataaatgtctgtcctagcttctgctattcacactgtccgtggcctggggtcccctctctagccctgacctgtctctcctgtgttctgctagcaggtccgttgtggacatgaatggcagcctgtaatctgcatttgtggtctcggagttacaggtttgcagactgcttgcaagcactgtcacattgagtcctcatgacacactggagcctacatcccttcattccccaggctgtcctaaaaggcagtttggttgggtagtttagcatacagactctggagccagatttcacatcctaagtattccctactggcttcgtgacttgtggtcaattttcttttgctctctatgccttggtgtcctcatctataaaactgggatcatagtagcccctacatcagagagttgaggtgtggattaaatgagttaaagcattggaaaaagtgtgccagtctattcatggcacattgcaaacactcagtgaatgttgctgtcagtcttgctgctcttcgttgccttgccggggtgccttggcctggtttgtagtggtctccacattcagcctgcctgtctgccagaccttgccatgtgcctggacactgtagtcaagctgaggggctgtccattccctgtaccagcccttggcccagtccatccctcaattttcacgtgtccaaatcctcctctgcttttaggacccagggccttggtcctgcagcactatttcttcattttgttttccttcctccccacacctggcagcaatgtccacattgatttttctccaattctcttaggttctgctgcattccatattgtgttgggctgtctctgaaaatatctcacctgctcgctcagcctgagcattctgggagaagtttatcttgctttttccaaaatgacaggcacagggagcctttaggccatggttgtccaatgcacattgatcttgtggaggaggagatgggatggggtgggcactcagggacggagcaggtggagggaacaggatgcacactgcatagaggtgggggtgcaacagggccataagtggacatggccgtaagtacttaggtctgcatggaaggagggtttgaattggggacttaacctcagggggagataagattggataaggtttagtcatctttgctgcaggggaacgttgagtactggcatgtaatggagagtggtttttaccttagtatgtgctgtccttttaaatagtgtaaactaattctttatctagcctggttaaagaaggggatggctggtctgcctaatttaatatttggctattgctctacccactgggttttgtgcatatactgaatgaagcattggcttgtatttattccttcaatcactgtttgaaatgtctgacctgggcaagttaattagcttctctgagtgcaaaataggaataataattattacgataatagcagctaacatttattgaacactttctatgtgccagcacatatgtgagtcacctttgcttattaactcatttaaaccccataacaactacatgaggcaggtactattatccttacttcacaaatgaggtggttttataaactgcccaaggtcactcagctgttatggcttggggcagaatttgtgctggtgaactccagagtctgccctgtaacaccctagtagattcctactgggaggaaacaccccgttatatcccttacctcactcagccgcaccatgccaggagcctagtaggctgacagcaattgggaaccagtcttattgttgacaaacatggtatgagcctcttttagagcggagctgcctgaaaccctccgcataagggatgcggacctggatgctacctgagcagcagctccaggggcttgtgaacattctcctcacatcctgttatgcatggctgtctctctggcctccccctgctttctctgcagcattgctctgacccaggccccctgtggctcagccagctcctccccaggcagctccttgtgtgagatgaaccttttaacataactcactaaccccacctcccaccctcatctagccatctgcagagctcctcactggggaggggaccttttcaaaggtccctcaccttcgtccttttctccctgaagaccaacgtccacaactttggtatatccacagtgttggggtgtgtgtgtgtgtgtgtgtgtgtgtgtgtgtgtatatatatgtgtgtgtgtatatatatatatatgtgtatatatatatatgtgtgtatatatatatatgtgtatatatatatatgtgtgtatatatatatgtgtatatatatatatatgtgtgtgtatatatatatatatatatatatatatatatatttttttttttaatgccagttgttccccaaatacatttagatagtaagggacacattgttttatgtcaagaacctgttacataaaaatgtgttatataatgttcaaatatatactgcacagtgaaattagataccactttttttttttcaaagaataaaaggataataaacacaggccgtcctgaatataattaacctcagatttgggaggcatggaaggacgtgccctgccctcagagctctcgtcctgagctctgcctttcttgagtgcgccgggagcaggatggatgggaagttggcctgaatctgccatggtgtggtactgtgagatgctctggaaattgtcttttttttttggcggggggtgggggatgccttcgcatcttgctcacttgtatctttctcacacctaagcagagggaagaagctctttttgccccctcgtacttagaccacccaggtcatcttttgaccagttttctgctctgctcaactcctttcaatcttcccagatgacaggccagctttgcctgctaagaacagccctggtgccagtggcatgcaggtggcacccctgtgtccagtcttccaggctctccagggtctggtcctgttcctcctccccagccctgcttccccgctcaacctccattcccagccacagccctgtgcccgaggttcagtcctccttgcctctccgctgtcctccctaggccacctcacttcacactctccctctggctagcggggtctttgcttaaattgttcccttgaggcctctcttccttgcccgtgcctgccttggatctcacttctctgtgaggtacctctgataacatttgttccctttgtgtgtgctctcccttttgctcttgattgccaaccattcattcgttcagaagcaggggtatgtcataatgagcaaattaccatatcatactgaatcaggatggccagttgtctcattttttaattgtttcatggttaattatcttacgctcacttcccactctccagtttcactcagttactccgtcagtgaagtttattggatgcctagcactgttgtgggcactgaggatacagcagtgaacaaaacaaggggcccgcaggaggggacagatgatgaatagtgaaacacgttcatgccttgttgtgagaagtgctaggagtgctaggatagcaagcaaatagagtaaagcagtagcgatgaggtatggtgggagggagggtaccttatctagatcacaggggagacctctctgaggaggtgacatttgaacttagcttcagaaagatctgggggaaagtatcccaggaagagagaacagcacatgtaaaggccctggggttgaaaggtgcttgatatttttgaggaaagtaaaggctagtgtgactcgattatgagctgcttgtgtacagatgttttctgcctcttttatactccctttaaccctgagcccagtgttaggaaggccttgtaaatacttacatacagaattatagcatttgtcattggttatatattataaaatagtaattttataaaataataatttatcataccctgcttagaaggcttttaataaaacattatattgcatataaacaaattaagggtttgaagggttttcttataaatgcactcctagcatgtttcaccaaatattactgttttaattgtgtttagtgcagaactttagacctcataattctgcttcatgtgcacaaccatcttaaaaacaggttttgttccaaaagtttatttgtaaggcactaggtggaaacttgggataaatttttctataagaaacaatgaagtaaatagtgatgtagtttctaggcgagccctcaaaagctatttagtggtgactgtagctgaaaacatactggttggtatcagcagtcgtcaagccttctgctggtagaccctcctctcagtagcattgtacctcatttgctgttagcaatcataggacccatttacctcagtcacttctcctactgtattttcagtctgttaaagttttatagaagggattttttacctttatacctttaagatttggttgcatgtgttataaatgagacagtagtgcagagagtggggaaaactctggactgggagctgggagaggcctgggctccagactgggcccagccactgactggctgagtaaatttgagtaagttatcctctttgaactttgatttctcaggttcttcttggctgtaaaatcctattgttttctcaccatagcagggaaacgtagatatacttcgttgttcaaacctgccctcaaatggctgcctctgatttcttcttgaagaagtatatggcactcagcaatgaggaactcaagcagttccccatgtgcagagctctgcagtgacattctcagtaggaaccttgattttgatctgctatctttcttgatgagttgaaagaaattttgtcccagaacttttggtccagataagatttctgtgttcttggccaacttatcttccatataattatgtaaattgttttttctttttaactcttagggataaaaatggtgactctggcttgcctgcttataaaatatagttataagtgcccttagggaatggaatgagtttgcaggagagagcagagctgaaagagtgtgggatcaaaaacaactttaaatgttaaatgcaaagctattttcagtaccctgctggaagaaaaaatttttttcaaggttttagaggatagaagaggtttttgctccaaagaagaaaggaacctaaggttttgcagtggtgaaaagtacctgatcctttaaccaactaccaccctcccttcccacctctgagttttgttttcgacatcatgaaccacatttgccatttgagaggtttgatatttaagtgacgttagtggcagagctcaactggcagtgttcaaatgacttaggtgcagagtgctgtgctgcaaacttccccagtgcattctagggtaagggatgcctcatagagagtgacagagcacttttagctctgcctctatttggtcagttgtgaatggtgtgttcctttttttccttacttgaaggcatagcgaggagttggtacaagaagttattgcttcatggacttcactttggagctagagggtggcattagacctagcctgccttcttggatgctggaataccagtggcaatgtcatctcttgttctctgctatacccctagcaatgaaaacagtgtctgtacagaaaagtctctcaataaatacttgtttattccttcaaaaagtgaattcagctttggataaatttttaatttcctccactctctagcagtataggcttatgaggttggtcttgcaaggtactttggagtttaggttgccatttctttttgacatctgtgtttttcttattcttcaggttggtcaggtatcagtgtcttttactgatgatggttgtccctgccctgctgatgttcatcttctgttatctttaattggctccaaactgcagcaaatctatagctgagccacattaactaaaagaaaacttgttgcatatttatttaggcatagtactacacatgtatttattcagtcaacaaatatctgtgagtctatatgccaagaatgttactagacccaaaggaagagcagaaattgttgttgtgaccaaggagcctgcagtttgattgccttgtggaacatctttatgagcattgtagaagggaggaggcttcatagaactggtcaggttttcacctttaaggatggtaggatttcgattcacagacaaggtgaggacaggtatttccaggaagtggctgagcggaaacagcataattaaaaacacagaagtaggaatggaccagtttgcattcatggacacagacttgtctaaaatggaaggttcttaaataatggtgggaatttaagtatggaagatcactgaaggcccaaacctgaagccattttagacacctagtgacttgcctaaagtgacagctgataagtggtagatccaggcttaaaataaggccatgggagctctcgaccactggcactggacttggctgtttcccagcagtctctagatgcaggatttgggtttgattggggattttcttttttctttctttctttctttctttttttttcttttttttttttttgtgatggacactgagattgggggttttagagtcatgagctggaaataggcaaggctctatttagcccactctttcattttgcagttggggaaactcagtgaggttaagtggcaagtcggagtttacctagtgagtcagagactgctaggcaatggataaccactggatttgttttattatgattatgattttagtgacatgaaatatttctctctaaagcatcagtccagtgttagtgttccagttggattggagcaatgaaggactaaatgcagcagagacctgacaggaggctgctagatgaatccaggaaggagagagagaagccagaactgagaattaattgtcaattatgttaatcagcatggtgttatcagtcaccctttagatttctagagtgcggtgaacatctgcctgtgtgagtggctttcaagtgtgtgaatctgcactgtactgtgaccaagataccttaatgaattctccagacagaaagtgccactatggaagtcgaatgttttaaaacaaatgcccacattttctggaaagagcaccagattaggagtcagatgacctgcattttaggctgcttctgctgcttagtcaccatatagccaaagcaaatcacttaatgtctcaaactgagcctgactccttatctgtggaacaggtataacaattcctgttgagcccttttcagtgtatgtgtgatgcttgtgtgagctaaggaaagaataggcattttgaagctgtaaagttgctttctggctgcagggagcagcagtgcagttttaatagtgaagatgtactggcccttacaggaatagcctaggagaaccagaagaaagttcccctacctccagggcatgtttagggaatctggcgctgtccaccaggtgggtgctgatgtgtactactttattggatagggccatgttttttgtttatttgtttgtttttattatactttaagttctagggtacatgtgcacaacacacaggtttgttacataggtatacatgtgccatgttggtttgctgcacccattaactcatcatttacattaggtatatctcctaatgctatccctctcccagccccccagcccctgacaggccccggagtgtgatgttccccgccccgtgtccaagtgttctcattgttcagttcccacctataagtgagaacatgcggtgtttggttttctgtccttgtgatagtttgctcagaatgatggtttctagcttcatccatgtccctgcaaagaacatgaactcatccttttttatggctgcatagtattccatggtacatgtgtgccacattttcttaatccagtctgtcattgatggacatttgggttggttccaagtctttgctattgtgaatagtgccacaataaacatacatatgcatgtgtctttatagtagcatgatttataatcctttgggtatatacccagtaatgggatcactgggtcaaatgatatttctagttctagatccttgaggaatctccacactgtattccacaatgattgaactagtttacactcccaccaacagtgtaaaagcattcctatttctccacatcctctccagcatctgttgtttcctgactttttaatgatcaccattctaactggtgtgagatggtatctcattttggttttgatttgcatttctctgatgaccagtgatgatgagcatttttttcatgtgtctgttggctgcataaatgtcttcttttgagaaatgtctgttcatatcctttgggatagggccatgttttaaagatgattacatttcacccccgtaagcctgggcatggacggaaaagttaggcatggatagccatgtgaatctattatctgtagacacctttcaggatagtgacaggcagctgtgaaccagaaaaacaagtgtcagaatctagccagctggccagtctggcattcttggatgtttcatctgtcctggggcattaggcagcgatccagaggaaccttgattagcctgggggattcatggctgagccagcatgctgtccaggtaatacctggctgcaaagcctgactggagatctgccaaatctaaatttctgccagcattacaagtgtatatattattattattattattattattattattattaatagcagtatctaaccttgactacctaccatatgccagcaactgtgctaagtgcttacatactttttctcattcagtcttcacagtattcatataaggtgggtaatgtcagttctgttttctagttagagagactgaaactcagacgagcttcagctgatacatactaagtgtaaaagccatgattcaaactcagaacagtctcagtccagtgcccagctgcataactgctatgttcttctttctctcttttcctggtacctgaaaatacttcttgtctctggttttgaggtttctgactgtgttattggttgatggatgggttgccacacagaggctcagctcagcacagctcttttttcttcatagcttatgacggacatcctcctggatactctggctggtgagcaaatgggtgccagtggtgaatgcagcagaaagactaactcttgccagctagtgcatgtgggtgaattttaaagacaacaaaagaaatttctgtaggtcagtttttcaaagagtaactggtagcttgtagtctacttaaaggccaagtttgatgttcatcaaagtcaccctgtaaaaacctttccaaatgctgtgattctgataacaataccatagaacattcctgtgtaattgacaagtagtttttacatacaatgtcttgtttagtcatcatcacaaccctatgagggtttgcaactacatatagttgcaaagaagactgggagatatctttagttgggaagccatgagtctagcaaaatctctgtttttaagggtggcgaggggagtgaatgaggggagctagcaatctgatgtgttgtggtggtgatggaagggataagtagagtttgaagctgttgtcagtagagttgggaggatgcctcctagtctatgacatctcctagtgttatgacatctcctcttgtggactgggaaattgcttagagtttaagcaactgtccagggttctacaactggtcagcggcagaggcagcacttaagtattgcttttgtgacttaattcactctctattcaagtttcatctttgctttctctattgaagttcttaaatattctgattcactgtatttagaagtcggcaggaattattaaagtgaacttctttgtggtatacactgttactgaatcagagtaaataaaaggtcacatgattggttgttgtgttaggtttaattgacgtgtactctgtatgatacagaatactcacatatcttttgtgggatatcattggtccaacagctttaaaaatcccaaggctttaatagatgataaaacacggagtttgtgtaatttcttgaaaaagttggccatcgagttcttggtcaggaacacaagcttcaattgtaacagtttccatggagacattagccttggcttgcatcatttcagctttcagtgcctttcctaggaatggagtgaactgctaaaagaagagctctggttgtggttgtcacttagagctctctcccctactgtttctgctggaggctgatttgcttttctgggtcttctcagttttttctgtgacctaagcataaattgtctttgagatcctggtaatctcatattttaaaagttttccacaaaagacaactgaatggaacacttttttttttcacccctttaaagtatttaattggccatcaacggtggctcacgcctgtaatcccagcactttgggaggtcgaggcaggcagatcacgaggtcaggagatcgagaccatcctgctagcacggtgaaaccccgtctctactaaaaatacaaaaaaaaaattacctgggcgtagtggcgggcgcctgtaatcccagctcctcgggaggctgaggcaggagaatggcgtgaacctggggggcggagcttgcagtgagccgagatcgcgccactgcactccagcctgggcgacagagcgagactccatctcaaaaaaaaaaaaataaaataaaatgaaaaataaagtatttaattggtggcaaggggctttgctagaagaatggacacctggtctcactcaagcttcttgtattagttgggataccaggtgagtccctctgttaaagagacccacaggcacaatggctgaaaccaggtagaagttttctctctcatgtactagtccctagtagatagtggtccaggcctagtatttttaacacatggcttccatttgatggttgaaggtaaaaacttaccatctcccagaggaaacacccaagggggcacacatccagtcatttttaagggaaagacccggaagcagcacattctctttttccagtagccggaatttgcaactacatatagttgcaaagaagactgggagatatctttagttgggaagcaatgagtctagcaaaatctctgtttttaagggtggcaaggggactgaatgaggaaagctagcggtctgctgtgttgtggtggcgatggaagggataagtagagtttgaagctgttgtcagtagagttgggaagatgcctgagtcaagggtgagaatctaagcaggcacacagaaaccagggcatgtgcagccatctagaggtcagggaagctcttggctctgaaactaagcagtggggggcacccaggcatggaagggaatgtgaattactcagaagacattaggttgtcagtaaaaggaaattcaccagtgtgactgaatcagtagaaagagcacttagactaggagtcagaagacctaggtttgagtccagcccttttacttcataacctggggcaaaaaactcccataaatatttgctttattatttagataatggcaataacagtgatggcctttcctgcctcccaggcttagtgtgagaccaaagggtgaggaagtactgtgtagactgcagccccatggagatgtgcacagtgtctgcccagcccagggcctgccatgggtgtatttgttgaatgaagtgtgaactattaaaagagttgggaaaaatgcattatactaaggagatcttaatcctggacagtcttctctaccaggcagaaaggttctgctctccactggtcaaggccttgggcctatgtgtaaaactgggtacctaacaaacacatgggcagacgcctgcagctccttactgggtagcacatgacacatagtatgtccttggcaaggccatttgctcattcctctgtgtaggtaaccaagtgcaacagaagtggaggtatagcccatgaatgtgaactaatcatttttaaatgatttggtccatgggcaggttagaagatgaaaccttcccaaggccaccaaaacttgatttcttgcttgaaaatgataagatgcagttataaaatgcttctgttgatttggaaaaaatgtgtgacttgttcaaaacaatatgtattaatagaaaatgtaacataaataagaggatacaaaaaagagcttaatgtttctatcttctgggcctagcaatagtgatttttttttccttttggtaggaaaatgggggctcagtggaataatcagttttatttctttttcttttaacttcatgaagggtttgtattgttcattttgttatttaatttgttcatttgctaaggaaagaacttctttcttggaactctgcggagtgtttttagatggactttactggaaaaaaacaggaattgaaattatattcacagtgcgctctaaactcttttaaaatctcatgcatggatggaggaaaatgcactgaaatatcaatagtggttctcacctcatggaattagaggtgacttttattctcatctccttctctgtggtttcctatttttcaacgagtgtgaattacttttatcatcatgaaagaccagttaaaaattaatctcacaaattaacactctcaagccaaaccacgaatttttgtttttcacaacctggcttggactataaactgtcacactatctcagacctatgcagattcttttctgagtgaggcattgaggaacttgttataaagatgatgctttccttctggaaatcaagaaacaagccaagggcttataatgtgttaggaaagatgtcctgagtaactttcctcctggaatctgactagcctttattacagctacttaaggaaatgagttttgtgggttccctgttcactgtgtcaccatttttttctttatcctgtactcatatgtacctcagggtccccagattttcttatcctgggattgcatgaccttgtccttggctctctcgggcccctgccgtttccagtgttctctgttcatgttcacaatattgttgatttggctgtggcttcttcccgcagtgttcttgtagactgaagagagcacattgctgcccttgtccctgtgcagcttcctcttcctctttatcattgctcaggtgagtggcctgagcagtgctcctgggatgaggtgaagagaagcagtcaagactgcagggaagggctaggggtgctgagctggccgagcttccctgggggaaggcactgggccatctgtccagcagcagttggcccacagctggcagggcaggctcaggagtggctcttgaagatggctgcttggtgtttgaagacagttcccagggcatgcattcatttgttgagcaccttcaatctggcagcctgtgttctagatgctggctgatgaccaaggctgacatggctttggctgtcatgggagtttcattctagtggtagagggagagagagagagacgatgtggtagagggagagagagagagacgattagcaggggaatcaatgaagaagataattacaggttgtaagaacagccccagaggaggttacaggtgcctgtttgtcgagaagtgggagggccagagttgggataggaacctatgtccctgattgcaaggtctggctccttctgtgtcctctgggctttctggtgggaagggaggaggtggaggagaccccttgcgagggccgagcttctcccattcagccagtctggaccagcctggggccttcagatggagatagcaaaagttgagggcataagctagggactggctctcttggtcactccagttgcccatctctgtacttccccaggtgaatagccatgttttttaaagaacacggagcaaatttgcatacaagagtccagatttatgcatgctgcagctttgtctgaaggcaagcttatattttctctcctattattttcaacttttaatgagttaccagcatctcagtgcccctccagcaaggatattgggctggtgttttcagggaacaattttaattaactcctccttgcctccctctcacccagccacccccagtccccttcctggtggctcagagtctggctttggcatgcaataagaatatttttgccttggtgttagcctttctgaaactcttgattaccagtgctcacaggacctttctgcagcactgtctgcttggctgtggactacccagaggagcttggtgtcaggcaaacttaggcgatttccctgagcatccttgttgagtctgcctttgtacttctttgtcaggtctagaggcttggccgtttgtcctgctcttttgtcccctccttctgggaaccctcaggaccctcactccatggagactcagcacccttcctcctgcaaacatcagtgatggggctttcccagccctttcccctatcttccttttcaaagaacaaagcctttgaagcttgtctcatacctgtctgatgcagtatgggaatctgtaagttctttgcctcctgaaggggtctggggaatcacttggctttcagagctttcctcgctcctctcccacccacagaccgattttaaccagagagtaagtcattcatgctgtgcttgaatactccttccagtcccactaggaagactctttgttactaaattctgttttcttgggaaaggggagcttattactatctcattttgttggttgttattaccctcctttaaaaatgtatctacatacacgcatgtgtgtacctacatgtttctatatttcccttgtgaatgtggccctcagagggcctggatttaaaccctgggagtggtagtgaccctttgggaaatgtatactttttgttccaaatcttctctggcttaaatttgtgaagttttgtttcagccttggtttcatagtttttcccagtttccaagataagtttggggctcactgtaatcagcatgtaaaggagaatatggccatcagctctgccccttaaattcatagtcagactcagtggggaagccgttcctgtcccatcttgcgctcgtggctctgtcagcctcaggcagctcctgcaccgtcctcctgcctgtgacagtgttgtcaggagttcttggtacctgggtgctgcttggcctcagggtgccagggctcccatgtggagtgtgcttgctgcagtctctacagcccaggtgtctctgcagccctcctcttacatagccacagcgtggtaaagtacatccagtttgcgctgtagtaagcaattttattaaaaaaataagtttaatatgtaagtggtcccttagttcgtttgaatggctcccctctctggctttggtttgaatgagctacacctggctggagccctgctgctcccctcagcatggagtcacctccctgtgctatggaggaaaggaagaagttattcttaccttggttttgagacaagacaagcctggagaaggctgtagggatgaaggagttgcccatttgtccagcatcagttgagagtctactgtgtgcctggcatcataggaagcctctggagtgctgtgagcaagaaaataatacttgatttatgtttttaagggttcttctcgctgcctgtgggccggcagtgaggaggacaagagcgcagcagggagatgggttaggaggcagttgctccggtgcagggagcagtgccagcttgagggctgctggtgggtattggtgtgagggtgggcaggctgcagataggccttcgcccattgcccttgccatgtgtccccatgtgtccccaggggaggctctgggcatcccaaactgtgagcctgccctttcccaagtgtgctaggccctgccaagctcctgcttcatggcctatgctgttcattccatctggaatgctctcttccccctgctttccatcctagctgagtgacattgggcaagtgaccagatctctcttgagcctcaatctcttattctgtgaaagagtgctcatggaacctactgcatgggaccatgaggataagactatagttgagtgtggtgattgcagtagcctccaaagctgtctcctgcttccaatttcatcccgctactgtgcattctttacacagcgatcctgtgaccgagggtcagatcagggcaggcctctgctcagaatcctctccacagtagcttcctgtcccagtcagaggaaaagccaaatcttagcatggccctcagagcttcctggtacttctgacctcatctcccaccccaaggccatggtgtatggttgatcatgctgggttctgcacagctcattgtggtgcatgtaagtggcactcacttcctccccaacttatgcattgcacaacttgtgcagctgtacatgctgctcctacctgcgcctctctagctccactccagccacagtggaatccgtgttgttcttcaaacacaccaggcatgcttcctgtttaagctctccctactgcctgctcccttggcctggaccattcttcccccagaggtgtgtatggctagttagctcaccttcttcaggtcttttttcaaatgtcaccctatttaaaattgttccatctgggtcactgccccccaaatgttccctttttcccttgctctttatttttcctcctagcacttatcaccatctaatatattatacgttttccttatttatttggtttatttttatttatttatttatttctcaacagaacataagcttgatgcaggcaggcaccagtgttaattttgttcactgctgtatccccagtgcctggattggtgcctggcagtaggggttcagtgatgcatgagtgaatgagtttggatgcacaaaggtaaagtattgggtacggtgcttagcacactggaagcacctaatacatggatgccagtattttcattgtctctgttaactctccaggccctggctcaaatgtggctttctctgagcctttctgcagtcccttctcaggctgaattaagtcaccaccacctgtgctctgtgttccccttcattttgccttctctgtctgctcggcatttatcacactgcagtagtgggcttatctcacactttttcctgttccaattgcaattcctgtggggcaaagactggcctgttcagatttgtatctcaggcggtctgcgcccccagctggcatgtggtaggagcttaggaagtgcttgctgctggtggctgtgggaggtggaaagagctttttaatccatcaggacccttacaagggggactggctccagcatcactgccgtctgatgtttgtgccccctcccaaggggtgtcaagggagagcttggcaaccacttaaatgagagtctccagtggtatatttagagcaaattttggagagaggagtctcttggataacagcatctgggtgacctgattgtttcacatataagagtttggctttttggctactcaggctttgagaggttggggtcattcaagggaggcagtgtaatacccatgtgttcagaggtggctgggacgagagggtgcaggagaaaaggcttgagctggcctgtaagggatctgagttggtgaagggagcacagcttctgggggtggcagaaggaataggagagctgcccctgccatacctggggaggggtggttaggtaggtgccttgggaggcatggttaggtaggtggtttggggccatggggggaaaactgtaatgccagggcaattactttggcctcttgtatttggcaggaggggtccacactggggattgtggtggcgtgagggagagggccctgggagagaagctctagagtcattttcttttccagaggtggagttgtcttggggacctgcacgtggcacgcagagcccatgctctcaggcacctttggggtggcagagtttcaactgaaccaacagaggacaaggggctgagaagtcggaggccttggctgaggtgcccagtttcttggttcactttctttacctgccaggttagcagcaagtgagcaaatccctcctgcctttgctcagcattagcctcagagacttgaggagagctgggccttcaggtgggagcctggtggccacactggagaggaccaagcttgacattgagtgtccgaggggctgaaagttgttcgctcatccagagatggattcgttctgcaaacatagggaaagttcccttcccattcctcatggctgtttgaggatggaattcctgcattgaccttggcctttccctgatcttggcctttcccctgcactatggcctctctactcttaacattacgccccagcccttttccatgggcccctcgtcttccctatggccatctaaaatggccgtataatattctatcaagggaatgttttcagtaagccatgagcttgatatggagcatttagattgcttctaatttttgctctttcagctaatgctacattaagccatctctgtgtattatggaatcatttcattagttggcatttgtctagctaatggcaatggcccaagatttaatagcgaatcagaatttcttttttcaagaagaatgtcatgaggatatataaaaaatttacttaaaatgctaggaatcatctatgttggggttttcatgaatgaggaagcagggaaacagtaacatgaaattagttgtaagtgaaagactgtgtgtataaaagtaactcgtgacttgtttgttcctgagtgtggaggggagccaataaatccttggaaggagcaatctacctgtgaaaatcaaagagatctgtattcctgcatctgatgaaaacataacaaacagtgatctcttcttaaggatatttttagaaatgccctaaaacaagaaaaagtaaataagatttccgagaaaaaacatgtctccttaattccaaatgagcctctctggaaatgccatttagtagtggaagcaggttgtagacttgctgaaaggatttggttctttggttattaggaaataactagaatgaaattgacaaacagacaacactgacttggtccccagtactgctttgagcctgaggtatgtgttggctttggaatgatggggaaggcttcctctgacttgctgatttgttgtagttgttgttgttattgttttgagatggagtctcgttctgtcaccaggctggagtgcagtggcgtgatcttggctcactgcaacttctgactacctgattcaagcgattctcctacctctgcctcccgagaggtgggattataggcacgtgccaccacacccagttaatttttgtattttcagtagaaatggggtttcaccatgttggccaggatggtctcaatctcctgacctcatgatctacctgcctcggcctcccaaagtgttgggattacaggcatgagccactgcgcctggtctgttgttgtttttattgtttcagtctctggtggcttattatgtagacttgggctgtaagctttgcatttcagtttaaaccagcaaatgtttacactatataaggttgcaagggctaaaactttagggagaaagaacccagtgcacccctgtttctgagaagctcatgaccagggagtgggaaggataaagcaatgttaaaaccaatggttattcaagggagattaagaagggggccctgggagagtcagctccatccttttagagaagggaggagttctacctcactgctgggcagggtggggctaaggggcaggagaatcaagaaaggttttatggaactagttgcatttgtcaacatcttgaaggacaggctgaaatggaggctggacattctcagcaaaggtaaaaggcctgagtagaggagatggagatggaaggacatggggcaatgtttgggatttggctgaagaattgcatgcctgtagtaatggtcatagtagcactttatggagagtatcaggtgccaggcatggttctaagagctttatatgtagtaactcacttaatccatgcaatgaaccaaatgaggtactgttattatccccattttacagatgaggaagctaagataaatagcaaggaattaattgcccaggatcacactgctgtggagccaagatcagaccaagttcatctggctccaggctctgtgcttacgaccatgaagctgtcctgtctctgatttggggaaagaacagtcactagaatcagacagatggacagatgccgtatgtttagaggctgggattatcaacattcaggaatgcagaggtggaaaagagaccagagatggagatgaggggcattggagaggtggggatgggaggagggtttggtgagagccgtgaagggccacaggaagacagagctttaaggagaagtttgtcagtgaggcccagagctgcagacaatcccaggaggtgagacctgaggaataggtctgggctgaggagaaagctgtgagggcctcgggagaggggcagcagggtgacccaggctggagctgctgtggtgtcctatcctggctgcagagtgctgcgtgttcctgggggatcatagctgttgatgagtatcactgtccctgtcctcttatctgtagaaagaggtgagtgtgacagagggggcaggtgagagctggcactgctaatttggcaaacctggtgacttttctgcagcctaatgatttttgaaagctgtttgctatgctgaggcacaagtgtgacttcccccatctaaatgctgtgcaatcgctattttccctggaaaattgggcccatgtgggctctgtgtgtggtttatttgagttccatttttatagccttattaccttgtccccatgatgcaagaggcctctctcttttcttgagctttgctgtgaaaattgtttcttaaaaggcacaaagtgatctctcgtcatctgggtggtgctcgctccacaagcagcacttttctcagactccgcacacacttgtcatcgcccctgcccccacttggcaggttcctctgattgttggcaatttactgagaacttttaggcagctcttgaagctcactacctatgtgtttgtcttgatttcttccggaagagtttgtgcatgtaaatatccattcagcctctttctctccgagatgttgccctgccactgaccgtgcttggggctgaaacccagtcttgtcctctggcctcgagctgattaacaatagcagtcatcatgtacagagcctgagtggttatcaggcactaagctaagggatttacgttcgtgatcttaattattcccaatttctttgaggtaggtactattacttcccccattttacagataaagaaaatgagccttcaagggatagagtaagttaccccaggttacatagctagtacatggcagagctgggcttaagcgggcctttctaaccttagactccatgtgctccattcattcattcattggcaacaaatgattgtctgcaacaggctgagaactgttgtagacccagggtgtacagcaaagggaaaaaaggccaaactcccaccttcagcttatattctaacttggggaggtagagatcatataataaatgacatatacattatgctatgtggtaatgagaactatggagaaaaatgaagcaaggaggtcagatgggaagtgggaggattttgaggagtggtcaaagaaggcctcattgagagtacaacaaattgttaggttaacaaacaaacccccaaatctcagtgtagcaacacaacaaaactgcacttctctgcagaaaaaattccaaagtggctgctcctggttagcaggcagccttccttgcagtcatccagggacctagactccttttatcctgtgtctctgccttcttcaagggccttggtttcctttgcattcaaatgctggagcgtgaggaagaagaagagagggtagtttgtgaggaaggctttatggaccagtctggaggaagcatacctccctcccacccactggccagaattcagtcacatgttcactcctgactgcaagggaggctgggaaaggaagtctggccatgtgccgcctaaaaaaaggaagtgggttctggtgaactcatggcatggtgtgttgcagcgagtgaggtgaagaagtgagctatgtgtttagctggaggaagagcattttacacaaaaggagcagcaagacaaaggctgctggaatggagtggggaggagagaaggagagtgggagaagatgagggcatggagttgtgggggccaggccactggggtcactgtaaggatttggttgccttgggaatgacaagcagagccagaacatagagttttgaaggaggaacgacaggatctgaggcacgtctcacagggctcactctggctgctgtgttgagagtggactgagggagcaagggggatgcaggggagaagcgggcgtttgcgggtgttatccaggtatgtgaccagaagggctggccctgagccggggtggtagaggtggggagaagccgttagatttgagatcagttctgaaggtgggccagcaacttttgctgtgggattggtagtggggcatgagagaaagaaaggagtcaagattattctgaggttttggctttgcctaatgagtattagtctcacttcctaccctcagaagcaagaggggaaattttttggaaaaggatatctgagtgttctctgggccctgacctgtcctccataacctctttcactctgtgatacttttttcagcacagatgggcaattcccattcatgactaggctttcagacatggagagggcacttggagtccctcctggcacacagcagaggtgaggcagcactgggaattgtctcactttggggtctttgggtcaaaccttgggacccctttagagtgacatggcagggactgagtgtgccctctaggggggtgagatatgcctactggagtccacttccaatgcctgccatctgcaaacactggtgaggccctggctgaagggtaacaacccacaaaagtgcacaaaaggaggaagttctggaatgcgagttgatgctgccagcggtccggttggctccttgccttctgttctttgtgtgttgacatcagacctctctactgcagacaggctgccctacctgagggggcacagctgccagcagcctcagtttacaatcctagcaaaggaggagagcctttctctacatctaggtatcagtttaagggaaaagcctctgtgtttgagagtgggagcggaaactgtttcccacgtacttccttggcagtcatgacctgtcaaggctgaaactggagatgggactttttaatagaccatgatctcactgggagcatatggggaagaaagttcatcttagagatggcagggcgtgagctgtgaaaacagatagtgcacacctactagatgctgggcccccgctaggtattttatttcactggagagcaaaacaatatatcatccctgccctcatggcacagatggcctcaagtggctaaaccatagaatggctagctgagagaaatgatagttctttctttttttctttactgattgcgaatggggttgtatttttaattttggtatccatgtgttcattgctagtatatagaaatccaattgatttttttgtttttatgttgtatcttgcatgtttgctaaactcactaattagtcatagaaatttttttttgtttattccccaggattttctgcatagacaattgtatcacttgcaaatagggattgtttcatttcatcttttccaatctgtatgttttttatttctttttgttgcctgattgtgtggccaggacttctagtcctatgttgaacaagagtgctgggagtgcacatccttgccttgttcctagtcttggggaaagcatcagcctgtcaccattaagtgtaaggtcagctgtggatttgttgtagatgccacttgcactttgctggcatggttgtgagtaggactgtgggttttgtgtgtttgtgtgtgtgtgtgatgtttggctgaaatacagtggttattatctacaagttttctgtcttgaaacagggagatttgttggggcattttctctttgtgctccttggcatttctgagttgctggtctcctcagttccaagtctgagctatatgcagaaaaggaaatgcaggaagctcaccactgtgttgttccttggatcctgaggtcccagctggtctgccttcttcagactgccatttggagtcttcttatagtcatctagcatagaatgcccaggggttttcattgttcttagcaggtggaatcagggaaagtgcacctgctccatcctgctgggagtggaaatggttgggggaaattggagcgtataggtcggggctagtttagatgcaagggctccgttctgtaggtgcaggagggccgtggaggctcagccctgacagcagtgggagggggatgggaagagggggagtggagagagcctaggtggctgctgcctgtgtccaggcaggaggtcctgaagtcctgaggtcctggccgtgacagtagaactgcagcagaaagaaggacaggaagttccatgaggacagtgaggaagtgcaaggagaccaggttggtctgaggtttctagctagagcagctagctggttctgagataacagagacagagggaggggtctaagcgtggcagaggggtgtattctaggcattgtagagcagatctggaagactggacttactgtgcttcccctcaggggaggcttcacagaggaagtctggctgctggggaaaaatccagggagtgtgcattctgggcagaggaattctggctgctgggtaaaaatccagggagtgtgcattctgggcagaggaaacaacgtgggaaaaggcacagatacagaaaacggcgtgatgggcctgttgggactccagctagctgaggcataagtgggtagttactggttccatgactgggaaggatgctgtaggagtgcacaaaaggaagaagttctggaatgcgagttgatgctgccagcggtccagttggctccttgccttctgttctttgtgtgttggcatcagacctctctactgcagacaggctgccctgcctgagggggcacagccaccagcagcctcagttttacaatcccagcgaagggggagagcctttctctacatctaggtatcagtttaagggaaaggctctgattggcccaggttggtgatgtgcctgcctttggacccgtcactgttgcaagggagtggagagttctaatctaggccggatcgtctgcccacccctgttggggcaaccagagtcttttaaaggagaaggcagacaaaatgcatctggggaagataaaaaagactgtttaccatggcttactgtaatagattttgaagaatatgtagtctggcagtgcaggaactcttcatggagattaaagcaggggacttgatcaaagttaggttttattaaaatcattctggacactgtatggggttgtgattggaagtgaatgacaagaggtgtcaaggcgggttcgtaggccactgctttagctccaaggagcactgatgaggcctaagctagcttagaatcctgacttactttgtttgcacttcacctgtagcgacagcatcagtgaggtggagaacagggatagagtcctagagatgttagacaggcaagacttggtggccagatggaggcaaggagaagggggtcttatggaggattccccactgccaccaagggcataaagaatgagtctctggagggctagccttatctttggaaacactattaagtgttggcagactcgatgtaccttattgcttcttcagaagtgttagtgttgttggcttcttgtggtatccagctggaaaaggaagctgattgattgcatttccctccctttaaagagcttccttttttgagaaatcagaagataggtgatacagtcaggactgccagtggagaaataggttggggagagggagacactggcttggagactctcctgcccccagcctgccccgaggcccgcgagtctgctttaggcacattcgtccttttggcatcatccttgctgggaaggcttttaagggatttaaggaaagaaatgacacaatctgattcatattgcaccagatttcctcctctgttcagaatagactatgggtggaggtagagtgactccaagagtagcagcagggaagcagggcaccaattaggagactgtcgcagcaatctaggatggggacggtggaggtggtgagaaatggtcacattctgaatacattttgaaggtaagaaccagttttagtgaggattagatgcggagtgggagagaaaggagatgaaaatgactccaaatttttggtctgggcagctggaagaacattgtcttaaactgaggcggacacaacgctgggaggagcacgtcaggggtctgtgttggacatgtttaagtttgagacacccaccatgtcttacacaaagctcccatctacttcttacttgacacaaacagttggatgtactggtcaggagttcagagcaggggtccaggcttggagagaaatctgagcattgttagcatggaggtgatatgtgtgaatccaggagactagttgagatcaccaagggagtgacagagaagagatgaaaacaaggactgaacacgctgacataagaggtggggagatgagggagaataagcaaagataagccagtgaggtgggcggaaaaccaggagagctagagggcatgattaactggtgtcaaagctgcaaggtaaggactgagactttaccaatggatgtagcaaaatgcaagacaggccaaatgcatatgctgttggacctaagcttaactttgcaaataagtcatagttccttcccagaaggagaatataattttgcaaaaagggatcatttaagatttattaaaataaatctgagaaagatgtgaagatagtaccgtaggaatccagcagaaggaaacagtgcttctggcttttgtggggaggattgagtcagattcattcataccttcattcatttgtgtgttcattcatttggcaaaaacttattgggtgccaggggttgcggggaggagggaagagagagttgttatctagtgggtatagagtttcatttttgcagatgaaaagagttctggagatggcttgtggtaatggttgaataagaatatgaatgtacttaataccattgaactgtacacttaaaaatggttaagactgcaaattttatgtgacatgtattttctcacaattaaaaatggagagagattaaataaaaaacagagcactttttggggccccatcatgaacttggtctgggatatgatgtttgaaatggatgcgccatctcagtagatggaggtaatgtggagaagagtggaggaagacgtccagctcagagggttttgggaactatcagtcctgtttgtctggatggtagggtctatcgggggaaaccatgcaagctgagactgcagccgggccagttggtgcaggcccagcatcctggctgtggatttgggcctgccttcttagattctgggagcctctgatggtttctgcccaggggagtgtcattccaaaggtgtgtatttagattaatttcattagtccttcctgttaaaccattgcctattaaaagcagtggggttgaggcattcatttttatggtgaaaattctggcctagcagaattttagatatccaagcatgtgtcaatgaagtgagtaggttatttttccatccattttacaagtatttattgaggatcatctaagtgcccgtagtgttctaggcagttgggggtatgggacggggtgaatttaacaggtctcttctcttaaaaagcctacagtctagagaaaccccctctccttcctaaacaagaagttatgccacaacgtgccatgtgttaccataggcatgccgccacagttccatgggtactgagaggagggggtgcctggcctgcctggaacactggggaggcttacagggaaaaactgtccaatggatttaaaggacaagcagggattttctaggcaaagaagcagaatgggcatcccaggagtatggtaaatcaaaacttattgggtgctatgaatttaaagctaaacttttatttcattggcttttaggtggtgctggctagagtgtatacgtttggacccaagcttaacttttccaatgtggaatcctgggccttcattggtaagtttgtttgatgccttcttaccaaattatgctatcaaggattggtatttggaatgaaaggcaaggtagttatcattggcaagttctctgtggaggttaccagccctggacctggagaagcctgtagcacaggctgaaggggtacataggaaaagtgaaatctcactgtaggtttctgtggtagatgcagagagggaggccagaggaggggaaccaaggggtgcgggggatggatgcagcgggccttatggagaggtggagctttggctctgttttgaagggcaagctagattgaaaaaagtccggggaggagtgaaagaagattttcgggacttgagaacatagaggtgaggtgtaaacaaagtgggcctagcagcagtcccataggagcaaaatcttcatcgaaaggagtcacgggcaagaactgtggtgggatctgctggcgtctgatgattctagtccatcagcaaactttttctgtagaggaccagatgctaaatatttttggcttcgtaggccatgtggtctctgtcacagctactccactctgctgtggtaacatgcaagcagccatagataatatggaaatgaatgggtgtggcagtgttccagtaaaactttatttacagaagcaggtggtgggctggatttggcctgcgggatgtagtttgccaactccttttctagaccctaaatgcccggctaaggcacatagactttatcctgaaggcagtgggaagccattgaagttattttggataaagaagtgaagtggcagaagtgatgtttacattttaggaacattcatctgatagctggacaagaggcatgggccccttttggaaggcagcagcagtcatccaggcatgaggtcttgcggtgaacagtagtgaaaatggaagcaaaggatcaatggaggagatactgcaaagggagaaccaatagcgttttcagtcttcttagacttaagaggcaggagtcaaagaggatgaaagtttaagcttgcttgtttacggtggtatctttgacagaaatgtagatgttgggggtggaaaggatagctgatgcatctggttttagatatgttgaattcaagataacagtggttcatccataagaaatgtccagcagagaattggaaatgcagggctgaagcctggcctgagaagattaagtctagagatgtggaatggaagccataggattaaacacggtctccccaagatgagcagtgggctgagctgtggggaatatgcgtaactgtgggacgggaagacgatggaagagacccagaggccatggaggagagtcccgggaagggaagagaatggggcagcagagaccagggagaacggacctgaagggaggctgctgaatttgtgacaaggtctttgcagatggccttgagaaatgtaatgtcacaagaggggaagggaagaggaagccaggttacatggagttggacataaatgaaggataaagaattgagatgttacaaaaatagaccgctcatagaaggtttgggtagtaaaagaagggagacacataagatttagatacttgcttgtcagaataacctttgctttagctttgaggcaggcaaagcatgctgtgaccagttttcatttccttctttggagccaagctgtgtttgggagtttgtgtgtaccttgggcttgtgattgtgttcttatgctcccttttgaggtgtggtgttcgtaactctgccacaacttgcaccacggaatccagcccgtgtttggacccttgccatgagacaagatgtgatctgttggggaagtagttgcatttgtataagttggaggagaaagtagagtggaccaaaaattgaaataaaccttcttactacagagtctatccaagtatggggacttgaggataattcctccagtcatgatttaattatgtatcaatttgtgctctgagtattttgagtgtaccttctttggtttgaattctaagtagtttttgacttggtttgtgtgaatatagcagttagagagctggtaacaaaagcaacagttgtaactggtttagagccatgatttattgaacactcattatgtactaagtccagtgctaagtgctattgtgtatcatcccatttcatctttgcaatgacctatgtggggggaattattaatagtattcttatttcagccagaaataagtcatagatgagtaactatgcaaggttacaagggatttgaacccgggtctgtataatccctggcttatgctgcttcctactttatcttgcctgtgtctggaatttttcctcctactaatgtagaaggactagagatagatcgagtccctcaggttaaatattcagaggctgtagtgggtgtttccacttcttaggagtctattgaaagggcagaagaagtgtgggaagtctggaagagactaaggccaaacctcaaacacttactttaactgtttccccagataaaatttagttgaaggcagcagccttgggcttggaaagaaaatagcgctagaaggcatgagagtcagattccagtcctagcattatgacaattataatgtcatttttgtttaaactcttggcatttctctccaattacctccagctttgagctccaaaggcaggctcctattttgtcttgtttttcactgtatccccagcatcgtagcacagaatctggcatgtagtatgttatgtactcactaattatttattgcttcgaatgcaccaagggacttggtacaagacacttagcctctcaggcactgctcttggcatcatggttatagaggtgaaacaggacaaggtctctgctgtcgtgaagcagacgtctacatgtgtgagatgtagaatgtgacgtcaggtatgatcatgctctgaaataaaagacagtgagaccggggtggagagggaagggcctgtccaagaagtgagacagtgagctcgttgggggtaaaatccataaaattcctcttggggtgactacagattgtcagctgcgctgtcagcaccttgttttaattgttttacttggctgccattgccaatgcccagctgactgctccctgcagcgagaactcccacctcaggcctcgctttcttcagctctgctgagcgtgcctctcctgggtcggctcccggttctcctccagctgctgagattccagcctccacagcctgctctgctggttctctgttctttgtccttagcttctggtttggcttggtccctttcacgtcatccttaacgtcctccctgggtgagctcatccaccactcacctctgtcttgaagacacccggatctccatatccggtctgaacctcctcccagtccacactcctagtggtctgccccgagggcacctcaacctgtctgtcccctcctgagtgccacatgcgtctttctccctgtgctgcctgcttggtccacgcccctcagttgcttctgcttcatgagtcgtcctggccttgtcttttccctcatattcccttggttaccacatcctgaagagctcatcttctaatttgtcaactcagttcttctctgtctctccactcctgtgtttaggattcatcattttgttctatgacagcctcttaattggtcatcctgtgttcatctttttcctccctcattccactgcccacattcctatcaacgtgatctttctaacacatgtctgatcagagctttcttttgcttaaagctctccaagagctcctcattgcttagaaaataaaagctaacccccttcagcggggcctgcagtcttctcatcatctggcccttggccccctgcagcttttgctcccccacccccaccccactttgggttttcctttttccctaactcacatttctaacctcagcctagctaccaacagccatcacctcctagtgcctttgcaatgctgggccctctcctgggaatggcgtggtctctgttcaccctcttgggaactcaactccagtttcccccaaatcttcaggacaccatccttccctacccagcacctctccatgacctggaaatgaccttcctcctggctcccagaacaccctcatgtctctcttgcaaagcacttatcggtgttactgttgatttacttacctgttatgctcagcaacctgagctccttaagggtggagaccacacacacacacacacacacacacacacacacacacacacactctgtctctctctctctgttccaagtgccagcatagtttacctggctcaggaagtttttgttgtaagagtgaggagtggtctgtttgtgcagccaagcaacagattcataatgtgataaaatgtacctgaaatgggaggttcattggccattgggtttattggggtgctcttcttgtcagctttgagtgcaggacaggttgtgttgggcttgagtttgtgacgcctgttgtgtctcccagcatgctgagacctcaggaatgtctcttctctatattctttgcccctgactttttatttttttagctcttgtttttgatggaccgataatagcaattcaaaatgaaaaataatccatcaaggaattctcaggaatgaggtccacccaccttggtcctggatgaatcccaaatttcctaaataagccagaatatctattcttgcgaactactgtctgacagcctttttcccccttaatccagctgagaatgcttttcttgaagggtaaggatacctagtggcccttcatgggggtgcctgagggcctctttgtcttcattttaaaccttgtaaagtccccagtgaatactgaggagtctaacaaataggaagaagctctgaccccaggggtcccaagtcagcatctgtactttgcatgggagctagcacaatgcacctagccaatagcatataaactctcctgttttcattcagtgccttaagcttgttgcttgttgtgtcttcttcacttcctatctctgccagagacctgagaagttgtgccaagagtgcagcttttatttggggcctcacagtaatctaggaaagcttttcagaagagagccattctcagcaccgaggtgtcctgcagaccaggacactccagcaggctcttggaactgctttcctgggatggaaatgcttgtgatgctgcctccccttgtagggactttccatatgctgttccctcagcctggaatgcatttttctcctggtttgcctagctcatgcctgttcaccctttggaactcagctgattggcctgcctcctcctcagaagcctccccaacctccctgataagaaggctaggtcttgtcctcaccattcccatgccagcatctagcgcttatggactgctcaccttgtgtcaagtactgttagaatgcttcatgcgtagctactttgtattaggggcttggtagatgttggctgaggtaagtgtcatcattgtcccaaagacactgtgtgaggaaactgaggcctcgacccattgagtaggtgacagagcaggagtttatcccagatgctggactgtgggtttacgctctgacccttctatacgccaccgttccctctgctccaagtccttgcagtctgtccttttccagcacttgtcatggaggtcatgacctcggtttgtgtggttatttgattaatgaatgtttgttccctcactgggcagcccttttgagccccaggatggcaggagtacctaggactctaggcaggtgcgcagcctggagttgaccgagagcatgtgggactgcccacttgcccacagctgcttcttgccttttgcatcacaggagggtgggctaggaccataaaagagccagcccaggcctccccctttctggagctcactgagtgcgtgcatggggtttggccgtcaccctcacttccatggttctgcatcagaaccagctgtgctgaggaaacatctgtgccttgttaaggtctgttccttctgcccactccctttgcccttttctctaccttacaacccctttgttgtccttcttcaaggaaaggggccccctttgtctctcagggcagagccagctgcccttctcctggtcctcttgatctgcacacactctgaggatgactgcccatggcaggtcatgatggtccgtctgccctggactgtggtttctgtggcagagcaatactttgtacagtcagggcccatggccctacggaaggctgagggagagcctgaggtcattgccttaagagaagctgcttcatggtgcagttggtatgtgtgcatgtgtgtgtggatgtgtgcttttttcatgcatgatgtttttatttgtgttatttatccccctgctatatctccctctctcaggggtctaacatggagctttgaatagtagatacatcatagctcttggctaaatacatattttctcccccgctgatctgaaggcacctcccttttcccctacccctcactttggtaccttggtgacttcacagggttgttatgacttcccagacctcattgagattgcagtgatgtgaaaaccctacctagattccagccagctgggcaggggccttggcagcaggggaagcccagttccctagggcaactcaccaggcctccagggctctctagggccaggctggctgagcttcaactgactcatactgtttttgactgggaaaaataaaaattttaaaatggcttctgaccaaatggggaaagtggatgtgggaggaggagaagggggacgttagccacaccctaggtacatttgccagcagcaaactgagatgggcttaaagtgtggctggcctctaagacgcctgcttcaaagggcattcggcacactggtctcaggctttggaggcccacctgcttcagaacatcagctccctgtctgtctagcgttgtgacttaagacaaacccaccaagctcccttagcctccattttctcatctgtaaaatgggattgtaatcattagaataacctttataaggttcttgtgagagtggaatgaagatgtgcttagcaccgtgactggcgtgtagaaagcaccaaatatttattatctgttaacattgtttttgtttgtcaaagtattattgttaataataattataagaagactttggaacagatataaagtctaaaatgcaggctgtgatgaaagggagatggtatataagaaaagtgctttttgaattgcacattatgtccagatattattattagcacaagtatgtttattattgttttgtctttgaaaaaaatgctggagcacaattttatgatgttgagtctatgtcctttgttgttttgttttttgttttggaaaaaggtttgtcacattggcctttattggaatcttgtccagtggatgtatgacccacattggtgaccctgggtgccaaatgcctggacagcacctggcaaagaagagccattatttcaatggtcactattgtttaaaatcgttatggtaaacaatacctgacagaagttcttagaggttcattgacagtaaattgtgggcaatgcactgagttattatttactctagacctgagaaattctccctctccaagttttgtgccttgtatagctaaataaatataaacaatttccttagaatttgatacaaacagctaccattgtcttcacaagtatgttagaaatactttcttaatagcaactacttgactgttttgttttttatctccattccctgccattactctgcctcttcccatctttctgaaataaaagtgagccaaattagccatttaaaaaatacgtagatactttcaggcagaggttgaaaactgtctaccccctggctgcatctggcttgcagatgtgttttgttcagcactcatagtgttttaagatgtttaaattagtggccaacatttaaaaatgggtagatttttgaatcaaaatccagatttccagctcttcataaaaaatcaaaggtctagtgggcctgggcccgtcttccttgtggcagtgcggaagagtggtggtccctcccctgggagcttgtttctccagcctgcctccggctggcccagcctcactgtacctttccatggcctgcttggcccctgtaggaatagagtttgtagtctctgcttaatataactaataccccttagatactgtgtatcagtttagaattatttccactagcaactgtgaccataggtaggaaggatattttacttgctaagttgtcattcttatgatagcccaaatggctataatagtattttaggctcttttggatttaatagaattaccttctctcctctctgtgggatttcctcattaacaatttttaaaaagtgttcagcaaggcttatatagcaacataaaattttaaataatgcaggatataaatttctatagctgctattgaaggggggttgcaatcaagtgaactgctttaattcaacaatttatggtgttgtaaatttgaaaaataaaagacacttagttttttttttttttttttttttttttcagaataaaataattaaatagttgacctttggcagagtctttgttgaaataggcaagggttttgagcttctcagaacttgagaccattgccttctggagtctttcctcagatgagtctgtgcctccttctagctagtgcactctgagcactgtggccacatctggagggtggagaggagacttagcttccaatggtggtcactctaggggaggggggcccttgcaaataccaaaatttttttaaattattattttatgagcttttaaaaacttttttgtttttgtcatcacaaaagtaataaacacttgtgataaattcagacaacactgaagtgctttaacataagcaacaaaatcttctgtgacctcccccaaccttttccaaccattccccaaacataagcacttttgagagtttgcttcttatactcctggacttttgcatttgcttgtttctctccacccctaccctttgccctcaaccacgacatagatactttcccttttgttttctaaagatagactgtccctgtgcatggtgttctgcaactttctttttacagctgtcaattattatggttatttttccaagtccatatgtacagataaatgtacttgttacttttaaaagttgtactccatgttatggttgtatgttaagtaaatttcgttttgtattgatagacactcaggttgtttctgaccttttgccattgcagtcattgctgctgtggaaatttttgtgcacacgtgtgaacttttgcctgagattttctttggtatagatacatagaagtaggacttttggtttaaatggtttgctgtttaaaatttgaatccataatgccaaattaccctccaaaaaggctgtaccaattcatgctcttcctaggagcatcccattatggctttgctaatctagtttttgcttacacatgtgtaagaaagtaaatcttaaaagcctcacaaataatgccatcaaaattacacgtttatcttagaaaagcattcagaatatatgtctgtagatttaattatatgatttttatatcttgactttgatggtggttatcatcctgcaaggtgacaaaaagttccctaaatactgtacacaattattaaataattattaaggatatcagttgtgccaggtagcctttggaagaattacagccaaatcacagcttccttttccacagctctgccaggctggcttgtctttcccaccaagggctgagccattaatactgaggctgggtcagcatttgaaggggccctgccagggagtgccaggccttgggccccagagacctggggagtgggagatggcaagtgactgctgtgaggctgagacaaagtttttgcctacaacaccccatggctgtttcctttactgagctagatgaggaaagcaaagggaagtgatggtccaagacttctggtggtcacttttgttcatagatttctcacaggagtgctaacatttaggctcatgtttacgaaggtttgaaaccttagcatttgggaaggatctgcaaattctcagccaggggccttaactgatcacaggtagttgtgaactcttggtccaggctgtatctcaaggcttcttcttagaaggacaggtcagcttaccacctgctaactgcatgtgaaattttgaattctgccttctctagctctcctctctggctctgagctggtatctggcatttgcaaacagtttaccctttgttgacttcttagcactaacctcacttttatgagtctgagtagacttgatacccaggccatttatcctttgagggtgccctcagcttcatcagacccatgctgggcagtctggcatagtggtaagaggcacttggagccagacagacctgggttcaaatcctgacatcatcacatttactaacagtgtgaccctttggctgatgacctcacctctttgagcatcagtgtctccttctacaaagtagggacagtaattctttcccaggggtattttgaaggatatacgaattaatatttgtcaggtgcctctcagatgttcagcacaaaataaacagtgtataaatatgagtcctctcttatcttcctgctgtagagagaaagttcgttggggatgctccaagttggtggctactggctgaggatcctggagtaagaggaaggctaccatgtaaacccagagatgaatcatgaacaatgtgtattctcaggagcttagtatttgatatgggagcctaacaagcaaatagtgtgtccagtaataggaactgattaatagaggaaagattaattaaccttctaggtgggtggggtggaaaagtaggtggggtattgaaggttcaacaggagttcgacagagaagatagaccataaataataaatatacggctgtatccactagagataaagttacattgttttttatgtacatgttgacttcttttggccttgccaatgcactgatatattcaaattcagctcctctctttttctcttcccttttcccttcactctgcctttcctccagccctgccttgaaatactcagccactgaaaatttcttaaagaatttctttatactttagtaagtcctcagaggataccagttcaccctactgagattttacaagaactttggtgtagctggggttttttttgcattcctttttctacggtagatataagttcttttgggttgcccatcaatgaacaaactaccaaccatttgatgtttactgcgtgactcctgtataccaagcacatgtgccatttcacttagtccccagaatgtcagagcagctttgtgaaatgggctgcccgttctttcttatggatgaagaaactgaggcttaggtaggttaatatactgaatattatacatgtagtgagtgggaaagccacagttcacctccagggtctttttctccctctttgctgccttgcttggggtcctgctcatagtaggtggacagcagatgtttgtctgaacatatgagaacactgcctgccacgtgccggtcagtttgatttgtgctgctggttttgtaacccacatggggcaatgacagctgctcaggtactttcctacctattagtggggccccagggtcacacatcagtcataattgacaaaaaacacaatttccctttcctctcaacttttatttctaaggtacttgtaagcaggtagattagattgttaacttttcattttttgctttgtctctctcctttaaagactatgtgaaagaatacacagtgccctgagagcctggcctgggaatcagaaacttagattccagcttcggttctgctggtaactcctcagtcattatgggtaaataatattccctctccagaactactagattgtgtccttggtgcagtctggggttcgggtggtcctagggaccctgcctactgcatgaacctgttatcaccatgtgaggctggaaggatctcagcgttggtgttgggcaggcctgagtgagcatcctggctcctgtacttcccagctctgtgacctcgggctaatcacctgactccctgatgcttgttcttgtctacgaaggagggctaagaggacctgcttcccaggatcactgtccagattgaatgagaaggaacgtcggcttccttccttctgtctccaactcctgagtgcactggttttagactaactgggtgtttctgcagttgaaaccaaaacaccttcattaggtacaatgttcattatacctcgcaacaccctgagatactcaactcttagatttcttgaagctcttttttgttaagaaactcctcaaaggaagatactcttctaccccattgagctttattagtgcttcaatgacagcaccttattttttcacttttttcccccttgcagacagaagctgcagtgtgaatcagtttgcatttatataatttcttttgcatttctttgcaaagaggaaaactccattcatttagcaaatgtccgtcatgcccaggccttatgttaggtgaagggatttggagagaaatagagtcactgacctcaagaagcttacagggaggaaaggtgtaaatacataaagtgacacatgggtttgtcctgtcaccaaggtatgcagtagatgctgtgggagaagagaggatgacacaggttctctcttggaagacctcatagagaagaggtgacttgtgagcaagtctttttttttttttttttttttttttttttgagagagggtcttgctctgtcacccaggctggagtgcagtggcatgatcctagctcactgcaactttgaaatcttgggcttcaagggatcttcctgcttcagcctcccaagtagctggaactacaggtatgtgccacttgcctgtctgatttttttttttttaattttttgtagagacagcgtctagccatgttgcccaggctgatcttgaactcctggcctccagtgatcctcccaccttggcctcctaaagtgctgggattatagacatgagccactgcacccagccgttgtgagcaagtcttaaaagatgagtaggaaggagtctgtcagctgtagaagtaggaagggcccaggcagaaggagcacagggcagaggctagagccctggtaggaggtgacacactgggtgcatgtctggagctggagccaagaggtggaggacctaagtggctacatcttggcagtcacccatatattggcaagccccaaatctttgtaaccagcccagattgtcttcctgagcccccaactcccatacccactgcccattcagcagctagctgcatgttgaagtgtagtggtcttcccagacctaacataactaaacagaagtcttgatttgttccttcaaaaacaaacaaaaaactagccttgctcctcctcagtcttccccatgttatgaggtccccatcatttttacctggctacccaggcctaaaatgtgggcatcatctttgattctgcttcctcctgtgttcttcacatcatctgtttgcaattctttttttgtttgttttactggttttaaaaattatttatttattgagactgagtcttgctttgtcatccaggctggagtgcaatggtatcatcttggctcactgcaacctccgcctcccgggtttgagaaattctcgtgcctcagcctcccgagtagctgggattacagtcgtgcgctaccactcctggctaatttttgtattttcagtagagatggggtatcaccatgttggccaggctggtctcaaactcctgacctcaagtgatccacccgccttggcctcccaaagtgctgggattataggcatgagccactgcacctggccaatttatttatttttaattaacacataataattgtacatatttatggggtacatagtgatgtttcaatacatataatctgtagtaaccagatcagaataattaacatatctgtcatttcaaacattgcagttcttgacaactcttactgtatgtcctggaagccaccactgctccttattattagtttgtttctttatcaaccaagcaggccagaccactgctctaccctcgttcaaacctccactgtctttcagcaggtctcttgtcagtttgctacataggcaaagaggtcttttaaaaagcaaatttgtgtcatttccctgctctaaactctccagcggctttctggcatctttggaatggaatctaaacatctcgccttggcctgccagcccctcctgctcatcttctctggtctcatcccttggcactctctgctcactccatttcagctgccgcatcttttcttactgttccccctgttgtctcatgggctttgcacttgctgtcctccgcctgagctgctcttccccagacaccgcctgtctcaccttcactccacgctggcctctattcaagtgttctcccacctgtctgaaaaagcaccgttctgccccctctccccgctgcttcaaccattctgtcctacctcgctttggtttctctcattagcactcatcactctctgactttatatgatatgtttgtttgtcttcttatttagtgtttgtcttaccccacaagaatataaatccatgaagatgggacctggtcttatctattgcattcagcactctagggcctaaaacagagcctggcacacagtgggtgatcctgaaacacgaggtgggtggatggacaaatgactgagttaatgcatgcctgcatgcaagcgaagactttggagtttatttcataggcagtgcaaatctagtagacatctttcaggaggtgagtgacgtggtcagcacttttattttagaaagccagctggtggcagtgtgggggctggactgtaggagggaggcagcagaattactttagcggctgtgaaaatcgtccaggaaattgatgctgagtgttgtgctagagctgtggggatggagaagaggggacagatgacaggacctgaagatctttgagtgtctttgatttctattgggataacttggtatagtgattcctttataagaaaagcaggaggggacgaactggtccagggagagactgttgacactctgtggtgtttttctcaccaagaaaacctaagccctgggatgcatgttctctgtagtggcattggctctctggggagtgactctgctgctccgcagcctcccctgttccattttttaataagagaatagtcaagatggtggtgtcagtgagtgggagtcttcttcatgcagatggatccattgatctttgcatactccaagccacactaagtcattggttcttttctcgcagtgggtacatttcaccttatttgattctgatctgacaaatgctgctttttttcttttctttttttttctttttttttgtttaaagaatacctagactgtgctcaagttccaggtggggtttacagataactggggttccagcatctcccttcttacaaacacgaacaggagcctttgccgtccttgggtctcagggaggcagaccggcagcaggcacacattcctggcccaggcgtagccatgctgtctggtgctgccttttgagaccttttgtgtgtgtgtgtgtgtgtgtgtgtgtgtgtgtgtgtgggcttgaatgattccttctttcaaaaattcaaccctctccaaattttgatgaaaaccttttcatctctgagtaagcacattatttcccatcttgatgaggtgtgtcccctctgtgtccctgagagtatgtcatcccagccttttaaattttattgtatttttttattttttattttttcatactagtcaagtgcagtagtgagaagcggggaaagagtagaacaaggggccgggggcggtggctcacatctgtaatcccagcactgtgggaggctgaggtgggtggatcatgaggtcaggagattgataccatcctggccaacatgatgaaaccctgtgtctactaaaaatacaaaaattagctgggtgtggtggcacacgcctgtagtcccagctactcgggaggctgaggcaggagaattgtttgaacccgggaggcagaggttgcagttgagccgatatcatgccaccgcactccagcctggcaacagagcaagactctgtctaaaaaaaaaaaaaagagtagaacaaggagtttgatctgttacagactgaactatcaatggagataactcactaccttcggaccagcctcatcccagtcttttaagcctggtccagaattcctaatcctgcttgtcaggcccttcaaagtgaaatgctgtaccatctgtatagctggattctcacctcctacctctcctctcccttccaaaggttccgatgtcataggaatctacgctagagggcttcctgtgtgccgggcactgtggtaagcacttcacatgcattctctctaatccttaccacttcggggatgtaaggattataatcttctttttacagatgaggaagctgaagcttgccactgcttagtagttaagagtatgggcttacagccaaacagaccctggattgattctcaactagctggggaccttgggcatgctacttaatttttttaacctttttcacatttagaagataaagataatatatagagagataatatagaagattatataggtattatatatatatatatcttctatattatgaagataatacagagttgtgataaaaattaaatgaaatgaccagacatagtggctcactgttgttttgttttgttttgtttttttgagacagagtctcgctctgtcgcccaggctggagtgcagtggtgcgatctcggctcactgcaagctctgcttcccgggttcacgccagtctcctgcctcagcctcccgagtagctgggactacaggcgcccgccaccacgcccggctaattttgttgtatttttagtagagacggggtttcaccgtgttagccaggatggtctcgatctcctgacctcgtgatccacccccctcagcctcccaaagtgctgggattacaggtgtgagccactgcgcccagcccatagcggttcactcatgtaatcccagcactttgagaggctgaggtgggaggtcacttgaggccaggaattcaaggccagcctgggcaacatagcaagaccacttctcttttatgaaaaaaaaaaattaagaaaaataaaaattaaatgaaataacatgtaatttcctaagtacattaagtacgtgcctactatgcgccggacattgtgctgtcagcaaataatagctcatcgcagatgctgttatcatcatcatcatcccaaagccacagattgagtctgtaggtgaggccctgcctggctccaaagattgtgtttttttctcctgttgctcccaagttcacctgtcccaaactttctagcccctaagtttgcttccttgcgcttttctggttgtgccatttgtccctgtctgggcagtgggctcaagctaaggcacagcagttttccagtccctttgagctactgacctcttttctgtcattgactgaacagtttccggtggctgaatcgtctgtgtaagagcttggacaattttttctgattgttaccatcatcgtgtttactgtgaaagggcttcctgtatagttgtttgtgttagcagcattgtctaaatgaaacaagagtggcaacagaaagggttggtgagcagtcctagtcttttggggtcacagatcactttgtgagtctgaagaaatttatagactctctcaaaaaaataaacgacaagacaaatacaagcccagcatttttcatgagacgttttccctgaagttgatctggaaggctatgtgctcttttgtcattgtgctactccacattcacagccatgaagggtgtcatgtttctgcagggtgtttgtatttaagggttgttgggcaatttggcaacactatacctgtttcattgatactatgtgctatttgcatttatttcccatatctgagatacgtattcacacatgagaactggcctggccattttgatgagatgtacctgctgatttgcacataaacacaagccatggcctgcatctagaggatcgactggagaggcttttttttggcccaaaacatcagactagtaggaattttattatgagttatagactaaaaggggggataaacttagcttcagcagggtttaatattctcaattcaggtaagtgtaaatctctacttttcattttaaacatttttgaaatttcagtctttaaaaaaatgcttgttttttttccttccaagttttaaggtatgggtttgggagaaggcagattccaaacactttaactcttcgacctcagacttgcttatgagcctctctttggaacatttccagtgaaccgtggagcaagcctgccacatccagcagccgtaggcatgatgatcactggtgccgatggcccctccactccctgcctggcttttgaggccccgcagaaagaaaggaacagaatcctttcataaggaaggccccagaatcctttctcctgctgtagctatgctgccagtgtcctctgtagatggaaatggaacttggattttgggtgccagaactgaattcatcacagataagattagttgatataaagctgtttctgatgagcagtttttcctccagagttttcatttttgctttttctaaattatacaaaataatagacactcattacaaagggaggatcataatgctccatacctggttttgaattccacttctatcacttattagatgcagccctgggcaaaacacacgccctctctgagccttgatttttctcattgaatgggagatctaattattttacctcataatactgctgtagggattgaaggagattggtataaataatggttttctgagagtctggtgtgtatttgctttttttcagttaatatgaattgagtacctactaagagctggtcactgttctagttgatatggaaccagtcaagagcaagacagagagggtctccgctctcatggtgctcacattctaatcagaggaggcacaagaacacaagatcacttcagttattaagaaattagaacccaggggtagcatgagagtcacaggaaggacccctttacgtcggatggccagcagaaccctccctgaagagctcaatgctttgtgacccccccggtcccaagttttccaggactcctacttttaaaaacactgcccctccaagtatataggtctcaattttgagtttggaaaatctgaccacatattagttctcttgttcattaatgggcttcccatttagagagtgagttcctggggcaggagccatgtcacaggaccttttgaaggtctcagggccaatatggacgacacttctcttgaacactcacccagttgggctgacatgaaaacctcatggtgggaggtggggggtgattagtttccagccagagcccattttgctccattgctgctttgaacattctggtttctaaggagctggaagtagtttctctcagcgagaatgtggcacactgtcatctcctgattctctgcatgcagttcttcaatggcttgttgaggctgcgtggaagcccagaggtcggggcagttccaactcacacactggcatttgaacggcagagcagtaagccctacacctgacataactgcattgccttcttggggtacggtacggatttttaaatgaccatttcagcctgctgggctgggcaacggtgatccaaactgatgagtcaggaagccactgaacagaaaggcaggctgcatctgactcacctgtcatgtcgatagttgacctccttttgtttgaccttgatttgctcagtgcaattaaagatgctgttgtgagtgcacttctgctacctgatttaaataaagtctaacatgtgacagctcagggtcttaaatgcacacacgacttaggcagacggacagatgggtgagtggttagcctttcacttacctctgaattgtaattctatcacaaggaaagggcttaatttcaggaacacggagtaattatttgagactagatacaatgccaaagcagcaggccttgattccttgctacagggcagcttaatcaggaaatggcctagatggccgcctttcaagtaggtccttgcagtagcttggcaacaggcacagggtcataattggaagaatttggctgtgagtgtctgtgggtgtttacagtgcactatagggcagggcttctcttatttatagaatattttgagcaacaagcagcagaaggctgaaaagccactaaaatctcgatttatttttaacaaattccatttttctcctcatcccagaaggagaactgagttattaaaaaacagttaaaaaatacatcattgcagagcatgccatatctaattatggggttgccagcatcggcctgcagccacatttcaagggcttcgtaaatcaaccatccattcaatctgtgaacttatatgactcctgttctccatttagatgtagagcgaaattattggcaagtgggtgctgatcagaaaaagttcttccctgtctaaattaggagatgggagggataaatatagaatagtatacttatgttctcaaaaggagataaaatcattcttcattgtccattatacttagctgcacaaacatccatcccattgcactaaatagccactttagagttttcacacattgcaatggcagttctgtgccactcaaaggcgcagtattgtgatatctcgctgagcctaaacctgagtgattattgctcacgtagtcatgaagagacataaacccagtgcttttttgcctgtgttgtcgtagtgtactagagctacaaggtgggccttcagagagacactagttttaagtatatctcattgtaggtggggaagcagaggcctaggcaagggagtgacttgcctagggtcccattaagagtcatggcagaggtgggctggggcggcagtctctgtgcttctcttgacagtgccctgctgtgctcactggagctactgtattaaacagatacccttcaggggttcacagtcttagaagacacaggcacgaagatggccaaacaatcagcccatgcataagcagaccaagatatgtgtatataacagattagttgagtggtagagaaaatgagagtggggaattttggaatctatttggatagcaaagcaaaggtaacatcagttgctctctgacccacttgggaaaagcttatagagatgctatgaagttttctaatggaaaaaggtgcagtacatttgccatgtgttagtgggaaggtaagtatgatgcagtggtgggtggtaggaggcagtgaagataagtattgcaactttggaggagccctgggaatggattgttgaggtgatttcataggaatacgaaagggagcataggaccagggcacaggccagagacaggcaatcccaagttccctggagtaccctgcccttttctgggaaagcaagtgggtggcatgagtgctatgttcccaatgctctggccccacccctggtagaagaataataactgatcatggtgggttttttctgagcctctgtatctttgagtagcattctggtagccaatatcagtggactggtgccagcctgtgtggtgaacctctatctctttcttgccctgggctgcatgtcaggcacagtgcctaagccggagtgggctttggggagttacttctctttctgaggctggaaggggcagagggacgtagggaaaactttgctagggagggcaaactgtgaaagcctctggagaagtcacctgttgggataccaaaggccagcggttttagaggatgcgaagaggccgggcggggttggtctgggcctaaactaaggctgtagcggctagcatggagaggaacaagcgacggggagtgattacggatgaggaagacgtactaggatttggctacagacagacaaccaaccagagagtaaaagacagtgacatgctaggatgtgaaccacctactacagagaaggtcagaggtggggagggaggaatcagggctgtgggcagatccagcagctgggatccaaagctgaagcccttgggttattgaatccattctttctgagaagagatggttgatcttcctgcccagggagttcctagccagactggacagtggttctcaaacatggtgccaggtgttgtcagatagcaaacaattagtttgtacacagaatgtccccaaggtcacctacacatatttgtttttcctaatctttgatacctacagccacttacctgctttcgagttctcagagttgagaacatataaatttgcagtaacaagtgcacaggaaatacttggaaaatggctgatgagctttagtttggaaatttcatttttttcttggatctggattataatttcagtacaagctagcaatttttcttgttggtaaaatagtttctagttttaaaattatttctgtagttaataaagttaacactatttcatgatggaggctgccccagctctgaaccaattttcaaaaggcagattctcctctttctctctcttatttcttgctcttgaacatttcactgtgttctagcaacttttcctgtgtgtgactcggccaggagactgacttgagtaagatccaggtcaaggggttgtgtgggtgggtcggtggtaaggaggtgctgaagaacactaaaacctttgcctgagaggagtctgggaagtagcctgcgaactggaatgaccccaggcttcctgtcacggtcatagcccatggagttggcagacttgatcactctatattgtgtgcccccaggtaatggcattagtcatcgatactgtcttttttttttttttttctttgagagagagagtctcagtctgtcgcccaggctggagtgcagtggcgtgatctcagctcattgcagcctctgcctgctgggttcaagtgattctcctgcctcagtctcccaagtagctgggattacaggtacatgccaccacacccagctaatttttggatttttagtagagacggggttttgccatgttggccaggctggtctcgaactcctgacctcgggtgatctgctcacctcggcctcccaaagtgctgggattacaggcgtgatccactgcgcccggccaatactgtctttaaatcgtccagagtaagaaaatgttgatagcttgttgtcacagccctgtcattttacacattccctgaattattgtctggcaccagcaggtgttccagaaacacttttggttctttgagccattactggtcattcctgtcaccactgccaccaccagatgtggttctgagagcattaagtaaaagttttgaaggttgtgtatgttaagactggtgcaaagtccatcctccttccttcgggctgatcagccacaccctggctatcagcacttatttactcattttcaaagtgacagaatggtccagtgggcaggggcataaggggtcacttcctctaaccacccgccagtgcaggaggatcccatctgcgcagtggctgcccatgacaggcagttccctagccccagtcggacatctccgcaccaggcatcctgctcctgctttatggacatctttggctcttaaaaatcctcctttattctgaccgcagatctgccttttggcagtgtttccttagtgacctagttctgctttttgtggcaacacagaacaaaggtcggtaggcatggcacaattccagcttagaagtttgaaggtagtgctcatggacccacatcctttccctctccacccactctatctccctccacaaggtttatgttctccagtgccttcagccattctttctatggcatggcagtcagtattaatcccagtaaaggtaacatgtatccagagagtgcttgccatgggccaggcactgttctaagctccgtacgtgaattgtcttatttatgactcaaaatcaccatatgaggtgagccctgtcatcatcctcattttaccaatgaggcaactaaggaacgagggctcacatcttgtcccgagccatgcagtcaagcagcagagcagagatttggggctaggcagtgtgactccagagcccgtgctcttagttgtggtgcaagactatcttacagcctttcctgcatagtgccaaaaataagcccatggtgcactagacttgggctggccctgctttaacttattttgcaagaaatcattagacaggagccttagttgaaccattttctgtgaaaccttcagagtttgttttgacagaacagactgcagggcagaggcatctgcactgtccccaacaaatgggttcatcctgtagctctgccaggccccacagggttcataaaatggtagctttagatcaaggtgacaaatacagggctcttgatgttttttttttttttcctgaacatggtgcctgagcaataggtttcttgtttaaagtgcttagtcatggttttatggccagaaagtagaaggagagaggtacctaagaattgcaaaactgggtcatctcttcaagtgcctaatccaatattcagtctcagagaacaactccagcagttacgggggtggaaggatgtgatgaccacctaccatccaaaactgggatgtaggtgccaaatacacattctcctgaaatgatccctggtgcctctagccaggctcttccaggagtctagagaaagatggcccatgacttcatccagagtctttgcttcctgtgctctgggatgcctgggcttttctggccacagccatacactgacagggccagaagggctgagatgctgggattgaaccatctttctctttgtgagttgctttccagatagcacgcattccggtcactattttccagagatttaagcagcaaagtgagggaccctcgggcatcgactcagagacctggaggggagcagcttgaagcaatgtaaaaagcactggataaaatctggttctaccaaaaatagggctatgagagttacctcacctccctgaaaggtaatatctttatctgaaaaatggggatgataatactactaacctggaagattgacaggaggattagatgagattctgcatggacataacagtccttggcatgatgtctagcagtgaagaaacataaatatgagaataataacttccttcttcctccgctgtctattccttctcttattctagtcctgtctgctgttgggttttgtctgttgttttgggtaaatagctaacctctctgcctctttttgtctgtagaaatgctactggttctgaatgggtacttcgcgccccctataggacatcgtgggaatgtgtgtgggtgatctggatgtcacagtgacccagacgaggcttttactgggggaagaggggaaggcaggggtgctagatataatgcttggggaacaaaagattgcccaacatctgcatagctgcctaatgctcagtgcattcttgtgggcaaaaccctgcttaaaattatctgggcctagagtctgactccaattaacacataaacacaaataatttttgcatgtttttaatatatactgaattttctgcgaacacagctaccaagtatataagatttacctatttgttatgaataggtgcaagcatttcatatatctttcatgatgttttctggtgtagcggtgccccaatacttacatattgatttacatgttgtcttatttttaactatatttcctttcttctttgtattacagttagggcattatattgattatttttggaattataagtgttgtaaggttatattacttacagatttcaagagagctaaagacatatttaaaatatttttattgcatttttgacaatatgaaagagcaagagagagagagtgtgtgtgcgtgcatgcatgcacatgcttacaaattagctagaaaaatcctaagacagactttaaatgaaaagaaatggtttcatagctcctagaaatgtccttttacataaggatatgtagtagaagtccaaatttttaactgcattcattgtcagagaaatgaggtgttttgatgtttcccctgtcccttttagaaagtatatgatcctaaaagagcctgaaacagtttccattgtcatattttttcatttttgcaatctctatttttttcactcctcccacctgtgcatatatatatttaaaagcgtccccatatagacttttaaagaaagaaaagccagccaggctccccactctttactaagtttgttttgattgttttgtggcctctgcctgcacctcggcctgagtcagactgactctgggagctgtgggcaggtccaagggaaagtcaaggaggtaatgaggcttctcgtgggggcaacttgtaggccaagttgggtgggttgaagtcagtctaccagaagcttcctgcctcaagcctgggcctctacctgtcctgaaacctgagggctctccagttggaccacgagggtctgacatccaggaggatccccaggagagagcaaccgtcactagggaatatgctgcccagcactgactgtactgagcagcagtgttgtgtgcctgttgggttgatgccatggatagccaggcgttcagaactgaacacgacacctaaaaggcaaacacgaactgtgaatgtgccagtgtcagatgctgccttggtggtcatgtgtgggctggcagtaagcttttggtcccttaacactcgctgttggaaatttcccaaggctttcatctagggtagctggtgtgtgatttccctgtcctttgttactcctatctggaaactagttgaaatcttttctatgatattgatatagttacagaaaatctgaatacttactactaagttttatagttctgcttagttcaaagtaacacaacctcataagagaaagtttgaaacaggtagagaaattgaaagatgaaaatcactacccattatctcagcccacaaagatagctactatcagcattttggtttgtttcctttcagtcctttctgtgtttatgaaattttattatataaataattcatgtccaatatagaaaaagatggaaaattgagaaattataacgttaaaacaaaactgacccatctcaccagttggagatgtcttaatattctggtgaatttttttttgtcttttttctatagacacataagaagactgggaaatattgtgtatatacgtttgtaccctttttcaccaatgtatatcaatgtatatcagttcactaatgaatactaattaaatgaaaatttattaaatgtatatctatttatatctattgatatattaacagatgccagtgcatatctattaaaagagtactatgtaagagatgatgttcttaaacataaaatttaatttaggcatgaaattactttgtcaaaagatatatcagtttatattcagatatacagtgtactgacctgcccatttaccacatcttcactaatactggtattatctttaaatagaatctttgctaatatgagcagtgaaagtggcatattatctattaaattttgacggttatgagattgagcatgtttttgtatacttactggtctttgtgtttcatcttttggggtttcctattcatagtctctgcttagttttccactgaggtatttgcctttttattgatttataagagattttgttttgttttaactcagaaaaggtagtattgcttcagttgtcacagagctttggagtcagacagagctgggtttgaaccctggctttcctacttgtgagctgagggatttcaggcaatttatctgacccctctcacaattaattagttcttctttgagaactaaacgaaacaacactgactagcatgaaaaaaaagcctggtgtgtggtttctgccaatagtttttgtgttgttatttttgttgtgattcctgcactgagtattttctcagaaaaatgaccttgagctgtacgactcatgcctgttcagacccacagacacatgatactcactatatccaaagctcagaaaaatgaaactgaaatcactgaagtttgtgggttttttttttaaattcttcttgccagaaggagacaaatgaaggaaaaaaaacaagccgatttcattttcattaagaggaatttgtagagttatttctggggtcaggcaggatacattcagacgaacattttagatctagggctgggaagatcccgagactcgttatagattacatcatcttcctccaagtgcacttgccaggcaaatggacaagtgcattttagaaaggttttcagttgttcacgtttaaacagaaaggatcacctggctaacttttagttaacccattgaacagatgtgccattcccccagcccattggttattcatgtccttgttactggtttttgatatccttgccccgtaggtgggaggagggatgggtatgagcctgccctgccctctttctcctacttgggacagagctgttgcttttatttgctgagtcactgaagcaatagagcatgtgcagagtcccagcctggaggtgggcatatctgggttccagtccctgctctagcccttctcagctgtgtgatcttggacaagttgccatacctctctgagcctcagtgtcatcttctatgtgatgtcgatgcctcccccaaaaggtcgttacgaggaccaaaggagacacgtcagggcaggaaccatcctaggcacgtgtttgatgctcagtaaacgggacgtggtcagtgttcagagttgtgggggtggcaggtgactgctctgtttcacctccactcacagcaacagggcctgtggtgtcacctagacatctcataggcatcccacactgaacatgtcccaaaccagcagctcctccctggatgggtggatggtgtacagggacctcttcctccagctgtcacatggggcatgtacctggcaagtggctttgcagccctagctgcccccttggctgggggcctttgtgcagttcatggactgggagtcacccccatgtctagaccgtcaggaaacccattggcttttcctttagagcataccaagaatcaacttctcagaacatagcaagagttgactttttgtcaccctgccgtggccactcagactgactcctcttacacctcacatcccattgatcagcacagcccctggaaatatgtctagaatccagctgcttctcatcacccccacacctaatacagagggctgagtcatagcatctcttccccggactgttgtagccgtctcctaactcagcttcctgccctgcttttacacacacacacacacacacacacacatggtatcttctcaccactgcagccagacttaaaacctaagagggatcatgtcactccccattttactcagagtcaaggccaagatccttactggggtctgcaggcccccacacctggccctctgactgcacccctaccttccttagctgtctcctctccctagcatgccccaggtcgctggtcccctagcactgggcagctccctgcggccctgttcactagctgtcctctgcctggaacacatctgtcacctctcacctcctcctgtccagcctccttggggcctttctaactgcctccctcctgtggtctgcctcctccccatctctgactttcctcccgagcacttactgccatccagcacccgacataacttacttgtttcgtttgcttgccttcctcaccaggaggtgtgccagatgaggacaaggatttttatatccctacccccatctgcagcactgccatggagaacagtgcctggcacttggatgccctcagtaaatatttgttgagagactaataagtgatcgtgggccagcatgccaacagtgtcttcgttattacaaaattgtcccgaattgaaatttggctactacaagcagtttgtggtggaaatttactcaaattaccaattctttcactgaagaaattacctggcatatgtgggttctcaataaactgtgttggattgcctcaaggctttggggcagtggtagccgtctgaggcctccttgccagtcaaccaaaccctgtgctgggtgggacataagagatgcccccagcatccttagctgatgctactatgtcaccccagaatccctggggcagcccacccctcagcagcagctgtcaccctgctgggttccgcttttcctcctgtgggcttcgtctccctaaggaaatcattgtccttgctttctacatcttatctccctgagcagctccaaaattctgttattcatatcccactgacctttctcattgtcctagtccaagcttctcacaggaggagttgtctctctgttttatattaaaacaaagcggttggactcttaaaactctattcacttttcagattctttggagtcctcaatgcttcctgctatgaaatgctgcgctctggaatgccttccagacccacccccaggatacctgtagccttccctgcagccactctcctcaactccctcctcgttcccaggggtcaatgtcctggatctctccagctttaagttccttcatgtcctcttgccacccctgctctcaccatctctgagttcttgtatccccaggatttcaacctgagtttgcatctcctgacatcacttttcccagccttctcccttttcaaccagcacaaggccatccacttccatggccatagtggacgccactgagcatgctaggtgttttcttctattcaactcatgtggtctgcacaacaacccagtgcggggaatccacccctttcacagatgaggcatctctagctcctggaagtcacctaacttgcctaggacatgcagctagtaagtggcagggctgggattggaacccaagaggccccgccctgaccaccatcctgccctgcctctcctcgggcacccagaatcccctcactctattgtcaaaacccaccttgtcctgcctgtctggtacctaggggagaaccctcagcctcttcttctgctgccacttgcttcctcttctgccaggaaggtcccacgcctggccagcctgctctggagacacgcccactgcctggccttgccaggaggctctgatgctctgcaggcttcctgtcccacggatcccttcctgcctgtcctggggtcccaccaccccactttgtagttggccttgctctttattgtggtgaaaggtgcaggccattccatccaagatcctataatattccttttctctgctgttgaatgttcttcccattccccccacattctcaaagaaggcatgtggctttcttcactgcgtctcggcctgccctgagtccagcccctgctgcctggcccagcctgtcttgttggcatcccctaagccctagccagaaacacaagcacctttcaggtgctccatcctaactccaccctccctcacactggcctctctccctttgccaccagataacagcagtgcattcttttgtttcctttagaacaagatgcagatgttttccagaattttcttcaacttcaggcagtaagttttttggtgaaaggagtattactccctgagtctgtagaaccaggctctctcctcttattctgtagcaattaaagacaaagacaggcaagaaaacaatgaaaagaaacaggagccaggctgatgcaccttcatttagctggtccttgagcatgactcattgatccttcttgcttccatcagggattgcaccctgtgccctctttgaatgcaggggcatgtcaaggccaagggtcaggaagagagctttggcctcgccagcctggtccccagagtggaagtggcagggcaggaggggtgtggcagacagagcacatatcgcccccagccttgcccccagatgttgagtgctgggtgccggagtgcagaggggaacaaggcctggaccctgcctggggagaggcagcacctgggagatctttgtggcttcagatcccatgtggtcctccaggtaaagcagagcatctctggggtctaggctgggggaaaactcttgcaaaaaattcctggttctgggacagaatgcatggggtctgcgtgaggggcagaggacagtgccaggccagtgagcacgcactgggcaaaggaagtggccagagaccactcataagaaaaagtgggacatgaacctcagagcctgggctgctttcagaggagccaagagcctgggaaataagcatcttctggtgaggaaatcagcagggggaggggagggtcatacaggaggggacttttaatcctgaatggccttgcagggcatggttcccctagtgtgccccatggaacccttggctgttagatgtgaggtgataaatggtgtgtggatgcatacacttgggactcagactctgctgcccttagactttcaccctccacagggctgcgtttaaaggtccaagaagccctgcagaagaaaaacctaactattgaaccagcattccctatacgtatttggcccctgattttttcccccgaataacatcattacaatcctatgggattagtgttccatggcagaactttgggaagtgttttttgaagaatttgtaaatccctgcaccctctggactgtgcccatttcttagattgcatggaggctgtgctgtacagtggaaggagtatgggctttagatgggactggcctgtgtttaaatctgctttcccattatacaaaatctctgatcttgatcaagttacttactctctcaaacttagtttccttatctgtaagacaggggatgaaacattagctagttgtcttatgaggctgttgtgatggttaatgggaagataataatgacacttacagagggcttgttatgctccagacaccattctgagcactttatatatctcacttacttttcaccacaactgtgaggcaggtaatgttatccttatcctacaggtcaggtcaggagaccaatgacacatacaggctaaatgttgtgcccaacatcacacggctggtaaatgtgggacctaagatttgaaccctaggcactcatacatgatggggtcaggatttgaaacttgaccgtcatctcccatcagagaacatgctctgaatcagtatgttctaaagggtctagagcagtaaaagcactaattggtatcagttcccttttcagatggttcgtggatatgttagggggattgatggttcctgggactccaagtcattctgcagtcattaaaatcagccctgttgaaagagtaatctcctcgatctgcttgcccactcagatgctcccattgtgaccattttgtttgctctgctgcctcatcctgggccacttcaatttgggtggctgctcagcgttcaggtggagtcgggccactttccacagccatctcatctgtggcctgtgcctccacttccaggaccaagagtccccccaggatgcccagtgagttggtagcttgttctctttctacacctcagtgatggacttgacaaagggttaagaagacatcccttttatcattcagcaaactgagtgcctttactgagctagatgcatgccctgggggaactagcactgtttggtgacttagttagacctctgaatccctctaccaaccctcagtagctgtctgggagactgggattctgtggactctcctctatcaacgatattgggggtcttttccacaaagaccagcctggttttgattgacaaagtgcctcagatttacaaatcttaccccttgcaggatcctctcaactgatcaagccccatagctccaaatgccgtctccttgattgatgtttaatttggggatccacaagcatctagagctaccagttgaatttgggtacccaagggccacaaatgggcccccctcacaccctgacccctgacaaccagcacctttgagactgaagtaccactgcatatagtgctgtcctctgctcagggcattctccctaccagccaggccacccggcaaacccctgcaacacctcataagacctcttcgctggtctcatctccttttattaacacctcctcagcacccctccacacacacccaagcccacaagcaaatcattttttcatctgttttgctcttgtaccttacctatgctccactaatacaaaaaaagcacgccttcctcaagacacttgactgccacctgctggagagttgtcatcatggctcaacaaatatctgccacttctaaacccccaggcacctctggagtagggcagtgcattgcttgtacagctgtaaacatggcctgcctgttgaattggtcatgctgtcatgtacttattaaaacactcgtctttctaactggactgaggacatcttgaacgtaaggactgccgatttctgtcttcgtccccattgtggcttctgctaggggctagagaaatgcttattgaatgatccttgtgcaaacacctgttaccttaggttcagggcatctgctgtcattcagtgaaggtcttctaaatctgtctgttgcaaagcaaggctcgccacaggctgtcagagtaaccatggaggtcggacaggacttgcagtggggacagggccccatcagcctctcacctctgctcagaggcaccaccctctgaacagatcagagcataaacaggtcagagcaattcagcattcattccctctacagacatcagggcaggcaccatgtagtggagagtggggccaggggccatctgccatggctgtttgggctggggaaggagagcagtacttctggagcatgtgctgtgctcagggccagctccctgtaggtaggttgtgggaatgcagaggtggcaactcaagcacccctgctggggattcagagttttgtggagaagtagatcagtaagcacatggataccagatagggttgtcaaggatgttgattcactgttgtccctattttcctaagctcgccacatcatggaaggctgctacccaagtgacattcttgggcttcaccaagtgttttaacagagctccacccagctgtcacactaggggtaacacagtgggccagaaggagaggcaggccttccctggggtcccattttaaaaagggggaagtcctctgttcttttacaacacttgtttaccccaagccattcagcatagtattacttaggtcccatacagagaaccttccaacagatagctctccttgctcaggcctgtcctgatgaactccctgatattcttccaggtcttaaaagagtgagagctgagcatttccctctctgccctggctgccaggaagctcagagataacttgtttgctcagttcctgtagctttcctgacccaggacttctttttcttataaattctccttgttccttttccaggaatgcttgctttttatgttttgtttgtttatgttgcttttgtctctgtattatactttggggggtggtttttggaggcaggattggcagcagccatggtagttagaagcaccagcagtaaagctggacacacctgggtttcatccccacttgctagctgtgtcattttaagtaagataagttgcctcttcagttctcggttcctcaccttgaaaattgggataatgatcataatgaatggataggttattgtgaaaattaaacttgtttattgtaaatgcattgtttcctgttcctgctcttggatcaggcttgatctgtggctgtagaatcctagtcttaatttccttcttcctgcctgtgtctgtcagcatatgatgagttgtacaatagtagtgactaggggaccaaccatcccggtttgtctgggacggaggggtttcctgggatgcaggactttcagtgctgaatgggaaggtcccaggcaaatggatgagtcggtcaccctggtaataaacaacctcaacatctcagtggcttactgtagcaaaggtttatttcttcgttgtgctactgtccatccagggccttggctaaaggaggagcctctatcccaggaaattgacagtcatgggcacagacagaggaacacatgttaaaggtcctttagaaagttgtggctgtcacttctgccctcattcactggttggggccagtcacatggccaggcctgccaccaggctgtgcagaaccttcccactgggtgggacagctcagcctggaacactgatccactctgccaggctcacctttctcttcttttgcattttagggtgctggagcagggaccagggaaaggagagagtcacttggtctgaactgggggtcttggatgtgatcatcttcctgtagatggtcggtatgggtttcttaaggggcagggttcagcttcaccctgctctgctcagaggagcagctgtgtctcctttggacgccttctagtggttgatgccctcacctttctcagctgccaaggcctctctcgacagggcaggctgggctgtgacttctcttccaccctccttgctccttcctgtggagcccctgagatcctttccccatgctcctgggtggaatggagggtgccctctcacattcttccaaggcatcttgcgcaagtccctccatgccctgctttctctggcggtccagcatgcctccatctcacctttgggactctctagcttggaagtgggcacacctgcagcccctgactccaggaccacaggctaggctctccccaaagcatcctcatcacacaccatgtggatggccaggtcagggcggccgtcagagcccaccctcggcaaggataccctctcaaaggcacctctgttggctcaaatcccttttggaagtagcccagaaagaggctttcttttttcttatcttttgttgttttatttattgttcttgcatctaagaacaccttcttggtcagaaaacagttttccagaaataatgttaagtaagtgtcacaactggtttagctccctaacctggtctaagcatataagagaggcttttgaggctgggcgtggtggctcatgcccataatcccaatactttgggaggccgagatggagggattgcttgagtccaggagtctgggcagcatagtgagaccttgtctcttctaaaaataaaaaattagctacgtatggtggcacatgcctgtagtcccagctacttgggaggctgaggtgggaagatcacttgaggccaggagttctaggttgcagtgagctatgatcacaccactgcaccctaacctgggcaacagagtgagaccctgtctcaaaaaaaataaaaaaggctttttgatttttgttttgcagaagtaccaaaatctatattagcatttattatttttatttctataaagtaaatttgagtattgggaaaattgatcaaaatgagaaatttcatatggagtttagtacttgaaatttggatccttcatctaaatttcagggaagtcagggctgggcatggtggctcacacctgtaatctcagcattttgagaggccgagatgggcggattgcttgagcccaggactttgagaccagcctgggcaacaatgcaaagcctcctctctacaaaaaatataaaaacaagccagacatggtagtggtgcatacctgtagtcccagctacatgacaaactgaggcaggaggatagtttgagcccaggagatggagattgcagtgagccgagatcatgccattgcactccagcctgggcgacagagcaagactgtctcaaaaaataattaaataagtaagtaaatttcagggaactcagagaacgagaaaggacatgaaattgttcatttatttagcatttgttgagtaccacctggagtgaggcacgagatcaggcacaggagacgcctataaataaggccctacctgcctgaagcttatgggaggtggaggagacacgcctacaagcagagaatggtcacagggcgtgaaggagcctgggcaggagctgctgcaggagagccagggagagaggatacagctctgaaggcttctccaggaggtgtgcccacgggcacaggaaaggaaagcaggagtttatcaggtgactgggtggttgaaaggagccacacctgcaagaaacgtgggcccagcagaggcagggtggttttgggaactcttgtcttttagtctgtcggggggctttgggtagcagatgggagggttgggctgaagactaagcagtgtttcctgctgggtgggtttgaactttgtttggaagacttagggggaacagtgaagctattgcagtggtctgagcaagggggtatcccgcctctgaccacagtggagaggggatggggctggagacgacagcagactgaacagaggcagtgacaaggatctggagggaagtggctgggcccatcccttagagggctgtgtgggggctgtggggtgtgggaggaagagaggaaggaagcccagggtaggttctgggttgctaatttgggggctgggaggatagcgtgtgacctaaacagagaatcagatttagatggaattacctatattaagcctggggatttcatatctatttgctgctgctttaccagttgaggctcaagaatgagaagcacaaaatttctggtcacattatttgcatgtgcccagactggggttaacagaatcggacagtgagcgttcctgaatcagactgcaatggggaatgaatgccttgggaggctggaagcagttgtattcgcagatattcatttggagatctctatagcgatcgaggcaaagataccccaaagactgcaagaattagccagtggaatttgaaatgccaaaattttttttcagaaaggtcaggaaagccccgtttaaaatctaaattttgccatctcaaggcagtgcagggatggattaggaggatgtggggtgacccttttcttcctttcagagccagtttctgccagacacaggaatcctccacatgagtcatagggtggagaggagacccctcagtcctttcagtaaggtgggagggcagtaccgcccggtggctaccatgaaccctgtttcagaatttctttcttaacttcgtgtgtgcccaggtgcacttgagattcactgatgttttctttagaccgaggagctcgcttcagcagttagtttcaggtgttggctctgctggcattatgcttcggcttaatgttttctgaagacttgttttctgttgtttttcattgttcttgttgtctggcttcaggccactaccttcaacctagcaagagctgagtggtgccttcagcagtgaggtagcttctgaaggccaccactctcttgctgtgtgactttggctagtttctccacctctctgtgcctcagtctcttctgtaaaacggagaacacaggagtatctccctcatagagttactttcaggtttcaatgagttaatctacataaaacaataaggatagagcctgacacaaaatcacactcaacaagttttcacaattatgattacttgacccagtaggagaaataaaaaacacaactaacttccttctaaggacatgcccaagaatccagttttagtaactttgaaggcattgtttttcaccgaaaatatctcctgccagattttttcatgtgtttgcagcttagctttaacaaggagctgaaggacggccaggcagcaaggggtggtgagtgccggtagagtgtgacgagctcgcccagccttcctccctgtaattaggagtcatgaaccatctacaccatctcccttagctaataagagatttttacatttacttacctcaaagtgacctgtctgggttttcttttcttgtggcccccactgtaggtttttggaagaagctgaccgcctgaaaagaaattataaaacatgaaaatcgctttgaggtgaccaagtccagaggcccctaactcctcccaagctggatctggggtgtaagaactgtgacttcaggtaacaaagtagtatcccctccctgccccctgtgaactcatgattcttggtagcttgcatggcagttcttcctttaggaagtgtagtttcttccaggaactctgaaacttggggtattctacctcatgcggttgtttggctggtcaaaaaagggagtgggggattctggaggtacttcatgtctgctgcatggcccaagggggccagggctccataaatcaccaagaccctgagggcagggctctgtactcattcctggccctgcttctgtaaatgttaatgacaaaataacaatgtcacccacccaacagggtctttaatatgattaaataatcatgaaatacttcttgaaggataaatcagagagaatagctaggaaatttccaaaaataaagagcagtaggagagtatttgttctgctagctattaaaatgtattctaaagcacagttgtaaaaacagtatagtactgtgatggaaataactagatcagaggaacagagtagagagtccagaaataggtgataaatcaataaaggtgtatttcaagttagtggcaatgggatgcatggactagcaaatggtgttagaaaaaatctcctatccattagagggaaataagaaattcctaagcttaggtagtatatcaaaataatttccaaatagcattaaattaaaaaaatcattaaaatcttagaaaaaagaatatttatattattttgggtaagaaaagacttaaaacatgtcacttttggtcccacatacaaatatcgtaaacaaagttaaaaagcaaaagggtgggaaaagtgtttacaacatcaatgatgaacaaagaattaatattcttagtatacaaatttattcgttcattcaatatttattgagcacttagtatgtactagaaagtattctgggcactaagggcacaagcagtaaataatgttcctgttctcctggtacttagaccctgatggagaggactgccagtgactatggtagattattgtaggtcacattttgataagggctaaggacaaaacattacgtaggtggctgggctagggaggcttggcagggtttgcattatgtggatattcaagggggcttcactgatggaatgacatgtgaagaaaaagggaaagtcattgaatgtcgagctgatagcacatttgctgtttttggaatgtcgagctcataggatttgctgatggattgaatgcgggttgtgaaagaaaggagtcagggtggcttctaggtttggggcctggcaaccagaaggattgacataggaatgactgagaggcttggcttggagatagagttttggttatggatgtttcagtttaacatctctcttgtatattcaagtgaggacgtcagggaggtggtcggccataaatatctgtaattcagggtgacatctaggctggagatataaatttgggaattgttgcagtgttgatagtatttgaaagaatgacactagctagagcccctggagagtgtgtgtagatacagaagagggcccaggacatccatgggaccctcccttagagttgagggagatggagccagctaaagagagcaaaaaggagtgaccactgaaatggaaggagtcccgtgagaagggggatctcccaagccaagagacagtgagaagggcgaggtcagctctcctctggatgtgctgatgggcaaggagagaactggccattggatctagcagtgaggaggtcactggtcaacccaacaagggctgttttatgggaatgatggggagagaatctgtttggagttggattattgagaataagaggaaaaaaactggagacagagaaatgggacaatagctggaggaggatggtattcaagtaagtttatttttcccaagatgggagttacataactcttgttttcacccaagtggaaatgattcagtagcgtggggagagtggatggtgcaggattgggctggggtgagggttctgaaatggtggtctcgaggaggtgggagaggtagaatccaggcatgagctggggaagggatcctaagtaggagcatctaaggaggtggtaggtgtgcacctgcctcttttctcagttcactaagaagcagagtcctcagcggagaatggagactaaggagacgatggaagtttgaggagagagggcaaagtatgaagtccttcatagcagaatgagaaaataaatggccaggggaatgaaggattgctgggcggcatgcaggcctctaaggggtatgtttctccagccatgtcctgttacacaggtgaacacggggtaggaggccattgtggtagaaaaacaggacatgagcagacacaacgtaagacagagaaacgcctgtaaagagaaaaagcaacatcagtaatagctgaagaatacaagtaaaaacaatgaggttttctttttttctctttagactggcaagagctcttgttggggatagaaattattgtcgcttttctggagcacagtgttacagtatgttccagaatacaacgtgtgtcccgttttgacctgtcagtcccacctttagaaatttattctaagaaataattgctcaaatgcaaggaaatatatgcacaaagatgttcaccccagcagtgcttatcaaagtgaaaaaatggcagtcatctaaacaggaggcagctggttcacttatctgtcggcctaacagtgatagtgggaaacagtagctcacactcaccctcctgttttgcagatgagggaagttgggtccagagaggggtagtgacagctccagtcctactccacggagctcagaccccctggctgtaggcaggcaccctgcccaacctcttcaactgggcttggagtcagagtcccttgcaaggcacttgtcaagcccttttcaagggccggtttgcttaatgcttttaaaatacgagttctcaaaatgttttgcaaatttgtttacaatgtcttcatttcatctcatggctttccttgcaaaggatgctgacagtggggggaaaacaggccgactgcctggccgtgatagaggggaccatattttcctgattcccaagtaagacttacagtggaagaaaggatattttctgctttcttacagtgtttacaaaagtcataacaggatgtgaggactatctggctgcaacatctgtcaccccattggtcgccagagttgattgggctgatctggctggttaggcaggtgtcccattcctccctcaccactccatgtgcgtccctcccaaagctgtatgctcagaaaggatgaccatccccgatagaggaggactggtctttggtcaagggtatatgagtagctgcaatcttctgctagggacccccaaacaagctctcaaaagtcataacaggagtacaaagataataaggaacttgcatttatttgtttccttgatcatatgtttattgattagaagaaaataaaattagcagccagccgtggtggctcacacttgaaatctcagcactttgggaggctgagacgggcagatctcttgaggtccagagttcaagaccagcctggccaacatggtgaaaccccatctctactaaaaatacaaatattagccaggtgtggtggtgtatgcctttagtcccagcttcccagcgttttggatggctgaggcacgagagtcacttgaacctgggaggtggaggtggtagtgagctgagattgcaccactgcactccagcctgggtgacagagtgagactttgtctcaaaacaaataaaaaataaaaataaaataaaattagctttgtgtgtggagaaaagggaggaaaaataattagcattgtcagagaacatctgggttatttggtcccctccgtgggaactgccctgggttttcacttctagagtttctggttctggtttaatttttccacgccacagcacagggaccgagaagctgctcagcttctctaggcttttatgtcttcaccagaaaaatgagcgggtgggcttaaatttcctacaaaaactcttaaaataaatatgatgctctttccattctatcacatgcctgttctgggtccgggggtgtgagagatgcattagtgctgctgtaaaccagccccgggtctccccccccggccccccaccaccaaacccccaagcaccaacctgggttctccaccacttttgagagctcatcgaaataaacacacctttgtgcctcttgtaacaattccagatcatccaatggcagaccagagaatggacatttcttcaaccatcagtgatttcatgtccccgggccccaccgacctgctttccagctctcttggtaccagtggtgtggattgcaaccgcaaacggaaaggcagctccactgactaccagtaaggcctttggggcatgtcttcctcttgttaaacttggtgtcagttctcgggcatggaacatctagcagccagctactgtttcatcctggaaaaggggatgggaataaaaaacccaactctaggtggcgacacagttggtttttggctttaccttcccctagtttgtaagcaagaaggagccttcagcagtgctgaggcatttaacttccacttcctgtccccaaaatgttctacacccagagaaaaagaacagccttaaggccaagttctgtcttttacccctttcttcgtcttctttctttgctcctttgagcaagagggttaagtctatgggtgtcatctcagggggttcaaagagagctttgcctgagggcctctctgaggaagacagcaagtgtcaggtgcttaatgaatgtttatggaaggaatgagtggaggtcctctctgaaaacaatttaggaacattgatgttgtccttaaacattatttaaattagtatgaacttgttatattaaatagtatttttgtttatttttagacttgttgacttttcgtttgagtaagtaaattttcacacttacagtcatcccttctatatatgtacaaacacctagggaataaggcagtgtagaatattcaaaggcacattttgttttgccgaagcacctgcgtggaatcttacccaaatgtccatttaagaggttttcttttgtttaatgagggaaaatctccgaggaggtataccccctacagcagatgtcctttctgctgaagttcacaggtcgaatttggggagcacaatggctggaggtcagatgcccactaggagatgctatgattaatatgtaagttatcccagatgattaagacagccaacacccaggggctggagagtgggtatgagggctgtgagggcgttcttccatagcagtaactccccagcagaaagactgcgagatgttggccacaaaccctttgtcttgagcaagcgctaagggagccactgatgtgttctaaggcctctgtcatctggacctgtgggttccagcctggtcaccacccaagatttcccttgtggactctggtttgctaatcttctgtaattcatggagactcaattaattaagcaaccttaatccctttcactatcattttaatgtaactgaagtcatctgtgactgtcaggcagagctttttctcacctgagattatcacctggcctcaaggaacagatagaattctagacaaaagggagaggggagtttttgtccttccgtgcggcctgcgtgatctctgaactttagaactagctggggaaactctctgcctgtgaggaaccccagggcgtctaattgggaacactgttctagaatgcccatgatatgatccagtgctcctagaaacagctatttttgcccttgggattacattgtttgaagggccatgctctctcctttcctgtgggataaaggaaaaaggagagaggcccagctggcagtccatgccctcctgataaatgtatggattggagaaggcggtgagggggatttggaactccttcctctggggatttcagtctgttttcttctactgaaccacaggatgcaacgaaacttggttttctgaagtctgtgaaagggagggagatccttgctgtgaccccaggacttctgtggccctcagccccactacgcccctccatcccaattcctaaaatctaggggttcccacctacctgagaagcagaatatttggcagtagtgcctttgaaaagctgcctggggctctgctcagtactttgttggtactttaattccaccctcctcacttcgtcccttccctgccaaatagatatgtatgcacatttatctttgatgctcaatatgttttgcaaacagaataagcttcatttatccagaatgatggggggggagaatgagaggttatatagatatttcaatcctatggttaactaagcatttttataaacactacatattcccaattttcaaacaatcagaatatggtaaaatatatgttaacacacaaactcttttgagatgataacttttgtttgataacctgagaagctggtccaggttttatagtaagttcaagttaattttcatttgttttacccttattatacatcattaattgatactgtggctgttcgaactttatgattgtttggtttctggataaatgagagccttctgtcttatgataagaagctcttctgtatgtctttattaacatgcagtcacattctcttttgttttttcagagaaagcatggacacagacaaagatgaccctcatggaaggtaccatgaacctagtaatttgaacttcagcatccttatagccattttctttgcactgttacacattctgttacttggggcagcacccatgtcctcaactggagatgagcaaggaggccgtgagcctgtgggcgctcactgtgtccctccaacccccagtccccttgtgtgtctgcagagagatgacaggatcaggcagaagaaaacagcaatgtgtaactttgccattcatctccagagaattatgtttttatcttttgctttttcctccccccaggttagaatatacagaacaccaaggaaggataaaaaatgcaaggtaagcttggaccttattttgtctacaaagcatcctagttctggttgcttagagagcagctgaggaggctctgcatgtttggtcctgtctaagagttctgttgggcactgtcacctccttagggaataggcaggtagtgggccttggccgaggtggccttctgccctccatgctctccatactggctggcctttactctttgctgtctaagcacctttaacctgaagtggatttgaaggtagcagaaatcaatcaaggctcaagtttttccccagtcttcagcagagaacgtcttcctgactggagcgccctccgcaggagacatggctcagtgatttggttcctgggctgggacttgcctctgtcaggggcccctattgcactgcgagttgcaactgaatgcaccacatggggcatgctcggtgtctcgagtagattctctgcctgggtctgtcctgcctccagccacacttgctgacctcttcccattgcgtcctcagttcttctgccgttagtaccaggctgtgttctgaggctgcgtcatgacagactgatacagggggctgcagaaattggctgccctaaggcttcaagctcttccctcggaggccagccttagcaggagctcccatggctctgtatctgcggcagctgcagcaaactacatttccatcgttgctgcacctccttaggaggaccatcaccaatggcaggtgcacatcagtcagtgtcaccctgcctcagcgggaggagtgtgacattcctcagaggaggctcctggggacagatgtagcatctgctgcacctaggtggggacctagttttgatccaaggatgacggcgttggttactgggtgccctagtcagtgaggctgtgactggaaagaattggtgccctgcccaggtcacatggccacacagcgggctcctcacagacctcagggacagcccacggggctctggatgctctgtgctatgaagccaccacctcccttctctttcctttcacccccatttcaaaatccaatttgacaaaggctgagaggaaaagaaacgaggagaaatgaacaattcagtttactctgaagagacaatttttgtagcttttctcctgaattctaaagatgaggtaaacataaaaaaattaatactgacctggcagtgagaccattttcttggagactttagttgaaaagtctaattttaaacattctgcaaattctaaatttgccttgtcagatgaacattgaaaacagttacaactcatttatttttgtcatcttttcttgatgcttggttacattttataagaaatcgtttttcatattgttgttcagggaagctcacagtcagattgaaaagcggcgtcgggataaaatgaacagttttatagatgaattggcttctttggtaccaacatgcaacgcaatgtccaggaaattagataaacttactgtgctaaggatggctgttcagcacatgaaaacattaagaggtgagaccctgggctctattgtcctttatgtccttgcccacaaatgttaccacccttgcctagaatgttcctatccctaaggcagatgtttattacttgcaattatgtagccttcagtagtatgcctttactcttcagcaacagccgtgatgccaaatgaagtgattattgagcttatgtgggttttgacatgcaattttgcagtcacacattctcagagcatagaaactgtgctttgcacgtctctgtatatgcatgtaatcaggctatgtgcctatcagagatgatactgctctgatgtctcacatcttgcctatgtttgtgcctggatcccatccttacaattataacacgcagaaatgtaggtgcacacagtgacacagaaaagtcagttcaaagatgaaaattcatcatggttcctttgaaaagtgagtcatgggttgtgggttctcgcgacattttgttgtcaggaatgaacactgaagatattttcatcttcctggaattttcccgaaccagatccactctttgtgagggaggcagtattttccttcttttctgagtgtggggagggtgagaaaacataggcagaaaagtggaagtgacttatccaaaccacaagagaaatctgaaatatatcaggcattttagtgaatgctgttcctggaattttccatagctagtcttggacttttggaggaaattggaaagtgggcgctcagtcagatctctgacctgcgtggtagaagaattgcgtctttttatatttgcacaaggccaccagaaataagaagtagctggttttgtctgactttagatcattacccaaaaatataaatgttgtatcctgtgctggaagaatggcatttaaaaattcatattagcaaagataacatgggttaaattattataaactaatttctattaaattggaaaaaagtggcaaatctcaagttacagtaaagagcagggatagggatcaataggatggttgcaacacgtcctgtctccttccctccccatggtactttgaattgttacagatccatttccttttattccttcactattctactcgctattctacagactccaaatcatttactgctggcatttttctctgttaagtgattgttctcctgaaaaatgccagattgacagccttttaaacctaagtcttgtcccctttcagtcctgggagtgcgagctgcattgactgaagcaatgcattcctccacattgccacgctcgtttaactcacccctgatgaagagtaactcacattaaatgccttccacaatatatttactcagggcctggaagactgaatggtttcccaagaacatttagagtggtgatttgaaggactaccagacaacccatttaatacagatcttaggaggagggaactctctgaggagcctctaccagtttacttccagagctgccttctttcttagaagcagattgttaaacttccttctattatctcttggttttccctgtaatgagaaaaacaggcttgttaggtctcctgtgggtaacagtgttctctcttccatggaattctctttggcttacaggattctgtccaaagccagatctaggctcatctcagttaaggcctaaacaataaaatttaaataccaggtcatagagactaggccacttacagaaggtttgaggcagcaagttagaatgagacattttctgaatatcaagtataccaattctttctctttttgcccctaaggtgccaccaatccatacacagaagcaaactacaaaccaacttttctatcagacgatgaattgaaacacctcattctcagggtatgttcaattatgggattgttttacaacgtttgtttttataaattttcaagtaagtaccagcatgtgggaatttgatgtttcaacactgagcttttttttttaggcctgcttcctctctcaggtccctccctttatcttattgtttggacaggcttcacatttcttccacaaaaccattctcctcctcttttaacctcgtctagacaaaaatggaaggtctatgccaccgcaatttaaaatcagaagagtcaggatttgttaaaaataagggggatttgagaatcacatttctgcatgaagattttaggaagggactgaaaccaacaacaattgagaatttctcttcacctgatttaaccactagcacaaaaaagtccacctaaatctttacaccaaaatctcatcaaaataacaaaactgtggctcacgcctataatcccagcactttgagaggccaagacgggcagatcacctgaggtcgagtttgagaccagcatggccaacatgttgaaaccctgtctctattaaatatataaaaattagctgggtgtggtggcagatgccttcttgggaggctgagacatgagaattgcttgaacctgggaggtggaggttgcagtaagctgagatcactccactgcactccagcttgggcaacagagtgagactctgtctcaaaaaacaaacaaacttacaaagactagtggtccaaaaaagaaaaataaatgcaagagatatatgctttcacctgcttgacttgagtgctctctctgtcttgctaaatctctgctgggagatggttgaggtggcactatgggaacctgttgtcttccatgaagaattaggtcggcacaaagctctaagttgtgttactaggtaaagtgagattaacttgggaattgaagggaaagaaactggattcagaaacgtgttcttgtagattgtaaacagatgaatagaaaaacgtaactaaaaggaaggatacccgcttccacctcccacaaagtcagggctgaccttacctgcacagccaacagaatcttcctacccatctttgagcagaagtttgcaaagctctagagtagagggtagtccatctggaattttgcatcatcactatccattttcagctctctataagcctggcctgtctgctcactccagcattctctatttatctcctcatgacgtgctatctcaaattggaaagcattcacctgcaaggaccagaagacctgatgaataaatagagtttaatttctcaagtataactggtctggagtaggttatgttgggttgctgcagtggttcaatgaggtcaataggaaccaggttctttgtctttgcactcagccacaccaagctagcatgctagcttgtttccttaatgtagccaggtacctttgccaggtctaagtagccagacccactgtaaaaacaggggtaaatgaagctctagtctggctgtcctttttatcaagaaaggatacaccttcctgaaaactcaacagtggacttcagcttattcaaaagtgtgtcacttggtcacgcctagctgcagggcagggtgcagaaacaagtgtttatagattttccagcctccctggtggagacaggcaagagagaaggggcctgggaatggtgttgggaattggcttccccaacagtgtttgccacacacactttccagagccacatgcatttgctcgattccttccagaagtgactcccacaacccaatatagtgcttcaactgtggtctgattggcctgaggttgaatgggactagtgccttccttgccaaaaaagccatctgattagtactgtatcatttggggcagctgcagtactgcctcctcccccttctctcctgaatatgaattattgttaggtcaggttttttacatcttgtataggtgcttttttgaacttaagataggacttctctttcatttctgtcaaaacctgtttgttgaatggccccacagtccagcttgtcattagtgacccttggaatctttgtgtgacttgtagatccaatacatgcctctgtgcctttcatccttgtttattcataaattcaacaaacatttttgtttacttactagatgcatggcattgttctaggaacatccaaatcaatgataaacactttagggtgggaccaggctcccgatcaagtgagtgatagtcttttggctaccactctcaggacacagttattcaaacacccaactttgcccacctctccatccttttcgtaaagatgtccgtgttctcagagaggatttgctgaggttaaaatatgaccgatgcctgtagcatctcgagagctgccgtcggtgccagcttcatgggcatgtgacctctgcagtttcacaaggccccatgcttggtttaatgccctgtcaccatcttgaaaacgtaatttttgaacaaggatccctgcattttcattttgtactgggccccacaaattatgtaactggtcctgattcccatactggtaacagatctgcagctgtagatgtgataggcctgcctctatgcctttcattcttgcgtattcatgaattcaacaaacccttttgtgtacttactagaggcttggcattgttctaggaacatccaaatcaatgacattttgggctggggtacaggcttgattattttaagaaaaagaatctatgtctttatttcatatatatatatatatatatatatatatatatatatatatgtaaaataattatcaagcagagtcctgtggatggacaaatttaaaaataaataaaacaagctccttttgcagtggcacgtgcttaatcgttttcttgttgctgcttttcttaataattttctatcagatacccatacttaccagggtatggaacaaggattatcatgctatctcagctaaatacttcatgttgggcttgtctcttctactcccttgtttatgcagcactcaagagtgatctctcttgcccgatgaaggttttgtcacctctctagcacgtgtcagtggctgtgaaatactgtccagtcccttatcacttccagggtcccagttccagggacttgcttccacagaaagccaggtctactcagatgatgttcagacagtttggccgcaggagctggacttctgcttttcctcagcaatgcaaaatggacaaactgctttctttactaagtgctttcaaaatatctttaataaagtgtatgtcagggatcagtcaactgtatcagtttacaatgtctacgttagtctacttccccatgttttgaaaactaggcagaccgtaccaaggcctctgtgtcttttattaaccagcaccatcttcccaagagtgaccctgccactggctggcccctgtggctctgtggtgctggtagtgttctcacagcttctgctccttagctgtccttcgggcccggctccttcacagatggtctgctggccagggtgctatggagttggaatgtccagagcctcccctcgctgatgcattcactgctttggaacctgctggctttcctctggagtactgaaatagctttacctgtgttgtcggttcaggcctgaccctgcccagcattacctccagggtgtcacagttcccttctgtccaggtacctttcaagccacattgccacatcaatgaaaagcctcaaaaacacttccatgagatacaagattatctgcaaggcaaacgaggaagtttttaataccctatttgttgacagaatgaggcttccagcagatggtgcttggaaagttacttccccctcactgtcatcccttgcccctgggccagcttagggacctaacttaggaaaggatcctccccagcttccttctggctgagtagcctgccagggtcttaagcaacagtgattctgttcccctctcactcatttcttctgtcccagcacaagtacatgcaccattcttttaccttctggcacattaattcatttcctagttctttgaattaaaccacatcatgaaggcccttttgtggaaaaagagaacagtttctctgtatttttccaaagagcagattaaggaccagtgaataaggtgagaaactagtccactgtgtattagaacgagggagggctgagtcataagagcaagggcatgacagagtggggcacaccctccttgtcaccggaagaccccagcaggagttgagtggttgtatgtctggaaggcagtgggtgggattcacacagcccaagctctcaggcactatagcttgggtatttacctgcttcagtctctttaccaaatgttgtcctatcttaatggctggctttattggaacatttagattttttcctgtatttaaactgaagaaggggtaagaagaatctaagcggggagttttgcttttctgaatgcaaatagtccggccctggatggagggataacatttgagagtagtagttctcagccctatgtacattagaatcacattaacgtggaagtgggatgggtttaaaaataccccagtgatcagccccatgccagaccatcagcataaaaacaaaaacaaaaaacactgctccgaatgttgagaaccactgttttagagagctccctgtacgtggaggttttcaagttgaaggcagatgatggctgagatgttggagaggggattcttgaagagtccttccaaatctcagattctctgactctccatagagttgttattattagagcaatgaaatatgattctctggaccatgataccttcaaaagaacacgtgcaagctgaattctgctttgaaatataacttactttaattggactttcttcctataataattagatgatatgcagaaacacacacacacacacacacacacacacacacacacacaatcttacagttcttcagagacgtttgttttcagcatcctgcactcaggatatcactgaaactgttagtgttcctgtgctttggatgcttagaaagcacatcctctatttgttatcagggtgattacaaattatgtttcctacagtatgagaaattgattatccatttctcctgattaggcagcagatggatttttgtttgtcgtaggatgtgaccgagggaagatactctttgtctcagagtctgtcttcaagatcctcaactacagccaggtattgttcatgctcctgttgatggtgggcagcctcacagcagtcagaagtgtcactcaattttgtcagaataattatagtatacaagtcacatgtgaacttcttccagaaaattcttaacttcttaacagataaattaatttagacttagaacaatcttgtaatatgttccgtattccccccattgaaagatctgactctgatctgatcgatagcattatggctttcttctattgctgcaaaataaatatcccacaatatgtggcaaggacagagggtaagaggctatctgacaagggagaaaggtaggcaggttaacacaataccagagaatacgtcacttggaaatccactccatactgtgtttgcagtgctgtgtcacttcttagctctattgaacctcagtttactctaaaaattaatgataacttataggatcaaataagagtaacatttataaacgcttctagaacagaacttttcacctattatgtcccccagagtttttattcatttattcattcactcacacactggtatttgcatggaagcttggtaggcagaagacttgaagaatcaaaatgacatttatgtaaattagaattaatgtaaatttaatttttccaaagatttctgctctttttagtctcagagcaaagttatggaggaagttgctgttatctctgttaatagacaaggtgactgaagcatatgatatgcgtgacttgcttgagaacagagaggctgaacagcagagctggaatcagagcccacccctatcttctgccttctgaggtcttacaggggaattccaagattgttgccttagaagagcataaactgtttatataattgagggttttcccgtcatgttatcaaaaccaacctccagatgcctccttcctggtgtcaggcaaagtggttggacatatgtacaggttcacataggaaaagtttgaggtctcatgcacaaaaacacaaaggcaacatgcagactgtgcatgcttacttgttgcataattgattttctgcatgcaattgacttgtcatgtttaacatttcatctccccagaatgatctgattggtcagagtttgtttgactacctgcatcctaaagatattgccaaagtcaaggagcagctctcctcctctgacaccgcaccccgggagcggctcatagatgcaaaaagtgagtaccagagaggcctcgcatttcctcagcagcccactcacaggcagccaaccctgagtgagcagagggcgggtgtgtgtgatgggctcagcctttccagtcctacttctctgtcctctttctggggcaccagagctatctttggctaaatggaattatttatgttctttggtcttttacataaaaagaagaaaaaaatctcaatgtccaaatttattgaaaagaagagctatttagactggattctttctgatttttagacttttcttttttctttcagaatctagaaaatcccagttgtatgctcctgagtttaaagggctaagtttgatttgttctcccagaacaaatgggctctatttacctgaattgcacacaggcagcctcataaaagtaagaaaacgtcaactataaatatggtgtttcttcaaccaaagtgttcctccttaggttggctcccccacctggctttcttcttttgcagtagtggaaccaccatccacatcgctccctctgcccccagcttcctgctactgcacacacttctgtgcaaggccccagtagctgtcatctactttagtcctgtgggaggctgtacactcctacagttaagaatgagagaatgaggactctggctgggcgcagtggctcacatctgtaatcccagcacttcgggaggctgaggcaggtggatctcttgaggtcaggggtttgcaaccaacctggccaacatggcaaaaccccgtctctactaataatacaaaaattagacaggtgtggtggtgcgtgcctgtaatccaagctacttgggaggctgaggcaggagagtttcttgaatccaggaggtgggggttgcagtaagctgagattgtaccactgactgcactccagcctgggtaacagagcaagactctgtctcagaaaaaaaaaaaaaaaaaaaaagaatgagaacacaagggagattactgggctcattccggctccaccattcactagctgtgtgaccttgagcaagttacttaacctctctctgtctcagttttctcatttatggaagagtacctatttctttgggttgttgtgaggattgaaagtgttaatgtatataaagcaggcagaacagttcctagcacatagtaagaacagtatcagtgtggcctaatgtcttgctcccaagctgtccacgttaatccctggaaaaaaataccaccagataatctccttcaagtcatctctttcattacagcacaccgcttgttcctaaaagtaaaatgcagactttggtatctgttgttctttatagtctagccttggcttttttaagtgaccttaggagaaaaatatgaatggcatttgggccttgcctttgaggctcttagcatatagtcagagaaatgagacagacagcaccctgcatagtaataggtacagccatagaaatagtgccaggcatagagaacggatgattaattctcatgtgggcgcaaggacaggcatcactgagtagatgacaaccgaggtgggtttgaaaagatgaattaatgtttgccaggtaatgaagggaggaacaaagaggaaacaatctgtgcacaggtgcaggggtgtggagccacatggcttgcttggtgctattggacaaaacgtgcacggaggggaagggctgaaccatgaagaccatttgttctgtggggacacagtgaagagctctgagttgggtggggcaggctcggattggcattctaggggagatcgcagagctggcaatgtgggaggtagatgggatgggaggaagcccagaaggagccctgggcagtggccattcctcggcacacttgctcgtgtgatggccatgggtgtgttttccctcggcttctgtactgacacctagccagtgtttggtaaggaggtgtgctcctcagaatcacctgggagcttttcaacatagtcatgctccacccccagagattctaatttggtttttccagacagcacagtccaataaaaacataatgcaaaccacaaacatgagccacatatataatttcatattttctggtagccagactttaaaaaataaaaataaatgtaaaattaactccaaaatatttcagcatgtaataattataaacaactaataagttcgttcacattcttttatttttctatactgtctttgaaatcctgtgtgtatttaacacttacagcacatttcaattcagaaaagccacatttcaagtgctcagtacctgcatgcagctagtggctaatgcattggacagcacagatctagaatggggtccaggaatctgtaggttgatcatgcatccagggtattctggcctacaagccaggttgagaacttaaggcagtccggctcccaccttgccttcccaatatccatatcctacccatccttcagtgccagcccaagttccttctcctctgggaagcacaggttgtctttgccatttatttggcactaatcatacatcaccctgtcctattattaatcttttcttggtgcacctccatttgccctttgttagccataagcgtctattgggcaagaaccccatactatatttcttttcatccccagagtacctaatccatttatttagtagcacactctgtgatttataaacatttccagactgacaacacacctgtccatgctgcatctgttaaagcctaaacttgggagatatttatctcatgtcatcattataaaacagtgaggcaggcaagaaaaggctttgctcaaggtcacactccccctcctgacagacaacactgctctcagtttatcacattttgtgtattgatttgcagctggacttccagttaaaacagatataacccctgggccatctcgattatgttctggagcacgacgttctttcttctgtaggatgaagtgtaacaggccttcagtaaaggttgaagacaaggacttcccctctacctgctcaaagaaaaaaggtaacaatttaacagtccattaaaaccctgtgacaggtgaagcatgctttctgcagcggagctctcagctgggcgttggttccatggtttctggctggccagagtggcaggtcccaggactgcagacaggaccctgcagtcctccctatgtgtagggcagttgggagcagaggagagagctgaaaagcctgatggcagagatttgtggagaggcctcctctgtttaaattgtgtttcttttaacatgattgaggaagaatactctcagccacaatcctaactgccttatgaacagccaccagtccaccaaaattactctgagctcaccagtgaccttgatgttgttaaatgcgatgaacatttttcctttgtcttccttcttgaagtgttctcttctcctggattccatgaaaccacattcttcttcctcctccccgaccccctgctgctacaggctctcttgctggcccctttgctggctgcccctctctgtcctgggctgcatctctgtctgcagtctctctctgttggtcatgtcatctactccctcagctttaaatgccaacaacttccacattcatatttccagcctagacttgtcttttgaactccagattcataaatatactgcttactaaatcaacctgctttggatatctcaggggagtctccaacaggatacgtgccgaagtaatcacctgagcctctcctccagcataaatggcactgccattcagctggctgctcatgctagaagccggggaggtgccctcacttctgcttcaccaccccactcttcaatcccgttagttatgaagtcctgccacaatgagtcccatctgcaaaagttctctgaaatgtttgtccctttccatgctgcctactttcactcagctccaggctgcccccaactctcaccaggtctcataaagtgtagacccacatgctccccacccccaacacagcagccaggatgatctttttatcagtccccttttaaaaacccttcagtgttccctattgttcttgaagaaaagctcaaaatatttaacgtgaccatgcagcccccgaccctgccactaagcacatgtgagccatgttgacttcctttgatgcctcaagccccttctgggcaatgcttctgcacatgctgtcgcttcctggttggaatttcttccctctccccatgaactcccttcacatggctctctccaacctcagactgccttatgtcttatagcaccctactggtttgctttctagtgctttcttatacttgctgttatatagttatttgtgcgattatttgtttaaagtctgtctcccccactaggctgtaaactccacaagggcatgtctgatttgtttttcactctattccagtaaccagcacagactccacgcttggcagacactccatagtggtttgcttgttggtgaagtctataggtgctccacatttaatgtgtcccaaatcgaactatcttttttctctctctctcttctagtctgttttctttcttctctgagtcagtgaatgacaccagcaaccacccaatccagaaaagttagagtcatcttcatttgtttctttcccttaagcctgatattcacagcaaatcccaacagtttgatctcagaaatttctcctgctttctttctctgctccctctcatcttcactgcactgccatagttcagtcctcctaatctcttgctgtattatagccactggcccctgaatcagccttcctacttctgttttctactgtcttccagttcatacgtcactctgctcctacagcatccaaaccacaatttgattttgctgtttctgcacttaaatacctgtagatgctctccatttcctgccttaaaaagacagaccaacattggttagaaagtaatccaaggcccttttaatcttcctccaacctgcctttccaatttgcccctcactcccagtacctccaatttcacttcaaccacacagagctcttggccagttcctatataggctgtgcctctgtgcctgtgtacgtcatcagcctttatacattctagtccctcagccactgctcatccttcttgatccacctcctctactggttttttgggggagccttcctctccctaggaagagttagatattccttccttggtgtatgtaatgaatgtccatggtataactggccctacttaagcattctgacactggatgacagtttgtttctctttccgtctgcccctttcattagatgcttacttctggagagtgaagccttgatttttttttattttttgactccctacctacatcccatcccaccatcggccgtgtacacctccatggcccaaacctagtgctgacactaaccacgaactttgctttctagcagatcgaaaaagcttctgcacaatccacagcacaggctatttgaaaagctggccacccacaaagatggggctggatgaagacaacgaaccagacaatgaggggtgtaacctcagctgcctcgtcgcaattggacgactgcattctcatgtagttccacaaccagtgaacggggaaatcagggtgaaatctatggaatatgtttctcggcacgcgatagatggaaagtttgtttttgtagaccagaggtaagagtctacatactacccttgagcaatgatggtagaggattttcaaccctgatctaaaaagcagagaagactgggccatcagctggcttttctaagaatgaagaaagaaagaaaaagctgggtgcagtggctcacacctcaaatcccagcactttttgaggccaaggtgggtggatcacttgagcccaggagtttgagactagcctgggcaacgtggcaaaaccctgtctcaactaaaaatacaaaaattagccaggcatggtgacacatacctgtagtcccatctactctggaggctgaagcaggaggatcagctgagcctcgggaggtcaaggctgcagtgagctgtgattgcaccactgcacttccgcctgggcaacagagtgagaccctgtttcaaaaaaaaagagacaaatgatgagagtctctgttaaaaaatgagattcaataggatatcatcataaatacagagatttttctgtcattctttggcatatagagacaattaagtggggtgccttgatgtccatggctaaaagaaaaacagtagggatagcatgctgtctgaatctatggaatgttccagaaccattattgtgattgaaattcttttgaatctaggacttggaagcaattatttagtcctgagctgtccaataaaatactcgttggccatggtagcctcccatgtggctaacggcacagacatagaacatttccatcatcacagaaagtcttgttggacagcgttgatctaatccaacctccttattttatggatgaagaacagaggccagcctggggactggtctcctgtaggattcacaattaattggtaatagacctggaccaaggacccaggtgtcccaaatttactgctgcctactgctttccctcagaatatgcacaggctaataatttttctggctactagagacagccacaacatgctggaaaaagagacagcctcagctgtcttgtggcctcagctgctgcagcttctggcatttggttgtcctgataaaaaggaggcagcaaaaactagaagccttgcactgaggtttagatttataccacattttaatctaattaatgtggttccttttttaaagacagatctcagtctgtcacccaggctagatctagtgcagtggcgagatcttggcttactgtagccttgacctcccgggctcaagcagtcctcccacctcagcctcccaggtagctgtgaccataggcatgtgccaccatacccagctcattgttctgtgtttttggtaaagacagggtttcaccatgttgcccaagctaatcttgaattcctgagctcagacaatctgcccaactcggcctcccaaagtgctgggatgacaggcatgaaccaccatgcccgactggttgcaatttttaaagccccctcagatttgatttcttgtgataatagtccctttacaaaggctttgctctgtttccctctatttttatagccttgattaaattcagatgcctgaaaaaaagagagaaagatccacacagtgagccctctgaaaatccatccagctcttttgcctgcagctttgaccttgctctcataggctgtagcagggtttatccattgcaaagttgcaattaatcatctgaatggctttttcttctttaaatattcctttattcccttttagggcaacagctattttggcatatttaccacaagaacttctaggcacatcgtgttatgaatattttcaccaagatgacataggacatcttgcagaatgtcataggcaaggtaagctaggatgtatgaaagatcttaagttgaaagtgtccccttgcttctagactagtcaacatgaccttccagggaaatctgtccactgaggatgtagagtcagccagcctaggactcttcaggtcagaacatctgtgtgaagaggaagctgatacctgcaggcactgtttatcccccttgtagttgccctgtgctgactgcatggcagtttctgaaagacatctcttgttcagagggttttcccagaccctgtaaagatttagtatggcccagactgatctgattctcttttccattcaagcctgcactacctcctgtgttttctgtcttgactaatgctgtggcttcatgtgcaggctcctgagagagaccaacattgaccccttctttcactgtgtctccaccagatcctgttcattcacctcagacatgcatttccaaaagtctactttttaccacctctgccatcaccctggttcaggccctcgtgcctacttagagacctgtgatagacttctcagggtttctctgatccctctcacccccagttcatcttccatagttatcctatttatccccagatagattgagcctggtaacatcagcctgcttaaaaacctcctgctttagactcaagcccaaatgcttttgacaggcaatcaaatgtgagaccttccaccttctggccccagcccacctcctcagtttcagtccccatccctgcctgcagaggcctgtgctccaggcacactgacctcactggcctctccccaaccagaccctgctgctcctcaggcactgctgggttcttccctccctccttctcttggcaaactcgtgttcatccctcaaggctctgatctcttctccctgtatagccttccctcactactcttcttgagggcaggagtcatagcctgtctcctcttgtatctccagtgcctggcacatgagaagggctcattacatgttacatgaaagaatgaggttgaataggtgagtagcctctgttgatttggatgttcttagaaatgagataagttctatattgcccttgggctttgtgattgagataaagcatgacattttggacagtgccttctcatttgctggtggtcatgttagagctgattccagttagatgtataacatgcagtcagtaattccctagagcctcaattttacagactatggaaaatcatgacagcttcacaaatgaattgaaaggctctgagttagaccctcagaaacaacctatttcctgagtgttgaccactgcagtttccttggcttactaaagagcgatgtcgttggagctcaagtacctttaatattttgtattggatgtcctgtttaatactttggtctgagaaaacaacaatgtccatgttttctttacattttcagttttacagacgagagaaaaaattacaactaattgctataaatttaaaatcaaagatggttcttttatcacactacggagtcgatggttcagtttcatgaacccttggaccaaggaagtagaatatattgtctcaactaacactgttgttttgtaagtacttttcctatatctgaagctccccttgcttcaaacagatgcctagggttcctcatctgggaaatggggtgcaggcaacatccagtatcacatcctttaatgccatcttgctaatacctgtgaagcctcaggactggcagaagctagaaaggattgttaacaaagggacaagcttcaggacttgtaccatgcaggccctggcttatgaaactgctccaggaaatagcaacatttccttccagataaagcagctaacctttgaattccacaggccctgcaccctaggcatccacttgtgctgctgtggaggaaggggttggcaatctatgaaaggctcattcaggcactagctcacactggccttggctgaggatggggaggtctccatacctgtcaggcagggggcccaagcactggcagctggaatgccatctcaaaaggctgctacctgctagatgagcagagggaggtgaaggagcctctctttggccaggcctgctccccacttttccttccccatagtgtccaaaaccccacctatggtaagagctgtgtgaggggccggggctaggtgcactgcaggctggcaggaggaggtgctgtaatgatggcagtaggttactgcagccaccacctctgctgaactgtgtcccacacatattaggaaggcctaggcaggcagtggggccaaaggccaggatgctatccattatattatcaaacagtgagacctgtttacccactcagacagacacttcattttctggcctgtccaggtccagagtggacaccggacaccttggccaagttgaatggtgcacagttctgagcaggcctgactcacgtttccttattgctgggatgttcacagagccaacgtcctggaaggcggggacccaaccttcccacagctcacagcatccccccacagcatggacagcatgctgccctctggagaaggtaactatgtgctgctggggccctggggcttgcccgtgggaaggtgcttgtggtcaaatatcctcccctaaagtattcagggtcccctccattcatattctgtggaacaagggaggcctcgaggggatgatgtgcggatttccccatgaatgcagaggacactgtcatgtcactttctctgttgagccggaatactaggagctcactgctgcacttcccaaagctgctggcccctggaagcccttgagctcgcaaactccctactccccttgtgctttcctcctgtgttggctagtggccatgatgtgaagtgctctttcgtgactgtcactaactcctgtggttggcaggcaggtgtctttcggcaccagggtgtgtaccatacccactgggctcccttctcaggctcagccttggccctgcccctgctgtccacgctggactcatccttcctgggaccatccccacatgcatggctgcagcccccatcgatgactcccacatccacatctcctggcccagtctctctcccgagctccagatctgtctctccaaatgcctcatagacagaaccacctggagtctcagaggcacctgaaattcagaatatcccaagctgattttctgcactcccctacctgattggttgtttaagccagaaacctggctgttgtctctcccccattatatctaaacacggagtcctgaaccttctatctcttaaacttcgtcaccactattgctatttcaccctcctcatctgctgcctggattattgcaaatcacttcgcaactctagtccccctctccccaccccatcctccattgtagttcattctccctgccgtggactttctaataacccagttctcatttgtgccttttctgtgtatcgtcctttggtactcctcattcccttgtggaaactgtccaaattcgttagtacggcatccaagaggcccctcatgatcggattggtacctgctgccccagtttcatctatcatgctctcatcatcatttatgatgaattccttggaggagtctcccaagttttaacctgcctcagtgctcctgcacgtgttggttgctgtgcctggaatgctttctcctccttacctctctgccaagctaattcatattcatctctcaagactcagctcggggttaacttgctccagaagctgcacctggccccagatgagttggttgcctcgtgcttgcctgtcaaacttacaacattttgctttagccattgttcatcttgttggttttcctgttaaactgtgagctccttgagggcagggacttgtctctgtaaccctggcacatacagtggtcttcaataaacgttttttttcagtgcatgaagggaaagaattagatgctgtatgaagggaaaaaactggcctcagatcctagaaggaaacttgagcctttccctgctggaatgccttttcctgacaagctgtagccctaaagtccctcaaggcacaactctgatgttgaactgcaaatggatcatgggataaactggttttactttaatacataatagtatttcttcctcagttttcccctttcctactctcagattcctttgttgtaggtggcccaaagaggacccaccccactgttccagggattccagggggaacccgggctggggcaggaaaaataggccgaatgattgctgaggaaatcatggaaatccacaggcaagtaacaccttctagttcctctgttaaaccagtggttctcaacccagggaaattttttcccccaggcaatattttgcaatgtcaggagacatttttggtcttcacaactgggtgggaggttgctacttaaacatcctgtggatagagaccagggatgctgcttgttaaacatcctacagtaaacaggacagttccctcctccccacccaacaaagaattatccaatccaaaatgttagtagtgcctagattaagaaatcctgccttaaataaagaagctaaaccaaaatagcccagcgctaaagagaattcttgagaagacttaactttcttatggctcaaggagcttctcagtgcggatagatgtacctttactttacaggaatgcaggagtagagctgtgaactatcagagtgatctggaccttaacaaaacattcactttttttcaatcaaagagctgcccaggattagtactagaaaccaagcagatcagctagttattactagctgtcttgggagagacttcctttccatatgaaagagaaggagcttagaagcagtccacctgggtctgagtcctgggcctgtctctctacctggctatgctgagacttacttaacctcttgctctctgttgatttaaaccataaaaagaaagcactatttcccaagaattgtgttaggattgtgagggcactcaggaaagttccaggaacacagcctgacatatagtgagtgcttaaaaattaattaaatctgtctttaagagcagtcgagagggaagcagttatcataagtctgtccaaatttggggaatagagaaggtggtaaccagattcttcagaacgaaacttaatgtaacataagaaaaggaagaaaacactgctgccgctggattctctcaggagaattagaggctggcctgttttccaattggccataaaggggctgttatccccctataggtaacacagctcttttccaaccccacaggattagtgggtgtgacttctgcatcaggaaggagacatgagggtagtgtgcagtgtaatcaggttcaaaccctatactttgcatttgcataccctgtattttgcttgagaccatccaagaacagtatcaaacagtccttgacctcaagaattttaaaatcttttataagtctattttctttatgataacaggaaaaagggagggtgcatgggccaaagcaagcaaaagaggaaagatttgaacttggccttagccagggtttgcaataagagtggatgttccctctagaaaagccagggctattcttgagtgggcatgtgagtggcaaattcagggtcaagaaacaagctacctaactgggcaggctttgtgtaggaaggagacacagagctatgataggcgattaagaaacacaagaaatgatactgtgcagtttggaagaaacctgtaagaccccatttgttgtaggatgctgaacaagcatccaaagtcttgtgttacgctttgtggaagttgcattggaatagggagagatgaaggtgggcatgtttgacaactcaggaatgaggccttatcctacagagatgacactgccaaaagagaaatcaatcatctaaggtctagcgtttgaagatgaaatcaggaatgatgaaacagcaattccaagatgagaaacctgggaaaatagtggtttcatagacataagtagagaaaggtgggggacactcagcaatttttccgtaagcaattagcagccgtttgtgcatgctgagaatacatgatatgtagttgtaaactgccgttaagaagcttctaatccagaaagaaaacttgttcactcataaatctagagaactaggcagtacaagaaccaaaagacttctgggtggtggaggagtggtctctgggtcacccaaaagctacattcatccatgtaggagctgagagtcctgtggttacacaactgccatcacactctccctaaactgtagctgcaatgccaagtgatggattctttcctgaggtccttcagcctgacaagtatttaggtggatttacagttctaagtcttcccttctataaatcttctgagagatatgctagataagaaaggcctggacccatttttcatcaaccactgccttcgaaggctgcttttcctgtcactactactaggctaccttttagaccctggtgccgtccatgtcctaagagtattcactagctaaacagtgtttgtggagaaggggacaaattgttttctgtggatcaaagatggaggttgatcttagaagttctcctccaattcacctggattctgtgaggaaataaaactggccacttacttgaaattcaccaactgaatgcaaactccaatccaagggctttgtcagtgagatgcttgactctagggactgcattctagatcaggtgcctgtagaacaaatccagcttgtcatctgtttttgtaaataaagttttattggaacacagccacaccgattcgtatctgtggctgctttcaagctgcagaggcagagttgagcatttgtgacaagacaccatatggcctagagagcctactatctggccccttacagaaaaagcttgccaaaccctaatctagatcttcatcccctttctcacctttaccccttaacaaagcacatacactccactgaaaaaagaaaaggcagtgtaattctcttttctgacaggataagagggtcatcgccttctagctgtggctccagcccattgaacatcacgagtacgcctccccctgatgcctcttctccaggaggcaagaaggtaagactgatgattcttagcctaagctagagaacctcttgcccaagatctgaaatgttgggggtgggagtatggaattgcaactgcgattgctgaaacaatttggactacttcctccttgaagtaaatgcatctgtgtgaggctggatacaaagcatactggtagggctagggaggcttgctgacatcctcagaggctttcttccatgtgagtggaagaagggagaaagaataaggaatggggaactgtcagttcatttaattgagggagcaattcaagagttcccatgagggaaagattattgagtacctcacatagaaaagtttctcattttctgccaggaattttcaagggagaaaatattagtgtctagggcaggcaatggaaacagcaatgccaccagcagtgctttggaaatcaagccatgctttatagctgcagaatacttggggatctgctgcctgggggttccattggtgtgacagcattggatccaagcagtggatcaatcaccagccctcatgaagagcttgctataagactacactataaataggtttaggaaccagtcatttgttttcatctttgctggagaacttataagcctaggcccatcttaatcgtaaattataaatctgtttatattgcctgatgccagtagagcttaggacagtttaaaggccatcattttggacacaatggcttcctttccccatctcctaaaacagagagagagaatatcaggaatttccataggcaggactcctagggcacaaaccatcaaaagcagggcaaggattttcaaaactgagctcctcggaggtttgttcaggttaccaagagctgtggtgttaccaggtgggatgggcgtggggatagttgctaaggagagagggtaagagtagaaatcctgcttctacaagggcagcaatacttcttttttatacaggaatcttctgcaaacatttctatttgaaaaagcgttttgctccccccaaaaaaggttgaaagttaacaaattaatgggtaagactacaaagtaagacctgggttcgaagcttggccttgccatgtgctagttatgtgaacttgtacaactttcaagccctagttttctttataatggagctaataatggttagggtagccagcatctttgcacgaggtcctactgtgagataatatatgtgaaagtgcttggcccaaaataccactgacagatgaagtctgagcttggtgtcccgtgacccccgcccccctgcccacaacacacacactgcttgccagctgtcttcttagctgttcttctgttatacctccaggtccttcctgcatattggatccaccatcttcttagggtggtcttccagtctctgcttcttaagttaacttttaggcacttgacttgactcctggtattaccaaggattctacttcttggttttgaaaggttatcagtccagtataggcttaaatattactcaaagaactttcatatacattgtctcatctcaccttcacaacattatagtgacaagatccaggctcctcagcgttcgttttataagtatggcccccaggctacaatcctgggctcatggcttccaattcttttcacatcaacaactaccagaaatcaaaagctgtgctctgcatcataaagccccagctatttttgaggcacttatgaaaattctcccttttctttgagaagaatggattataaaatggatctgtgagaagaaatttggatgtgttctcacgagatgagtcctgggcagcaggacttataagaaaagcagcttaaacaagacagttaaaactgacagcagtattaaatggtgcaccatacccagccctttccagtcactttcaaatttggaaggtccaaaaatgaaccatttagcctgcagttgtttgtcaggatcaagctaaaaaggaagcctaagtgagcctccataggtcgcaagagagtacagacatccagaagcactaaggaaaattcagataaagcagcagttctacaaatgtcatctgcagtctttttccagaaagagagggggcacaagatccttttaagggtctgcaaggttaaagctattttcttaataacattaaaacgttaattttttccctgtattgataatgtgcactattcatactaaaagcacggttgggtaaaattgctggcattttacaaaaatcagacaagtggcaccaaactatactagtagtcattgtattcttcaccaccacacactcacagtaaaaaaatagtttaaagccagtttcatttaagattgtccatcatggctaggtgcagtggctcacccctgtaatctcagcactctgggaagctgaggcaggcaaactgcttgagtccagcagttccaggcaagtctgggcaacatagagaaatcccatctctactaaaaaatacaaaaaaaattatccaggtgtggtggtgtacctgtaatcccagctactccggggactgaggtgggagaatcacctgagcccaggaggttgaggctgcagtgagctgagattgtgccactgtactccagcctgggcaaccagagtgagaccctatcaaggagggaaggaggaaaggaaggaagggagtgagggagggagggaaaatgtccatcattacttttataaaattctcaagcacacatctttttaatgctctgtgacaaaatgagaagtacacagaacttgtgctgcataccaaagtatgatgtttgtctcaaaaactacttgtgtgattaagttgtgagttgaactagctactattttcattggacaccatttttattgtatatggtcattcggttttgggtatttagaatactttttttttggaaatgaatgaagtgaacctgtcactttaaggaaaatgactgacatttgttgccaatgataaaatctgagctttcaagcaaaaattggaatttttagaaaacttgtctctgctactttgaccttgagatcttcctaaaacttaaaaaatgttgttgatgagatagggagtattaataatagtgatattttgatgctctataatgaaatgtgtcaatatatagaagatctgcataactcagtgaaccaatattttgtaactaaacaatgcaaggtatttcaaaatcatgtaagggtaaaagatccatcctaagtgccaagatataaagagtacaaaacattcattgatatggtttcagattccacattgcaactcacctttaagaaacttctacgtgtcaagttttgaagtggtatcaaaaaagaatacaattatttgaaaagtctattaaaatatgcctcccttttccaactacttatctgtgggaggttggatttccttcatatacttgaatcacaagacgtatctaaatagactgaatggaaaaacatatatgagaatccagttgaaaattattaagccagacattagatttgcaaaaatgtaagataatactctgcctggtaattttttgttactgttttagaaaatagttatttttcattaaaatactattcattatttatgttaacatgtagcgggtttattacatttaagaaatctattagttttaatttcaaatacagtaaatattgataaatacagcctacataagcaaaagttctttggagtcctcaatgatttttttaagagtgtaaaagggtccctagaccaaaacgttgctgtggaaataaagtaagttataatgccacctgctggcaaagcctgaaatcattgctgctcctgaaagcagcagctaccaaactgtttcctcacgtatatccagataggtctcaaagaatgctcttctttgagactcagccaggggaaggcagctggggtgagtgggggagattttgagacagagttctcttactgagtagtagtaataatcctccccagtagcctgtcttaacttaaaccacaggttactgaagttggcacctgtagtataagagatttacttctgttttcttcatttgactccttgagctgtgtctcttcacagcttgttaactccactttttcttcttcagaaatatctgtcactataagatgttttattcccttataggggaaacgtctagctgggctcattgaagtttaggcattggtcctaaagaaatatgtgggcatcatgattccaggcagttgaatgctcttgggattttattcagcctttaagttgcctctgtgggctcactaaaatggagagaaaagaatagttcgggggagaggttttttcttactctgaccatgtctgtctaacagttccttgtttgaaatcatccaatagaaaactgaagccatttgaagcttctccccaccccaccccatgcttcattttccttttggcattgctcataatactgattcaaacttcacacttccctccttttgtttgtagattttaaatggagggactccagacattccttccagtggcctactatcaggccaggctcaggagaacccaggttatccatattctgatagttcttctattcttggtaagtggcatcattattcgtttccattgcaatgagcttgcaaaacatcttacataaagtcaattttaagaactgaactgtgtgaaacaagctaatcctagataaatttgataggaacagaataaaagtttaaaatttgtttaaatctctaaaaagttgaccagtatttgagttttggtggaggtccaagtttgtgcctggaactcaagaggaggctacagctacctagacataggctttctcccatgtggggcataatctcttcagagagagaaggctaatgaaggttcagagataatgcctagaagggtgattagtaagcatatcagaaggtattaaaagtcattaagtgaaaagagtttgcttttcccatcacatccatctttttctcccctgggctttctagatctgtttttttcctaaactctcccttcctatttgcctttctttttgtaactcctcttaactggttacatcagattattaaaataagcttgactcaaatatttttaacatttactaaattttaagcgctttgtacttatttctaaaatgatcatttgattccttagagctgtctcttcacaacgtaaccccacttatttcttacgtatttttaaaaaattggttctttcctctaaaaaacagcgatataaaaaaagatagccatgcagcccaaaaagcagcatctcaccctaccattaaatgtaactttcttattaaaaatgtgcttaggaattgcttacttaatctgaagatgctttaaaaaagaaatcactgaccagtctttatctcctcccacaggtgagaacccccacataggtatagacatgattgacaacgaccaaggatcaagtagtcccagtaatgatgaggcagcaatggctgtcatcatgagcctcttggaagcagatgctggactgggtggccctgttgactttagtgacttgccatggccgctgtaaacactacatgttgctttggcaacagctatagtatcaaagtgcattactggtggagttttacagtctgtgaagcttactggataaggagagaatagcttttatgtactgacttcataaaagccatctcagagccattgatacaagtcaatcttactatatgtaacttcagacaaagtggaactaagcctgctccagtgtttcctcatcattgattattgggctagctgtggatagcttgcattaattgtatattttggattctgtttgtgttgaattttttaatcattgtgcacagaagcatcattggtagcttttatatgcaaatggtcatttcagatgtatggtgtttttacactacaaagaagtcccccatgtggatatttcttatactaattgtatcataaagccgtttattcttccttgtaagaatcctttactataaatatgggttaaagtataatgtactagacagttaaatatttttaataaatgtttcccttgttcta

SEQ ID NO: 15456 - DNA, 109422 bp, Homo sapiens
gtttacccgcgccggactcaccgccgccgccgccgcgggatccgagtgcgggcgcgggcgcgggcgctcccggcgagccacggtgagtgtcaggccggcggcggccagcgacgcgatcccgcgcaccccgtcgggggccgttagcaccctcgcgggcgctgcgcccctgccgccgccccgggggcaacccggccgccgaagaaccctgcccgacgtgcccgctgccggccttaaagggcccgtgaccgctccctgcccccacccgggccgtggggaggctgcgccccttaaaggcgccgcgcccgtccgcccccatcctcctcgcgggggctgccgctgcgggctagggcaggcagaggtgctgcaggagcccttaaaggggccgggaaagtgttcgctggagtacccaccgcccttccgcgggcatcgctacctggcggggggagggggcagctagctgcctcttaaagggatagctctgcccttgggggcagtgactcggccgaagaggactcctagatgtgtccccgggagcttcggggatccccgaggggaccatgcctggtggctgcccctcaagggcgttgggcgaacggtgccgcgtctgcccttcctccccgcttcacttccctttcgggagcccgcgaggctgggtgggggcggggagggcgtctccgtcgggcttggggagtccaagtccgcccgccccttcggccctgtagccagggctggcgctgcacccgggaatccccggccggcacggggccgaccccagcctgcgaactttcgtggggcctgtgccgtccaggtcctgggcggccctcaaggatgccccgtgggtctgcgggcaggtgcgcgtcggcctggggatgtcgcccggagcccgggtgcgggccggccttggagtcccagagctccgcggagggcgcagcgagcctggctccagctccgggtttgacagatgtcagggaagaaaaggttcccgctcggctattgccgggcgttgacatcccagagagcttcccgtttgcttggaagaagacgaggaaggtagaggtgaacgtcgaccttgtggggcgcatgttagcctccccgaggggtcgcgagagccggcagcggggtgagctcaggtgcccgccggcaggagctggggagggaaggggagtgctggacaccggcgcctgctgtcaagttctcgccggccggtgagagacccgctgccgccgcgcaccccgcacctcctgacccctctcccctctccgcctcggccccttcccggtcacctagcgttgttttggcgctttggcgcttgcggtctcttccttcttccaccgctactcctcagcgaggaattattagccaagttttctcacccagcttccaaaaatcagattccgtatttgtgaacaagcttttcttgacactacccgtatacccgtatttccagcatcgtcgttttattaaacatccataaaagctgccccttagatgcattcatttcccacgacacctgcttgcttgtcatttgtccttctgacatctgctgttgttcacccctttaatctattattaaatgacaactattattttaattcttctggtctcattgatatccggatctgtgaatttgggttggtggagtttttaattaatgtacccgttgaatcatgagcttaaaataatcattgctgctcctgagcagttttgaataatatcatgctctctctgcttgcaagacttaaaaaaattcgctggtgttatatttgatttccatatcaatggaattcccaaatatttttgaaaatacaaaattcagtctttcagtccatgttttgttactcagatcattttactgataagtctttaacgcagcttatagaacatatttagaaggtttggaaatttcctggacaggatttgaaattgcctgtatcatctgaagctggttctgtagaagcattttggttttgattgtagatgcagccagtgaatgataacaataagttaaaactgtagttaaatttgttctttattcaaccctctgaagaacgaacagatctggtagaaaagcactaacctgggagttaggagctggacatcctggttctagtttaggcttgggctctcatggccgttccagtcggggcaagttattaaagatttctaggttgtgtttgcctctgatggaaagtaagacggttgaactaggtgatctcaaaggttcctctcttttgaagttctgtaagtctctaaatatttaatacatttgaattcaggttggtatttacctcctggcacctccagaatatctgagctgaagccctattttcataagaaagttaagcagatcaacagatggtgttttgaagaatccatttcaaatgatttataaaatgatgactacttacgagtttgtctgctatttgcagaagaggtttgcatgccacagggcaggaaaaggaagtggccatgttttcagatttatcccttcacaccaacaatctctgtggaatttatatgctaaaagatggagaagcaccatagaaagatttggctgtattaacaaaactgcatatgaaaaggtaaaaactagatagttaatatctctctttggtgtaagggttataatgtatctgagctttctttgtgatttcatcatcaactctcactgtggtaggaaaatcaatattaaataaacagtttcagccccgtgattacatgcagtgattttaggaagcatcatgataactaaagtaggtacttgcagggaagtaaaatatcctttctagaccttgaggtttcgttgggagctagggacacaggcatgttatccttctccacagtcttttttcattgtcaccttatcacaagactcagatttatcccaaatacccaccttgtcttttcttctccctctcatgaaataagacctgctctgactcaaccccctcagcatctcttacttcccacccaaaatgtcctgtctctatccccatcgtcccctcatctcctcccaattcagagaaagcaagtggacctctcctctgttccttttcttggcctctcaccatgggcaagtgcctgggctctggtggcagaagaatccatggctcaggtttgggctttgtggtcttggatgtgtgcttgactcctctgacctcaggtttctcctcttggtgtaatggcagtgcctgcctcgtggagtctgtgtgaggattaagggagatggtgcatgtaaaaggcctggcacacaggaagcctttcctttgtgccagctgccattccttctcacctctacccgggtcctatcactagaatattatttgtgctgtttgtccttagtctcccctgccccaccctgaaaaccttaggcttgacttaggagaggaaggatggaagaggcagagtcagacttgtggtgagcctgctgtgtaccaggcaatttacatgtgtctttacttggtaccctgggttcgtaagcctctctttcctccctcctgccagcctcccccactctcccatctcctgctccattcttagtacctgccctctggcttctctcgctaccacctttctttatatttcttctcaaagttttctccaaaactttgtcgtgagttcctggggcccatctgcccatccttattcctgagtggttgttcttggcccctttgcagtatttcttttatttttttaaacatggtctcagtcttgcctggttggagtgcagtggtgcaatcgtggctcactgcagcctcccaagtctcaggtaatcctcctgcctcagcctccagagtagctgagcctacagacacgtgccatcacacctggctcatttttgtatttttattagagatggagttttgccatgttgcccaggctggtctcaaactcctgggctcaagtgacccacctgcactggcctcccaaagtgctgggattacaggcgtgagtcactgtgctcagcccctttgaagcttttacctcacttgttttttgtcctttgaaatcctttcctctctcagcctttgggtcatgctggtttcttgattctcttcctgcacccctgtaaagataaatgtctgtcctagcttctgctattcacactgtccgtggcctggggtcccctctctagccctgacctgtctctcctgtgttctgctagcaggtccgttgtggacatgaatggcagcctgtaatctgcatttgtggtctcggagttacaggtttgcagactgcttgcaagcactgtcacattgagtcctcatgacacactggagcctacatcccttcattccccaggctgtcctaaaaggcagtttggttgggtagtttagcatacagactctggagccagatttcacatcctaagtattccctactggcttcgtgacttgtggtcaattttcttttgctctctatgccttggtgtcctcatctataaaactgggatcatagtagcccctacatcagagagttgaggtgtggattaaatgagttaaagcattggaaaaagtgtgccagtctattcatggcacattgcaaacactcagtgaatgttgctgtcagtcttgctgctcttcgttgccttgccggggtgccttggcctggtttgtagtggtctccacattcagcctgcctgtctgccagaccttgccatgtgcctggacactgtagtcaagctgaggggctgtccattccctgtaccagcccttggcccagtccatccctcaattttcacgtgtccaaatcctcctctgcttttaggacccagggccttggtcctgcagcactatttcttcattttgttttccttcctccccacacctggcagcaatgtccacattgatttttctccaattctcttaggttctgctgcattccatattgtgttgggctgtctctgaaaatatctcacctgctcgctcagcctgagcattctgggagaagtttatcttgctttttccaaaatgacaggcacagggagcctttaggccatggttgtccaatgcacattgatcttgtggaggaggagatgggatggggtgggcactcagggacggagcaggtggagggaacaggatgcacactgcatagaggtgggggtgcaacagggccataagtggacatggccgtaagtacttaggtctgcatggaaggagggtttgaattggggacttaacctcagggggagataagattggataaggtttagtcatctttgctgcaggggaacgttgagtactggcatgtaatggagagtggtttttaccttagtatgtgctgtccttttaaatagtgtaaactaattctttatctagcctggttaaagaaggggatggctggtctgcctaatttaatatttggctattgctctacccactgggttttgtgcatatactgaatgaagcattggcttgtatttattccttcaatcactgtttgaaatgtctgacctgggcaagttaattagcttctctgagtgcaaaataggaataataattattacgataatagcagctaacatttattgaacactttctatgtgccagcacatatgtgagtcacctttgcttattaactcatttaaaccccataacaactacatgaggcaggtactattatccttacttcacaaatgaggtggttttataaactgcccaaggtcactcagctgttatggcttggggcagaatttgtgctggtgaactccagagtctgccctgtaacaccctagtagattcctactgggaggaaacaccccgttatatcccttacctcactcagccgcaccatgccaggagcctagtaggctgacagcaattgggaaccagtcttattgttgacaaacatggtatgagcctcttttagagcggagctgcctgaaaccctccgcataagggatgcggacctggatgctacctgagcagcagctccaggggcttgtgaacattctcctcacatcctgttatgcatggctgtctctctggcctccccctgctttctctgcagcattgctctgacccaggccccctgtggctcagccagctcctccccaggcagctccttgtgtgagatgaaccttttaacataactcactaaccccacctcccaccctcatctagccatctgcagagctcctcactggggaggggaccttttcaaaggtccctcaccttcgtccttttctccctgaagaccaacgtccacaactttggtatatccacagtgttggggtgtgtgtgtgtgtgtgtgtgtgtgtgtgtgtgtatatatatgtgtgtgtgtatatatatatatatgtgtatatatatatatgtgtgtatatatatatatgtgtatatatatatatgtgtgtatatatatatgtgtatatatatatatatgtgtgtgtatatatatatatatatatatatatatatatatttttttttttaatgccagttgttccccaaatacatttagatagtaagggacacattgttttatgtcaagaacctgttacataaaaatgtgttatataatgttcaaatatatactgcacagtgaaattagataccactttttttttttcaaagaataaaaggataataaacacaggccgtcctgaatataattaacctcagatttgggaggcatggaaggacgtgccctgccctcagagctctcgtcctgagctctgcctttcttgagtgcgccgggagcaggatggatgggaagttggcctgaatctgccatggtgtggtactgtgagatgctctggaaattgtcttttttttttggcggggggtgggggatgccttcgcatcttgctcacttgtatctttctcacacctaagcagagggaagaagctctttttgccccctcgtacttagaccacccaggtcatcttttgaccagttttctgctctgctcaactcctttcaatcttcccagatgacaggccagctttgcctgctaagaacagccctggtgccagtggcatgcaggtggcacccctgtgtccagtcttccaggctctccagggtctggtcctgttcctcctccccagccctgcttccccgctcaacctccattcccagccacagccctgtgcccgaggttcagtcctccttgcctctccgctgtcctccctaggccacctcacttcacactctccctctggctagcggggtctttgcttaaattgttcccttgaggcctctcttccttgcccgtgcctgccttggatctcacttctctgtgaggtacctctgataacatttgttccctttgtgtgtgctctcccttttgctcttgattgccaaccattcattcgttcagaagcaggggtatgtcataatgagcaaattaccatatcatactgaatcaggatggccagttgtctcattttttaattgtttcatggttaattatcttacgctcacttcccactctccagtttcactcagttactccgtcagtgaagtttattggatgcctagcactgttgtgggcactgaggatacagcagtgaacaaaacaaggggcccgcaggaggggacagatgatgaatagtgaaacacgttcatgccttgttgtgagaagtgctaggagtgctaggatagcaagcaaatagagtaaagcagtagcgatgaggtatggtgggagggagggtaccttatctagatcacaggggagacctctctgaggaggtgacatttgaacttagcttcagaaagatctgggggaaagtatcccaggaagagagaacagcacatgtaaaggccctggggttgaaaggtgcttgatatttttgaggaaagtaaaggctagtgtgactcgattatgagctgcttgtgtacagatgttttctgcctcttttatactccctttaaccctgagcccagtgttaggaaggccttgtaaatacttacatacagaattatagcatttgtcattggttatatattataaaatagtaattttataaaataataatttatcataccctgcttagaaggcttttaataaaacattatattgcatataaacaaattaagggtttgaagggttttcttataaatgcactcctagcatgtttcaccaaatattactgttttaattgtgtttagtgcagaactttagacctcataattctgcttcatgtgcacaaccatcttaaaaacaggttttgttccaaaagtttatttgtaaggcactaggtggaaacttgggataaatttttctataagaaacaatgaagtaaatagtgatgtagtttctaggcgagccctcaaaagctatttagtggtgactgtagctgaaaacatactggttggtatcagcagtcgtcaagccttctgctggtagaccctcctctcagtagcattgtacctcatttgctgttagcaatcataggacccatttacctcagtcacttctcctactgtattttcagtctgttaaagttttatagaagggattttttacctttatacctttaagatttggttgcatgtgttataaatgagacagtagtgcagagagtggggaaaactctggactgggagctgggagaggcctgggctccagactgggcccagccactgactggctgagtaaatttgagtaagttatcctctttgaactttgatttctcaggttcttcttggctgtaaaatcctattgttttctcaccatagcagggaaacgtagatatacttcgttgttcaaacctgccctcaaatggctgcctctgatttcttcttgaagaagtatatggcactcagcaatgaggaactcaagcagttccccatgtgcagagctctgcagtgacattctcagtaggaaccttgattttgatctgctatctttcttgatgagttgaaagaaattttgtcccagaacttttggtccagataagatttctgtgttcttggccaacttatcttccatataattatgtaaattgttttttctttttaactcttagggataaaaatggtgactctggcttgcctgcttataaaatatagttataagtgcccttagggaatggaatgagtttgcaggagagagcagagctgaaagagtgtgggatcaaaaacaactttaaatgttaaatgcaaagctattttcagtaccctgctggaagaaaaaatttttttcaaggttttagaggatagaagaggtttttgctccaaagaagaaaggaacctaaggttttgcagtggtgaaaagtacctgatcctttaaccaactaccaccctcccttcccacctctgagttttgttttcgacatcatgaaccacatttgccatttgagaggtttgatatttaagtgacgttagtggcagagctcaactggcagtgttcaaatgacttaggtgcagagtgctgtgctgcaaacttccccagtgcattctagggtaagggatgcctcatagagagtgacagagcacttttagctctgcctctatttggtcagttgtgaatggtgtgttcctttttttccttacttgaaggcatagcgaggagttggtacaagaagttattgcttcatggacttcactttggagctagagggtggcattagacctagcctgccttcttggatgctggaataccagtggcaatgtcatctcttgttctctgctatacccctagcaatgaaaacagtgtctgtacagaaaagtctctcaataaatacttgtttattccttcaaaaagtgaattcagctttggataaatttttaatttcctccactctctagcagtataggcttatgaggttggtcttgcaaggtactttggagtttaggttgccatttctttttgacatctgtgtttttcttattcttcaggttggtcaggtatcagtgtcttttactgatgatggttgtccctgccctgctgatgttcatcttctgttatctttaattggctccaaactgcagcaaatctatagctgagccacattaactaaaagaaaacttgttgcatatttatttaggcatagtactacacatgtatttattcagtcaacaaatatctgtgagtctatatgccaagaatgttactagacccaaaggaagagcagaaattgttgttgtgaccaaggagcctgcagtttgattgccttgtggaacatctttatgagcattgtagaagggaggaggcttcatagaactggtcaggttttcacctttaaggatggtaggatttcgattcacagacaaggtgaggacaggtatttccaggaagtggctgagcggaaacagcataattaaaaacacagaagtaggaatggaccagtttgcattcatggacacagacttgtctaaaatggaaggttcttaaataatggtgggaatttaagtatggaagatcactgaaggcccaaacctgaagccattttagacacctagtgacttgcctaaagtgacagctgataagtggtagatccaggcttaaaataaggccatgggagctctcgaccactggcactggacttggctgtttcccagcagtctctagatgcaggatttgggtttgattggggattttcttttttctttctttctttctttctttttttttcttttttttttttttgtgatggacactgagattgggggttttagagtcatgagctggaaataggcaaggctctatttagcccactctttcattttgcagttggggaaactcagtgaggttaagtggcaagtcggagtttacctagtgagtcagagactgctaggcaatggataaccactggatttgttttattatgattatgattttagtgacatgaaatatttctctctaaagcatcagtccagtgttagtgttccagttggattggagcaatgaaggactaaatgcagcagagacctgacaggaggctgctagatgaatccaggaaggagagagagaagccagaactgagaattaattgtcaattatgttaatcagcatggtgttatcagtcaccctttagatttctagagtgcggtgaacatctgcctgtgtgagtggctttcaagtgtgtgaatctgcactgtactgtgaccaagataccttaatgaattctccagacagaaagtgccactatggaagtcgaatgttttaaaacaaatgcccacattttctggaaagagcaccagattaggagtcagatgacctgcattttaggctgcttctgctgcttagtcaccatatagccaaagcaaatcacttaatgtctcaaactgagcctgactccttatctgtggaacaggtataacaattcctgttgagcccttttcagtgtatgtgtgatgcttgtgtgagctaaggaaagaataggcattttgaagctgtaaagttgctttctggctgcagggagcagcagtgcagttttaatagtgaagatgtactggcccttacaggaatagcctaggagaaccagaagaaagttcccctacctccagggcatgtttagggaatctggcgctgtccaccaggtgggtgctgatgtgtactactttattggatagggccatgttttttgtttatttgtttgtttttattatactttaagttctagggtacatgtgcacaacacacaggtttgttacataggtatacatgtgccatgttggtttgctgcacccattaactcatcatttacattaggtatatctcctaatgctatccctctcccagccccccagcccctgacaggccccggagtgtgatgttccccgccccgtgtccaagtgttctcattgttcagttcccacctataagtgagaacatgcggtgtttggttttctgtccttgtgatagtttgctcagaatgatggtttctagcttcatccatgtccctgcaaagaacatgaactcatccttttttatggctgcatagtattccatggtacatgtgtgccacattttcttaatccagtctgtcattgatggacatttgggttggttccaagtctttgctattgtgaatagtgccacaataaacatacatatgcatgtgtctttatagtagcatgatttataatcctttgggtatatacccagtaatgggatcactgggtcaaatgatatttctagttctagatccttgaggaatctccacactgtattccacaatgattgaactagtttacactcccaccaacagtgtaaaagcattcctatttctccacatcctctccagcatctgttgtttcctgactttttaatgatcaccattctaactggtgtgagatggtatctcattttggttttgatttgcatttctctgatgaccagtgatgatgagcatttttttcatgtgtctgttggctgcataaatgtcttcttttgagaaatgtctgttcatatcctttgggatagggccatgttttaaagatgattacatttcacccccgtaagcctgggcatggacggaaaagttaggcatggatagccatgtgaatctattatctgtagacacctttcaggatagtgacaggcagctgtgaaccagaaaaacaagtgtcagaatctagccagctggccagtctggcattcttggatgtttcatctgtcctggggcattaggcagcgatccagaggaaccttgattagcctgggggattcatggctgagccagcatgctgtccaggtaatacctggctgcaaagcctgactggagatctgccaaatctaaatttctgccagcattacaagtgtatatattattattattattattattattattattattaatagcagtatctaaccttgactacctaccatatgccagcaactgtgctaagtgcttacatactttttctcattcagtcttcacagtattcatataaggtgggtaatgtcagttctgttttctagttagagagactgaaactcagacgagcttcagctgatacatactaagtgtaaaagccatgattcaaactcagaacagtctcagtccagtgcccagctgcataactgctatgttcttctttctctcttttcctggtacctgaaaatacttcttgtctctggttttgaggtttctgactgtgttattggttgatggatgggttgccacacagaggctcagctcagcacagctcttttttcttcatagcttatgacggacatcctcctggatactctggctggtgagcaaatgggtgccagtggtgaatgcagcagaaagactaactcttgccagctagtgcatgtgggtgaattttaaagacaacaaaagaaatttctgtaggtcagtttttcaaagagtaactggtagcttgtagtctacttaaaggccaagtttgatgttcatcaaagtcaccctgtaaaaacctttccaaatgctgtgattctgataacaataccatagaacattcctgtgtaattgacaagtagtttttacatacaatgtcttgtttagtcatcatcacaaccctatgagggtttgcaactacatatagttgcaaagaagactgggagatatctttagttgggaagccatgagtctagcaaaatctctgtttttaagggtggcgaggggagtgaatgaggggagctagcaatctgatgtgttgtggtggtgatggaagggataagtagagtttgaagctgttgtcagtagagttgggaggatgcctcctagtctatgacatctcctagtgttatgacatctcctcttgtggactgggaaattgcttagagtttaagcaactgtccagggttctacaactggtcagcggcagaggcagcacttaagtattgcttttgtgacttaattcactctctattcaagtttcatctttgctttctctattgaagttcttaaatattctgattcactgtatttagaagtcggcaggaattattaaagtgaacttctttgtggtatacactgttactgaatcagagtaaataaaaggtcacatgattggttgttgtgttaggtttaattgacgtgtactctgtatgatacagaatactcacatatcttttgtgggatatcattggtccaacagctttaaaaatcccaaggctttaatagatgataaaacacggagtttgtgtaatttcttgaaaaagttggccatcgagttcttggtcaggaacacaagcttcaattgtaacagtttccatggagacattagccttggcttgcatcatttcagctttcagtgcctttcctaggaatggagtgaactgctaaaagaagagctctggttgtggttgtcacttagagctctctcccctactgtttctgctggaggctgatttgcttttctgggtcttctcagttttttctgtgacctaagcataaattgtctttgagatcctggtaatctcatattttaaaagttttccacaaaagacaactgaatggaacacttttttttttcacccctttaaagtatttaattggccatcaacggtggctcacgcctgtaatcccagcactttgggaggtcgaggcaggcagatcacgaggtcaggagatcgagaccatcctgctagcacggtgaaaccccgtctctactaaaaatacaaaaaaaaaattacctgggcgtagtggcgggcgcctgtaatcccagctcctcgggaggctgaggcaggagaatggcgtgaacctggggggcggagcttgcagtgagccgagatcgcgccactgcactccagcctgggcgacagagcgagactccatctcaaaaaaaaaaaaataaaataaaatgaaaaataaagtatttaattggtggcaaggggctttgctagaagaatggacacctggtctcactcaagcttcttgtattagttgggataccaggtgagtccctctgttaaagagacccacaggcacaatggctgaaaccaggtagaagttttctctctcatgtactagtccctagtagatagtggtccaggcctagtatttttaacacatggcttccatttgatggttgaaggtaaaaacttaccatctcccagaggaaacacccaagggggcacacatccagtcatttttaagggaaagacccggaagcagcacattctctttttccagtagccggaatttgcaactacatatagttgcaaagaagactgggagatatctttagttgggaagcaatgagtctagcaaaatctctgtttttaagggtggcaaggggactgaatgaggaaagctagcggtctgctgtgttgtggtggcgatggaagggataagtagagtttgaagctgttgtcagtagagttgggaagatgcctgagtcaagggtgagaatctaagcaggcacacagaaaccagggcatgtgcagccatctagaggtcagggaagctcttggctctgaaactaagcagtggggggcacccaggcatggaagggaatgtgaattactcagaagacattaggttgtcagtaaaaggaaattcaccagtgtgactgaatcagtagaaagagcacttagactaggagtcagaagacctaggtttgagtccagcccttttacttcataacctggggcaaaaaactcccataaatatttgctttattatttagataatggcaataacagtgatggcctttcctgcctcccaggcttagtgtgagaccaaagggtgaggaagtactgtgtagactgcagccccatggagatgtgcacagtgtctgcccagcccagggcctgccatgggtgtatttgttgaatgaagtgtgaactattaaaagagttgggaaaaatgcattatactaaggagatcttaatcctggacagtcttctctaccaggcagaaaggttctgctctccactggtcaaggccttgggcctatgtgtaaaactgggtacctaacaaacacatgggcagacgcctgcagctccttactgggtagcacatgacacatagtatgtccttggcaaggccatttgctcattcctctgtgtaggtaaccaagtgcaacagaagtggaggtatagcccatgaatgtgaactaatcatttttaaatgatttggtccatgggcaggttagaagatgaaaccttcccaaggccaccaaaacttgatttcttgcttgaaaatgataagatgcagttataaaatgcttctgttgatttggaaaaaatgtgtgacttgttcaaaacaatatgtattaatagaaaatgtaacataaataagaggatacaaaaaagagcttaatgtttctatcttctgggcctagcaatagtgatttttttttccttttggtaggaaaatgggggctcagtggaataatcagttttatttctttttcttttaacttcatgaagggtttgtattgttcattttgttatttaatttgttcatttgctaaggaaagaacttctttcttggaactctgcggagtgtttttagatggactttactggaaaaaaacaggaattgaaattatattcacagtgcgctctaaactcttttaaaatctcatgcatggatggaggaaaatgcactgaaatatcaatagtggttctcacctcatggaattagaggtgacttttattctcatctccttctctgtggtttcctatttttcaacgagtgtgaattacttttatcatcatgaaagaccagttaaaaattaatctcacaaattaacactctcaagccaaaccacgaatttttgtttttcacaacctggcttggactataaactgtcacactatctcagacctatgcagattcttttctgagtgaggcattgaggaacttgttataaagatgatgctttccttctggaaatcaagaaacaagccaagggcttataatgtgttaggaaagatgtcctgagtaactttcctcctggaatctgactagcctttattacagctacttaaggaaatgagttttgtgggttccctgttcactgtgtcaccatttttttctttatcctgtactcatatgtacctcagggtccccagattttcttatcctgggattgcatgaccttgtccttggctctctcgggcccctgccgtttccagtgttctctgttcatgttcacaatattgttgatttggctgtggcttcttcccgcagtgttcttgtagactgaagagagcacattgctgcccttgtccctgtgcagcttcctcttcctctttatcattgctcaggtgagtggcctgagcagtgctcctgggatgaggtgaagagaagcagtcaagactgcagggaagggctaggggtgctgagctggccgagcttccctgggggaaggcactgggccatctgtccagcagcagttggcccacagctggcagggcaggctcaggagtggctcttgaagatggctgcttggtgtttgaagacagttcccagggcatgcattcatttgttgagcaccttcaatctggcagcctgtgttctagatgctggctgatgaccaaggctgacatggctttggctgtcatgggagtttcattctagtggtagagggagagagagagagacgatgtggtagagggagagagagagagacgattagcaggggaatcaatgaagaagataattacaggttgtaagaacagccccagaggaggttacaggtgcctgtttgtcgagaagtgggagggccagagttgggataggaacctatgtccctgattgcaaggtctggctccttctgtgtcctctgggctttctggtgggaagggaggaggtggaggagaccccttgcgagggccgagcttctcccattcagccagtctggaccagcctggggccttcagatggagatagcaaaagttgagggcataagctagggactggctctcttggtcactccagttgcccatctctgtacttccccaggtgaatagccatgttttttaaagaacacggagcaaatttgcatacaagagtccagatttatgcatgctgcagctttgtctgaaggcaagcttatattttctctcctattattttcaacttttaatgagttaccagcatctcagtgcccctccagcaaggatattgggctggtgttttcagggaacaattttaattaactcctccttgcctccctctcacccagccacccccagtccccttcctggtggctcagagtctggctttggcatgcaataagaatatttttgccttggtgttagcctttctgaaactcttgattaccagtgctcacaggacctttctgcagcactgtctgcttggctgtggactacccagaggagcttggtgtcaggcaaacttaggcgatttccctgagcatccttgttgagtctgcctttgtacttctttgtcaggtctagaggcttggccgtttgtcctgctcttttgtcccctccttctgggaaccctcaggaccctcactccatggagactcagcacccttcctcctgcaaacatcagtgatggggctttcccagccctttcccctatcttccttttcaaagaacaaagcctttgaagcttgtctcatacctgtctgatgcagtatgggaatctgtaagttctttgcctcctgaaggggtctggggaatcacttggctttcagagctttcctcgctcctctcccacccacagaccgattttaaccagagagtaagtcattcatgctgtgcttgaatactccttccagtcccactaggaagactctttgttactaaattctgttttcttgggaaaggggagcttattactatctcattttgttggttgttattaccctcctttaaaaatgtatctacatacacgcatgtgtgtacctacatgtttctatatttcccttgtgaatgtggccctcagagggcctggatttaaaccctgggagtggtagtgaccctttgggaaatgtatactttttgttccaaatcttctctggcttaaatttgtgaagttttgtttcagccttggtttcatagtttttcccagtttccaagataagtttggggctcactgtaatcagcatgtaaaggagaatatggccatcagctctgccccttaaattcatagtcagactcagtggggaagccgttcctgtcccatcttgcgctcgtggctctgtcagcctcaggcagctcctgcaccgtcctcctgcctgtgacagtgttgtcaggagttcttggtacctgggtgctgcttggcctcagggtgccagggctcccatgtggagtgtgcttgctgcagtctctacagcccaggtgtctctgcagccctcctcttacatagccacagcgtggtaaagtacatccagtttgcgctgtagtaagcaattttattaaaaaaataagtttaatatgtaagtggtcccttagttcgtttgaatggctcccctctctggctttggtttgaatgagctacacctggctggagccctgctgctcccctcagcatggagtcacctccctgtgctatggaggaaaggaagaagttattcttaccttggttttgagacaagacaagcctggagaaggctgtagggatgaaggagttgcccatttgtccagcatcagttgagagtctactgtgtgcctggcatcataggaagcctctggagtgctgtgagcaagaaaataatacttgatttatgtttttaagggttcttctcgctgcctgtgggccggcagtgaggaggacaagagcgcagcagggagatgggttaggaggcagttgctccggtgcagggagcagtgccagcttgagggctgctggtgggtattggtgtgagggtgggcaggctgcagataggccttcgcccattgcccttgccatgtgtccccatgtgtccccaggggaggctctgggcatcccaaactgtgagcctgccctttcccaagtgtgctaggccctgccaagctcctgcttcatggcctatgctgttcattccatctggaatgctctcttccccctgctttccatcctagctgagtgacattgggcaagtgaccagatctctcttgagcctcaatctcttattctgtgaaagagtgctcatggaacctactgcatgggaccatgaggataagactatagttgagtgtggtgattgcagtagcctccaaagctgtctcctgcttccaatttcatcccgctactgtgcattctttacacagcgatcctgtgaccgagggtcagatcagggcaggcctctgctcagaatcctctccacagtagcttcctgtcccagtcagaggaaaagccaaatcttagcatggccctcagagcttcctggtacttctgacctcatctcccaccccaaggccatggtgtatggttgatcatgctgggttctgcacagctcattgtggtgcatgtaagtggcactcacttcctccccaacttatgcattgcacaacttgtgcagctgtacatgctgctcctacctgcgcctctctagctccactccagccacagtggaatccgtgttgttcttcaaacacaccaggcatgcttcctgtttaagctctccctactgcctgctcccttggcctggaccattcttcccccagaggtgtgtatggctagttagctcaccttcttcaggtcttttttcaaatgtcaccctatttaaaattgttccatctgggtcactgccccccaaatgttccctttttcccttgctctttatttttcctcctagcacttatcaccatctaatatattatacgttttccttatttatttggtttatttttatttatttatttatttctcaacagaacataagcttgatgcaggcaggcaccagtgttaattttgttcactgctgtatccccagtgcctggattggtgcctggcagtaggggttcagtgatgcatgagtgaatgagtttggatgcacaaaggtaaagtattgggtacggtgcttagcacactggaagcacctaatacatggatgccagtattttcattgtctctgttaactctccaggccctggctcaaatgtggctttctctgagcctttctgcagtcccttctcaggctgaattaagtcaccaccacctgtgctctgtgttccccttcattttgccttctctgtctgctcggcatttatcacactgcagtagtgggcttatctcacactttttcctgttccaattgcaattcctgtggggcaaagactggcctgttcagatttgtatctcaggcggtctgcgcccccagctggcatgtggtaggagcttaggaagtgcttgctgctggtggctgtgggaggtggaaagagctttttaatccatcaggacccttacaagggggactggctccagcatcactgccgtctgatgtttgtgccccctcccaaggggtgtcaagggagagcttggcaaccacttaaatgagagtctccagtggtatatttagagcaaattttggagagaggagtctcttggataacagcatctgggtgacctgattgtttcacatataagagtttggctttttggctactcaggctttgagaggttggggtcattcaagggaggcagtgtaatacccatgtgttcagaggtggctgggacgagagggtgcaggagaaaaggcttgagctggcctgtaagggatctgagttggtgaagggagcacagcttctgggggtggcagaaggaataggagagctgcccctgccatacctggggaggggtggttaggtaggtgccttgggaggcatggttaggtaggtggtttggggccatggggggaaaactgtaatgccagggcaattactttggcctcttgtatttggcaggaggggtccacactggggattgtggtggcgtgagggagagggccctgggagagaagctctagagtcattttcttttccagaggtggagttgtcttggggacctgcacgtggcacgcagagcccatgctctcaggcacctttggggtggcagagtttcaactgaaccaacagaggacaaggggctgagaagtcggaggccttggctgaggtgcccagtttcttggttcactttctttacctgccaggttagcagcaagtgagcaaatccctcctgcctttgctcagcattagcctcagagacttgaggagagctgggccttcaggtgggagcctggtggccacactggagaggaccaagcttgacattgagtgtccgaggggctgaaagttgttcgctcatccagagatggattcgttctgcaaacatagggaaagttcccttcccattcctcatggctgtttgaggatggaattcctgcattgaccttggcctttccctgatcttggcctttcccctgcactatggcctctctactcttaacattacgccccagcccttttccatgggcccctcgtcttccctatggccatctaaaatggccgtataatattctatcaagggaatgttttcagtaagccatgagcttgatatggagcatttagattgcttctaatttttgctctttcagctaatgctacattaagccatctctgtgtattatggaatcatttcattagttggcatttgtctagctaatggcaatggcccaagatttaatagcgaatcagaatttcttttttcaagaagaatgtcatgaggatatataaaaaatttacttaaaatgctaggaatcatctatgttggggttttcatgaatgaggaagcagggaaacagtaacatgaaattagttgtaagtgaaagactgtgtgtataaaagtaactcgtgacttgtttgttcctgagtgtggaggggagccaataaatccttggaaggagcaatctacctgtgaaaatcaaagagatctgtattcctgcatctgatgaaaacataacaaacagtgatctcttcttaaggatatttttagaaatgccctaaaacaagaaaaagtaaataagatttccgagaaaaaacatgtctccttaattccaaatgagcctctctggaaatgccatttagtagtggaagcaggttgtagacttgctgaaaggatttggttctttggttattaggaaataactagaatgaaattgacaaacagacaacactgacttggtccccagtactgctttgagcctgaggtatgtgttggctttggaatgatggggaaggcttcctctgacttgctgatttgttgtagttgttgttgttattgttttgagatggagtctcgttctgtcaccaggctggagtgcagtggcgtgatcttggctcactgcaacttctgactacctgattcaagcgattctcctacctctgcctcccgagaggtgggattataggcacgtgccaccacacccagttaatttttgtattttcagtagaaatggggtttcaccatgttggccaggatggtctcaatctcctgacctcatgatctacctgcctcggcctcccaaagtgttgggattacaggcatgagccactgcgcctggtctgttgttgtttttattgtttcagtctctggtggcttattatgtagacttgggctgtaagctttgcatttcagtttaaaccagcaaatgtttacactatataaggttgcaagggctaaaactttagggagaaagaacccagtgcacccctgtttctgagaagctcatgaccagggagtgggaaggataaagcaatgttaaaaccaatggttattcaagggagattaagaagggggccctgggagagtcagctccatccttttagagaagggaggagttctacctcactgctgggcagggtggggctaaggggcaggagaatcaagaaaggttttatggaactagttgcatttgtcaacatcttgaaggacaggctgaaatggaggctggacattctcagcaaaggtaaaaggcctgagtagaggagatggagatggaaggacatggggcaatgtttgggatttggctgaagaattgcatgcctgtagtaatggtcatagtagcactttatggagagtatcaggtgccaggcatggttctaagagctttatatgtagtaactcacttaatccatgcaatgaaccaaatgaggtactgttattatccccattttacagatgaggaagctaagataaatagcaaggaattaattgcccaggatcacactgctgtggagccaagatcagaccaagttcatctggctccaggctctgtgcttacgaccatgaagctgtcctgtctctgatttggggaaagaacagtcactagaatcagacagatggacagatgccgtatgtttagaggctgggattatcaacattcaggaatgcagaggtggaaaagagaccagagatggagatgaggggcattggagaggtggggatgggaggagggtttggtgagagccgtgaagggccacaggaagacagagctttaaggagaagtttgtcagtgaggcccagagctgcagacaatcccaggaggtgagacctgaggaataggtctgggctgaggagaaagctgtgagggcctcgggagaggggcagcagggtgacccaggctggagctgctgtggtgtcctatcctggctgcagagtgctgcgtgttcctgggggatcatagctgttgatgagtatcactgtccctgtcctcttatctgtagaaagaggtgagtgtgacagagggggcaggtgagagctggcactgctaatttggcaaacctggtgacttttctgcagcctaatgatttttgaaagctgtttgctatgctgaggcacaagtgtgacttcccccatctaaatgctgtgcaatcgctattttccctggaaaattgggcccatgtgggctctgtgtgtggtttatttgagttccatttttatagccttattaccttgtccccatgatgcaagaggcctctctcttttcttgagctttgctgtgaaaattgtttcttaaaaggcacaaagtgatctctcgtcatctgggtggtgctcgctccacaagcagcacttttctcagactccgcacacacttgtcatcgcccctgcccccacttggcaggttcctctgattgttggcaatttactgagaacttttaggcagctcttgaagctcactacctatgtgtttgtcttgatttcttccggaagagtttgtgcatgtaaatatccattcagcctctttctctccgagatgttgccctgccactgaccgtgcttggggctgaaacccagtcttgtcctctggcctcgagctgattaacaatagcagtcatcatgtacagagcctgagtggttatcaggcactaagctaagggatttacgttcgtgatcttaattattcccaatttctttgaggtaggtactattacttcccccattttacagataaagaaaatgagccttcaagggatagagtaagttaccccaggttacatagctagtacatggcagagctgggcttaagcgggcctttctaaccttagactccatgtgctccattcattcattcattggcaacaaatgattgtctgcaacaggctgagaactgttgtagacccagggtgtacagcaaagggaaaaaaggccaaactcccaccttcagcttatattctaacttggggaggtagagatcatataataaatgacatatacattatgctatgtggtaatgagaactatggagaaaaatgaagcaaggaggtcagatgggaagtgggaggattttgaggagtggtcaaagaaggcctcattgagagtacaacaaattgttaggttaacaaacaaacccccaaatctcagtgtagcaacacaacaaaactgcacttctctgcagaaaaaattccaaagtggctgctcctggttagcaggcagccttccttgcagtcatccagggacctagactccttttatcctgtgtctctgccttcttcaagggccttggtttcctttgcattcaaatgctggagcgtgaggaagaagaagagagggtagtttgtgaggaaggctttatggaccagtctggaggaagcatacctccctcccacccactggccagaattcagtcacatgttcactcctgactgcaagggaggctgggaaaggaagtctggccatgtgccgcctaaaaaaaggaagtgggttctggtgaactcatggcatggtgtgttgcagcgagtgaggtgaagaagtgagctatgtgtttagctggaggaagagcattttacacaaaaggagcagcaagacaaaggctgctggaatggagtggggaggagagaaggagagtgggagaagatgagggcatggagttgtgggggccaggccactggggtcactgtaaggatttggttgccttgggaatgacaagcagagccagaacatagagttttgaaggaggaacgacaggatctgaggcacgtctcacagggctcactctggctgctgtgttgagagtggactgagggagcaagggggatgcaggggagaagcgggcgtttgcgggtgttatccaggtatgtgaccagaagggctggccctgagccggggtggtagaggtggggagaagccgttagatttgagatcagttctgaaggtgggccagcaacttttgctgtgggattggtagtggggcatgagagaaagaaaggagtcaagattattctgaggttttggctttgcctaatgagtattagtctcacttcctaccctcagaagcaagaggggaaattttttggaaaaggatatctgagtgttctctgggccctgacctgtcctccataacctctttcactctgtgatacttttttcagcacagatgggcaattcccattcatgactaggctttcagacatggagagggcacttggagtccctcctggcacacagcagaggtgaggcagcactgggaattgtctcactttggggtctttgggtcaaaccttgggacccctttagagtgacatggcagggactgagtgtgccctctaggggggtgagatatgcctactggagtccacttccaatgcctgccatctgcaaacactggtgaggccctggctgaagggtaacaacccacaaaagtgcacaaaaggaggaagttctggaatgcgagttgatgctgccagcggtccggttggctccttgccttctgttctttgtgtgttgacatcagacctctctactgcagacaggctgccctacctgagggggcacagctgccagcagcctcagtttacaatcctagcaaaggaggagagcctttctctacatctaggtatcagtttaagggaaaagcctctgtgtttgagagtgggagcggaaactgtttcccacgtacttccttggcagtcatgacctgtcaaggctgaaactggagatgggactttttaatagaccatgatctcactgggagcatatggggaagaaagttcatcttagagatggcagggcgtgagctgtgaaaacagatagtgcacacctactagatgctgggcccccgctaggtattttatttcactggagagcaaaacaatatatcatccctgccctcatggcacagatggcctcaagtggctaaaccatagaatggctagctgagagaaatgatagttctttctttttttctttactgattgcgaatggggttgtatttttaattttggtatccatgtgttcattgctagtatatagaaatccaattgatttttttgtttttatgttgtatcttgcatgtttgctaaactcactaattagtcatagaaatttttttttgtttattccccaggattttctgcatagacaattgtatcacttgcaaatagggattgtttcatttcatcttttccaatctgtatgttttttatttctttttgttgcctgattgtgtggccaggacttctagtcctatgttgaacaagagtgctgggagtgcacatccttgccttgttcctagtcttggggaaagcatcagcctgtcaccattaagtgtaaggtcagctgtggatttgttgtagatgccacttgcactttgctggcatggttgtgagtaggactgtgggttttgtgtgtttgtgtgtgtgtgtgatgtttggctgaaatacagtggttattatctacaagttttctgtcttgaaacagggagatttgttggggcattttctctttgtgctccttggcatttctgagttgctggtctcctcagttccaagtctgagctatatgcagaaaaggaaatgcaggaagctcaccactgtgttgttccttggatcctgaggtcccagctggtctgccttcttcagactgccatttggagtcttcttatagtcatctagcatagaatgcccaggggttttcattgttcttagcaggtggaatcagggaaagtgcacctgctccatcctgctgggagtggaaatggttgggggaaattggagcgtataggtcggggctagtttagatgcaagggctccgttctgtaggtgcaggagggccgtggaggctcagccctgacagcagtgggagggggatgggaagagggggagtggagagagcctaggtggctgctgcctgtgtccaggcaggaggtcctgaagtcctgaggtcctggccgtgacagtagaactgcagcagaaagaaggacaggaagttccatgaggacagtgaggaagtgcaaggagaccaggttggtctgaggtttctagctagagcagctagctggttctgagataacagagacagagggaggggtctaagcgtggcagaggggtgtattctaggcattgtagagcagatctggaagactggacttactgtgcttcccctcaggggaggcttcacagaggaagtctggctgctggggaaaaatccagggagtgtgcattctgggcagaggaattctggctgctgggtaaaaatccagggagtgtgcattctgggcagaggaaacaacgtgggaaaaggcacagatacagaaaacggcgtgatgggcctgttgggactccagctagctgaggcataagtgggtagttactggttccatgactgggaaggatgctgtaggagtgcacaaaaggaagaagttctggaatgcgagttgatgctgccagcggtccagttggctccttgccttctgttctttgtgtgttggcatcagacctctctactgcagacaggctgccctgcctgagggggcacagccaccagcagcctcagttttacaatcccagcgaagggggagagcctttctctacatctaggtatcagtttaagggaaaggctctgattggcccaggttggtgatgtgcctgcctttggacccgtcactgttgcaagggagtggagagttctaatctaggccggatcgtctgcccacccctgttggggcaaccagagtcttttaaaggagaaggcagacaaaatgcatctggggaagataaaaaagactgtttaccatggcttactgtaatagattttgaagaatatgtagtctggcagtgcaggaactcttcatggagattaaagcaggggacttgatcaaagttaggttttattaaaatcattctggacactgtatggggttgtgattggaagtgaatgacaagaggtgtcaaggcgggttcgtaggccactgctttagctccaaggagcactgatgaggcctaagctagcttagaatcctgacttactttgtttgcacttcacctgtagcgacagcatcagtgaggtggagaacagggatagagtcctagagatgttagacaggcaagacttggtggccagatggaggcaaggagaagggggtcttatggaggattccccactgccaccaagggcataaagaatgagtctctggagggctagccttatctttggaaacactattaagtgttggcagactcgatgtaccttattgcttcttcagaagtgttagtgttgttggcttcttgtggtatccagctggaaaaggaagctgattgattgcatttccctccctttaaagagcttccttttttgagaaatcagaagataggtgatacagtcaggactgccagtggagaaataggttggggagagggagacactggcttggagactctcctgcccccagcctgccccgaggcccgcgagtctgctttaggcacattcgtccttttggcatcatccttgctgggaaggcttttaagggatttaaggaaagaaatgacacaatctgattcatattgcaccagatttcctcctctgttcagaatagactatgggtggaggtagagtgactccaagagtagcagcagggaagcagggcaccaattaggagactgtcgcagcaatctaggatggggacggtggaggtggtgagaaatggtcacattctgaatacattttgaaggtaagaaccagttttagtgaggattagatgcggagtgggagagaaaggagatgaaaatgactccaaatttttggtctgggcagctggaagaacattgtcttaaactgaggcggacacaacgctgggaggagcacgtcaggggtctgtgttggacatgtttaagtttgagacacccaccatgtcttacacaaagctcccatctacttcttacttgacacaaacagttggatgtactggtcaggagttcagagcaggggtccaggcttggagagaaatctgagcattgttagcatggaggtgatatgtgtgaatccaggagactagttgagatcaccaagggagtgacagagaagagatgaaaacaaggactgaacacgctgacataagaggtggggagatgagggagaataagcaaagataagccagtgaggtgggcggaaaaccaggagagctagagggcatgattaactggtgtcaaagctgcaaggtaaggactgagactttaccaatggatgtagcaaaatgcaagacaggccaaatgcatatgctgttggacctaagcttaactttgcaaataagtcatagttccttcccagaaggagaatataattttgcaaaaagggatcatttaagatttattaaaataaatctgagaaagatgtgaagatagtaccgtaggaatccagcagaaggaaacagtgcttctggcttttgtggggaggattgagtcagattcattcataccttcattcatttgtgtgttcattcatttggcaaaaacttattgggtgccaggggttgcggggaggagggaagagagagttgttatctagtgggtatagagtttcatttttgcagatgaaaagagttctggagatggcttgtggtaatggttgaataagaatatgaatgtacttaataccattgaactgtacacttaaaaatggttaagactgcaaattttatgtgacatgtattttctcacaattaaaaatggagagagattaaataaaaaacagagcactttttggggccccatcatgaacttggtctgggatatgatgtttgaaatggatgcgccatctcagtagatggaggtaatgtggagaagagtggaggaagacgtccagctcagagggttttgggaactatcagtcctgtttgtctggatggtagggtctatcgggggaaaccatgcaagctgagactgcagccgggccagttggtgcaggcccagcatcctggctgtggatttgggcctgccttcttagattctgggagcctctgatggtttctgcccaggggagtgtcattccaaaggtgtgtatttagattaatttcattagtccttcctgttaaaccattgcctattaaaagcagtggggttgaggcattcatttttatggtgaaaattctggcctagcagaattttagatatccaagcatgtgtcaatgaagtgagtaggttatttttccatccattttacaagtatttattgaggatcatctaagtgcccgtagtgttctaggcagttgggggtatgggacggggtgaatttaacaggtctcttctcttaaaaagcctacagtctagagaaaccccctctccttcctaaacaagaagttatgccacaacgtgccatgtgttaccataggcatgccgccacagttccatgggtactgagaggagggggtgcctggcctgcctggaacactggggaggcttacagggaaaaactgtccaatggatttaaaggacaagcagggattttctaggcaaagaagcagaatgggcatcccaggagtatggtaaatcaaaacttattgggtgctatgaatttaaagctaaacttttatttcattggcttttaggtggtgctggctagagtgtatacgtttggacccaagcttaacttttccaatgtggaatcctgggccttcattggtaagtttgtttgatgccttcttaccaaattatgctatcaaggattggtatttggaatgaaaggcaaggtagttatcattggcaagttctctgtggaggttaccagccctggacctggagaagcctgtagcacaggctgaaggggtacataggaaaagtgaaatctcactgtaggtttctgtggtagatgcagagagggaggccagaggaggggaaccaaggggtgcgggggatggatgcagcgggccttatggagaggtggagctttggctctgttttgaagggcaagctagattgaaaaaagtccggggaggagtgaaagaagattttcgggacttgagaacatagaggtgaggtgtaaacaaagtgggcctagcagcagtcccataggagcaaaatcttcatcgaaaggagtcacgggcaagaactgtggtgggatctgctggcgtctgatgattctagtccatcagcaaactttttctgtagaggaccagatgctaaatatttttggcttcgtaggccatgtggtctctgtcacagctactccactctgctgtggtaacatgcaagcagccatagataatatggaaatgaatgggtgtggcagtgttccagtaaaactttatttacagaagcaggtggtgggctggatttggcctgcgggatgtagtttgccaactccttttctagaccctaaatgcccggctaaggcacatagactttatcctgaaggcagtgggaagccattgaagttattttggataaagaagtgaagtggcagaagtgatgtttacattttaggaacattcatctgatagctggacaagaggcatgggccccttttggaaggcagcagcagtcatccaggcatgaggtcttgcggtgaacagtagtgaaaatggaagcaaaggatcaatggaggagatactgcaaagggagaaccaatagcgttttcagtcttcttagacttaagaggcaggagtcaaagaggatgaaagtttaagcttgcttgtttacggtggtatctttgacagaaatgtagatgttgggggtggaaaggatagctgatgcatctggttttagatatgttgaattcaagataacagtggttcatccataagaaatgtccagcagagaattggaaatgcagggctgaagcctggcctgagaagattaagtctagagatgtggaatggaagccataggattaaacacggtctccccaagatgagcagtgggctgagctgtggggaatatgcgtaactgtgggacgggaagacgatggaagagacccagaggccatggaggagagtcccgggaagggaagagaatggggcagcagagaccagggagaacggacctgaagggaggctgctgaatttgtgacaaggtctttgcagatggccttgagaaatgtaatgtcacaagaggggaagggaagaggaagccaggttacatggagttggacataaatgaaggataaagaattgagatgttacaaaaatagaccgctcatagaaggtttgggtagtaaaagaagggagacacataagatttagatacttgcttgtcagaataacctttgctttagctttgaggcaggcaaagcatgctgtgaccagttttcatttccttctttggagccaagctgtgtttgggagtttgtgtgtaccttgggcttgtgattgtgttcttatgctcccttttgaggtgtggtgttcgtaactctgccacaacttgcaccacggaatccagcccgtgtttggacccttgccatgagacaagatgtgatctgttggggaagtagttgcatttgtataagttggaggagaaagtagagtggaccaaaaattgaaataaaccttcttactacagagtctatccaagtatggggacttgaggataattcctccagtcatgatttaattatgtatcaatttgtgctctgagtattttgagtgtaccttctttggtttgaattctaagtagtttttgacttggtttgtgtgaatatagcagttagagagctggtaacaaaagcaacagttgtaactggtttagagccatgatttattgaacactcattatgtactaagtccagtgctaagtgctattgtgtatcatcccatttcatctttgcaatgacctatgtggggggaattattaatagtattcttatttcagccagaaataagtcatagatgagtaactatgcaaggttacaagggatttgaacccgggtctgtataatccctggcttatgctgcttcctactttatcttgcctgtgtctggaatttttcctcctactaatgtagaaggactagagatagatcgagtccctcaggttaaatattcagaggctgtagtgggtgtttccacttcttaggagtctattgaaagggcagaagaagtgtgggaagtctggaagagactaaggccaaacctcaaacacttactttaactgtttccccagataaaatttagttgaaggcagcagccttgggcttggaaagaaaatagcgctagaaggcatgagagtcagattccagtcctagcattatgacaattataatgtcatttttgtttaaactcttggcatttctctccaattacctccagctttgagctccaaaggcaggctcctattttgtcttgtttttcactgtatccccagcatcgtagcacagaatctggcatgtagtatgttatgtactcactaattatttattgcttcgaatgcaccaagggacttggtacaagacacttagcctctcaggcactgctcttggcatcatggttatagaggtgaaacaggacaaggtctctgctgtcgtgaagcagacgtctacatgtgtgagatgtagaatgtgacgtcaggtatgatcatgctctgaaataaaagacagtgagaccggggtggagagggaagggcctgtccaagaagtgagacagtgagctcgttgggggtaaaatccataaaattcctcttggggtgactacagattgtcagctgcgctgtcagcaccttgttttaattgttttacttggctgccattgccaatgcccagctgactgctccctgcagcgagaactcccacctcaggcctcgctttcttcagctctgctgagcgtgcctctcctgggtcggctcccggttctcctccagctgctgagattccagcctccacagcctgctctgctggttctctgttctttgtccttagcttctggtttggcttggtccctttcacgtcatccttaacgtcctccctgggtgagctcatccaccactcacctctgtcttgaagacacccggatctccatatccggtctgaacctcctcccagtccacactcctagtggtctgccccgagggcacctcaacctgtctgtcccctcctgagtgccacatgcgtctttctccctgtgctgcctgcttggtccacgcccctcagttgcttctgcttcatgagtcgtcctggccttgtcttttccctcatattcccttggttaccacatcctgaagagctcatcttctaatttgtcaactcagttcttctctgtctctccactcctgtgtttaggattcatcattttgttctatgacagcctcttaattggtcatcctgtgttcatctttttcctccctcattccactgcccacattcctatcaacgtgatctttctaacacatgtctgatcagagctttcttttgcttaaagctctccaagagctcctcattgcttagaaaataaaagctaacccccttcagcggggcctgcagtcttctcatcatctggcccttggccccctgcagcttttgctcccccacccccaccccactttgggttttcctttttccctaactcacatttctaacctcagcctagctaccaacagccatcacctcctagtgcctttgcaatgctgggccctctcctgggaatggcgtggtctctgttcaccctcttgggaactcaactccagtttcccccaaatcttcaggacaccatccttccctacccagcacctctccatgacctggaaatgaccttcctcctggctcccagaacaccctcatgtctctcttgcaaagcacttatcggtgttactgttgatttacttacctgttatgctcagcaacctgagctccttaagggtggagaccacacacacacacacacacacacacacacacacacacacacactctgtctctctctctctgttccaagtgccagcatagtttacctggctcaggaagtttttgttgtaagagtgaggagtggtctgtttgtgcagccaagcaacagattcataatgtgataaaatgtacctgaaatgggaggttcattggccattgggtttattggggtgctcttcttgtcagctttgagtgcaggacaggttgtgttgggcttgagtttgtgacgcctgttgtgtctcccagcatgctgagacctcaggaatgtctcttctctatattctttgcccctgactttttatttttttagctcttgtttttgatggaccgataatagcaattcaaaatgaaaaataatccatcaaggaattctcaggaatgaggtccacccaccttggtcctggatgaatcccaaatttcctaaataagccagaatatctattcttgcgaactactgtctgacagcctttttcccccttaatccagctgagaatgcttttcttgaagggtaaggatacctagtggcccttcatgggggtgcctgagggcctctttgtcttcattttaaaccttgtaaagtccccagtgaatactgaggagtctaacaaataggaagaagctctgaccccaggggtcccaagtcagcatctgtactttgcatgggagctagcacaatgcacctagccaatagcatataaactctcctgttttcattcagtgccttaagcttgttgcttgttgtgtcttcttcacttcctatctctgccagagacctgagaagttgtgccaagagtgcagcttttatttggggcctcacagtaatctaggaaagcttttcagaagagagccattctcagcaccgaggtgtcctgcagaccaggacactccagcaggctcttggaactgctttcctgggatggaaatgcttgtgatgctgcctccccttgtagggactttccatatgctgttccctcagcctggaatgcatttttctcctggtttgcctagctcatgcctgttcaccctttggaactcagctgattggcctgcctcctcctcagaagcctccccaacctccctgataagaaggctaggtcttgtcctcaccattcccatgccagcatctagcgcttatggactgctcaccttgtgtcaagtactgttagaatgcttcatgcgtagctactttgtattaggggcttggtagatgttggctgaggtaagtgtcatcattgtcccaaagacactgtgtgaggaaactgaggcctcgacccattgagtaggtgacagagcaggagtttatcccagatgctggactgtgggtttacgctctgacccttctatacgccaccgttccctctgctccaagtccttgcagtctgtccttttccagcacttgtcatggaggtcatgacctcggtttgtgtggttatttgattaatgaatgtttgttccctcactgggcagcccttttgagccccaggatggcaggagtacctaggactctaggcaggtgcgcagcctggagttgaccgagagcatgtgggactgcccacttgcccacagctgcttcttgccttttgcatcacaggagggtgggctaggaccataaaagagccagcccaggcctccccctttctggagctcactgagtgcgtgcatggggtttggccgtcaccctcacttccatggttctgcatcagaaccagctgtgctgaggaaacatctgtgccttgttaaggtctgttccttctgcccactccctttgcccttttctctaccttacaacccctttgttgtccttcttcaaggaaaggggccccctttgtctctcagggcagagccagctgcccttctcctggtcctcttgatctgcacacactctgaggatgactgcccatggcaggtcatgatggtccgtctgccctggactgtggtttctgtggcagagcaatactttgtacagtcagggcccatggccctacggaaggctgagggagagcctgaggtcattgccttaagagaagctgcttcatggtgcagttggtatgtgtgcatgtgtgtgtggatgtgtgcttttttcatgcatgatgtttttatttgtgttatttatccccctgctatatctccctctctcaggggtctaacatggagctttgaatagtagatacatcatagctcttggctaaatacatattttctcccccgctgatctgaaggcacctcccttttcccctacccctcactttggtaccttggtgacttcacagggttgttatgacttcccagacctcattgagattgcagtgatgtgaaaaccctacctagattccagccagctgggcaggggccttggcagcaggggaagcccagttccctagggcaactcaccaggcctccagggctctctagggccaggctggctgagcttcaactgactcatactgtttttgactgggaaaaataaaaattttaaaatggcttctgaccaaatggggaaagtggatgtgggaggaggagaagggggacgttagccacaccctaggtacatttgccagcagcaaactgagatgggcttaaagtgtggctggcctctaagacgcctgcttcaaagggcattcggcacactggtctcaggctttggaggcccacctgcttcagaacatcagctccctgtctgtctagcgttgtgacttaagacaaacccaccaagctcccttagcctccattttctcatctgtaaaatgggattgtaatcattagaataacctttataaggttcttgtgagagtggaatgaagatgtgcttagcaccgtgactggcgtgtagaaagcaccaaatatttattatctgttaacattgtttttgtttgtcaaagtattattgttaataataattataagaagactttggaacagatataaagtctaaaatgcaggctgtgatgaaagggagatggtatataagaaaagtgctttttgaattgcacattatgtccagatattattattagcacaagtatgtttattattgttttgtctttgaaaaaaatgctggagcacaattttatgatgttgagtctatgtcctttgttgttttgttttttgttttggaaaaaggtttgtcacattggcctttattggaatcttgtccagtggatgtatgacccacattggtgaccctgggtgccaaatgcctggacagcacctggcaaagaagagccattatttcaatggtcactattgtttaaaatcgttatggtaaacaatacctgacagaagttcttagaggttcattgacagtaaattgtgggcaatgcactgagttattatttactctagacctgagaaattctccctctccaagttttgtgccttgtatagctaaataaatataaacaatttccttagaatttgatacaaacagctaccattgtcttcacaagtatgttagaaatactttcttaatagcaactacttgactgttttgttttttatctccattccctgccattactctgcctcttcccatctttctgaaataaaagtgagccaaattagccatttaaaaaatacgtagatactttcaggcagaggttgaaaactgtctaccccctggctgcatctggcttgcagatgtgttttgttcagcactcatagtgttttaagatgtttaaattagtggccaacatttaaaaatgggtagatttttgaatcaaaatccagatttccagctcttcataaaaaatcaaaggtctagtgggcctgggcccgtcttccttgtggcagtgcggaagagtggtggtccctcccctgggagcttgtttctccagcctgcctccggctggcccagcctcactgtacctttccatggcctgcttggcccctgtaggaatagagtttgtagtctctgcttaatataactaataccccttagatactgtgtatcagtttagaattatttccactagcaactgtgaccataggtaggaaggatattttacttgctaagttgtcattcttatgatagcccaaatggctataatagtattttaggctcttttggatttaatagaattaccttctctcctctctgtgggatttcctcattaacaatttttaaaaagtgttcagcaaggcttatatagcaacataaaattttaaataatgcaggatataaatttctatagctgctattgaaggggggttgcaatcaagtgaactgctttaattcaacaatttatggtgttgtaaatttgaaaaataaaagacacttagttttttttttttttttttttttttttcagaataaaataattaaatagttgacctttggcagagtctttgttgaaataggcaagggttttgagcttctcagaacttgagaccattgccttctggagtctttcctcagatgagtctgtgcctccttctagctagtgcactctgagcactgtggccacatctggagggtggagaggagacttagcttccaatggtggtcactctaggggaggggggcccttgcaaataccaaaatttttttaaattattattttatgagcttttaaaaacttttttgtttttgtcatcacaaaagtaataaacacttgtgataaattcagacaacactgaagtgctttaacataagcaacaaaatcttctgtgacctcccccaaccttttccaaccattccccaaacataagcacttttgagagtttgcttcttatactcctggacttttgcatttgcttgtttctctccacccctaccctttgccctcaaccacgacatagatactttcccttttgttttctaaagatagactgtccctgtgcatggtgttctgcaactttctttttacagctgtcaattattatggttatttttccaagtccatatgtacagataaatgtacttgttacttttaaaagttgtactccatgttatggttgtatgttaagtaaatttcgttttgtattgatagacactcaggttgtttctgaccttttgccattgcagtcattgctgctgtggaaatttttgtgcacacgtgtgaacttttgcctgagattttctttggtatagatacatagaagtaggacttttggtttaaatggtttgctgtttaaaatttgaatccataatgccaaattaccctccaaaaaggctgtaccaattcatgctcttcctaggagcatcccattatggctttgctaatctagtttttgcttacacatgtgtaagaaagtaaatcttaaaagcctcacaaataatgccatcaaaattacacgtttatcttagaaaagcattcagaatatatgtctgtagatttaattatatgatttttatatcttgactttgatggtggttatcatcctgcaaggtgacaaaaagttccctaaatactgtacacaattattaaataattattaaggatatcagttgtgccaggtagcctttggaagaattacagccaaatcacagcttccttttccacagctctgccaggctggcttgtctttcccaccaagggctgagccattaatactgaggctgggtcagcatttgaaggggccctgccagggagtgccaggccttgggccccagagacctggggagtgggagatggcaagtgactgctgtgaggctgagacaaagtttttgcctacaacaccccatggctgtttcctttactgagctagatgaggaaagcaaagggaagtgatggtccaagacttctggtggtcacttttgttcatagatttctcacaggagtgctaacatttaggctcatgtttacgaaggtttgaaaccttagcatttgggaaggatctgcaaattctcagccaggggccttaactgatcacaggtagttgtgaactcttggtccaggctgtatctcaaggcttcttcttagaaggacaggtcagcttaccacctgctaactgcatgtgaaattttgaattctgccttctctagctctcctctctggctctgagctggtatctggcatttgcaaacagtttaccctttgttgacttcttagcactaacctcacttttatgagtctgagtagacttgatacccaggccatttatcctttgagggtgccctcagcttcatcagacccatgctgggcagtctggcatagtggtaagaggcacttggagccagacagacctgggttcaaatcctgacatcatcacatttactaacagtgtgaccctttggctgatgacctcacctctttgagcatcagtgtctccttctacaaagtagggacagtaattctttcccaggggtattttgaaggatatacgaattaatatttgtcaggtgcctctcagatgttcagcacaaaataaacagtgtataaatatgagtcctctcttatcttcctgctgtagagagaaagttcgttggggatgctccaagttggtggctactggctgaggatcctggagtaagaggaaggctaccatgtaaacccagagatgaatcatgaacaatgtgtattctcaggagcttagtatttgatatgggagcctaacaagcaaatagtgtgtccagtaataggaactgattaatagaggaaagattaattaaccttctaggtgggtggggtggaaaagtaggtggggtattgaaggttcaacaggagttcgacagagaagatagaccataaataataaatatacggctgtatccactagagataaagttacattgttttttatgtacatgttgacttcttttggccttgccaatgcactgatatattcaaattcagctcctctctttttctcttcccttttcccttcactctgcctttcctccagccctgccttgaaatactcagccactgaaaatttcttaaagaatttctttatactttagtaagtcctcagaggataccagttcaccctactgagattttacaagaactttggtgtagctggggttttttttgcattcctttttctacggtagatataagttcttttgggttgcccatcaatgaacaaactaccaaccatttgatgtttactgcgtgactcctgtataccaagcacatgtgccatttcacttagtccccagaatgtcagagcagctttgtgaaatgggctgcccgttctttcttatggatgaagaaactgaggcttaggtaggttaatatactgaatattatacatgtagtgagtgggaaagccacagttcacctccagggtctttttctccctctttgctgccttgcttggggtcctgctcatagtaggtggacagcagatgtttgtctgaacatatgagaacactgcctgccacgtgccggtcagtttgatttgtgctgctggttttgtaacccacatggggcaatgacagctgctcaggtactttcctacctattagtggggccccagggtcacacatcagtcataattgacaaaaaacacaatttccctttcctctcaacttttatttctaaggtacttgtaagcaggtagattagattgttaacttttcattttttgctttgtctctctcctttaaagactatgtgaaagaatacacagtgccctgagagcctggcctgggaatcagaaacttagattccagcttcggttctgctggtaactcctcagtcattatgggtaaataatattccctctccagaactactagattgtgtccttggtgcagtctggggttcgggtggtcctagggaccctgcctactgcatgaacctgttatcaccatgtgaggctggaaggatctcagcgttggtgttgggcaggcctgagtgagcatcctggctcctgtacttcccagctctgtgacctcgggctaatcacctgactccctgatgcttgttcttgtctacgaaggagggctaagaggacctgcttcccaggatcactgtccagattgaatgagaaggaacgtcggcttccttccttctgtctccaactcctgagtgcactggttttagactaactgggtgtttctgcagttgaaaccaaaacaccttcattaggtacaatgttcattatacctcgcaacaccctgagatactcaactcttagatttcttgaagctcttttttgttaagaaactcctcaaaggaagatactcttctaccccattgagctttattagtgcttcaatgacagcaccttattttttcacttttttcccccttgcagacagaagctgcagtgtgaatcagtttgcatttatataatttcttttgcatttctttgcaaagaggaaaactccattcatttagcaaatgtccgtcatgcccaggccttatgttaggtgaagggatttggagagaaatagagtcactgacctcaagaagcttacagggaggaaaggtgtaaatacataaagtgacacatgggtttgtcctgtcaccaaggtatgcagtagatgctgtgggagaagagaggatgacacaggttctctcttggaagacctcatagagaagaggtgacttgtgagcaagtctttttttttttttttttttttttttttttgagagagggtcttgctctgtcacccaggctggagtgcagtggcatgatcctagctcactgcaactttgaaatcttgggcttcaagggatcttcctgcttcagcctcccaagtagctggaactacaggtatgtgccacttgcctgtctgatttttttttttttaattttttgtagagacagcgtctagccatgttgcccaggctgatcttgaactcctggcctccagtgatcctcccaccttggcctcctaaagtgctgggattatagacatgagccactgcacccagccgttgtgagcaagtcttaaaagatgagtaggaaggagtctgtcagctgtagaagtaggaagggcccaggcagaaggagcacagggcagaggctagagccctggtaggaggtgacacactgggtgcatgtctggagctggagccaagaggtggaggacctaagtggctacatcttggcagtcacccatatattggcaagccccaaatctttgtaaccagcccagattgtcttcctgagcccccaactcccatacccactgcccattcagcagctagctgcatgttgaagtgtagtggtcttcccagacctaacataactaaacagaagtcttgatttgttccttcaaaaacaaacaaaaaactagccttgctcctcctcagtcttccccatgttatgaggtccccatcatttttacctggctacccaggcctaaaatgtgggcatcatctttgattctgcttcctcctgtgttcttcacatcatctgtttgcaattctttttttgtttgttttactggttttaaaaattatttatttattgagactgagtcttgctttgtcatccaggctggagtgcaatggtatcatcttggctcactgcaacctccgcctcccgggtttgagaaattctcgtgcctcagcctcccgagtagctgggattacagtcgtgcgctaccactcctggctaatttttgtattttcagtagagatggggtatcaccatgttggccaggctggtctcaaactcctgacctcaagtgatccacccgccttggcctcccaaagtgctgggattataggcatgagccactgcacctggccaatttatttatttttaattaacacataataattgtacatatttatggggtacatagtgatgtttcaatacatataatctgtagtaaccagatcagaataattaacatatctgtcatttcaaacattgcagttcttgacaactcttactgtatgtcctggaagccaccactgctccttattattagtttgtttctttatcaaccaagcaggccagaccactgctctaccctcgttcaaacctccactgtctttcagcaggtctcttgtcagtttgctacataggcaaagaggtcttttaaaaagcaaatttgtgtcatttccctgctctaaactctccagcggctttctggcatctttggaatggaatctaaacatctcgccttggcctgccagcccctcctgctcatcttctctggtctcatcccttggcactctctgctcactccatttcagctgccgcatcttttcttactgttccccctgttgtctcatgggctttgcacttgctgtcctccgcctgagctgctcttccccagacaccgcctgtctcaccttcactccacgctggcctctattcaagtgttctcccacctgtctgaaaaagcaccgttctgccccctctccccgctgcttcaaccattctgtcctacctcgctttggtttctctcattagcactcatcactctctgactttatatgatatgtttgtttgtcttcttatttagtgtttgtcttaccccacaagaatataaatccatgaagatgggacctggtcttatctattgcattcagcactctagggcctaaaacagagcctggcacacagtgggtgatcctgaaacacgaggtgggtggatggacaaatgactgagttaatgcatgcctgcatgcaagcgaagactttggagtttatttcataggcagtgcaaatctagtagacatctttcaggaggtgagtgacgtggtcagcacttttattttagaaagccagctggtggcagtgtgggggctggactgtaggagggaggcagcagaattactttagcggctgtgaaaatcgtccaggaaattgatgctgagtgttgtgctagagctgtggggatggagaagaggggacagatgacaggacctgaagatctttgagtgtctttgatttctattgggataacttggtatagtgattcctttataagaaaagcaggaggggacgaactggtccagggagagactgttgacactctgtggtgtttttctcaccaagaaaacctaagccctgggatgcatgttctctgtagtggcattggctctctggggagtgactctgctgctccgcagcctcccctgttccattttttaataagagaatagtcaagatggtggtgtcagtgagtgggagtcttcttcatgcagatggatccattgatctttgcatactccaagccacactaagtcattggttcttttctcgcagtgggtacatttcaccttatttgattctgatctgacaaatgctgctttttttcttttctttttttttctttttttttgtttaaagaatacctagactgtgctcaagttccaggtggggtttacagataactggggttccagcatctcccttcttacaaacacgaacaggagcctttgccgtccttgggtctcagggaggcagaccggcagcaggcacacattcctggcccaggcgtagccatgctgtctggtgctgccttttgagaccttttgtgtgtgtgtgtgtgtgtgtgtgtgtgtgtgtgtgtgggcttgaatgattccttctttcaaaaattcaaccctctccaaattttgatgaaaaccttttcatctctgagtaagcacattatttcccatcttgatgaggtgtgtcccctctgtgtccctgagagtatgtcatcccagccttttaaattttattgtatttttttattttttattttttcatactagtcaagtgcagtagtgagaagcggggaaagagtagaacaaggggccgggggcggtggctcacatctgtaatcccagcactgtgggaggctgaggtgggtggatcatgaggtcaggagattgataccatcctggccaacatgatgaaaccctgtgtctactaaaaatacaaaaattagctgggtgtggtggcacacgcctgtagtcccagctactcgggaggctgaggcaggagaattgtttgaacccgggaggcagaggttgcagttgagccgatatcatgccaccgcactccagcctggcaacagagcaagactctgtctaaaaaaaaaaaaaagagtagaacaaggagtttgatctgttacagactgaactatcaatggagataactcactaccttcggaccagcctcatcccagtcttttaagcctggtccagaattcctaatcctgcttgtcaggcccttcaaagtgaaatgctgtaccatctgtatagctggattctcacctcctacctctcctctcccttccaaaggttccgatgtcataggaatctacgctagagggcttcctgtgtgccgggcactgtggtaagcacttcacatgcattctctctaatccttaccacttcggggatgtaaggattataatcttctttttacagatgaggaagctgaagcttgccactgcttagtagttaagagtatgggcttacagccaaacagaccctggattgattctcaactagctggggaccttgggcatgctacttaatttttttaacctttttcacatttagaagataaagataatatatagagagataatatagaagattatataggtattatatatatatatatcttctatattatgaagataatacagagttgtgataaaaattaaatgaaatgaccagacatagtggctcactgttgttttgttttgttttgtttttttgagacagagtctcgctctgtcgcccaggctggagtgcagtggtgcgatctcggctcactgcaagctctgcttcccgggttcacgccagtctcctgcctcagcctcccgagtagctgggactacaggcgcccgccaccacgcccggctaattttgttgtatttttagtagagacggggtttcaccgtgttagccaggatggtctcgatctcctgacctcgtgatccacccccctcagcctcccaaagtgctgggattacaggtgtgagccactgcgcccagcccatagcggttcactcatgtaatcccagcactttgagaggctgaggtgggaggtcacttgaggccaggaattcaaggccagcctgggcaacatagcaagaccacttctcttttatgaaaaaaaaaaattaagaaaaataaaaattaaatgaaataacatgtaatttcctaagtacattaagtacgtgcctactatgcgccggacattgtgctgtcagcaaataatagctcatcgcagatgctgttatcatcatcatcatcccaaagccacagattgagtctgtaggtgaggccctgcctggctccaaagattgtgtttttttctcctgttgctcccaagttcacctgtcccaaactttctagcccctaagtttgcttccttgcgcttttctggttgtgccatttgtccctgtctgggcagtgggctcaagctaaggcacagcagttttccagtccctttgagctactgacctcttttctgtcattgactgaacagtttccggtggctgaatcgtctgtgtaagagcttggacaattttttctgattgttaccatcatcgtgtttactgtgaaagggcttcctgtatagttgtttgtgttagcagcattgtctaaatgaaacaagagtggcaacagaaagggttggtgagcagtcctagtcttttggggtcacagatcactttgtgagtctgaagaaatttatagactctctcaaaaaaataaacgacaagacaaatacaagcccagcatttttcatgagacgttttccctgaagttgatctggaaggctatgtgctcttttgtcattgtgctactccacattcacagccatgaagggtgtcatgtttctgcagggtgtttgtatttaagggttgttgggcaatttggcaacactatacctgtttcattgatactatgtgctatttgcatttatttcccatatctgagatacgtattcacacatgagaactggcctggccattttgatgagatgtacctgctgatttgcacataaacacaagccatggcctgcatctagaggatcgactggagaggcttttttttggcccaaaacatcagactagtaggaattttattatgagttatagactaaaaggggggataaacttagcttcagcagggtttaatattctcaattcaggtaagtgtaaatctctacttttcattttaaacatttttgaaatttcagtctttaaaaaaatgcttgttttttttccttccaagttttaaggtatgggtttgggagaaggcagattccaaacactttaactcttcgacctcagacttgcttatgagcctctctttggaacatttccagtgaaccgtggagcaagcctgccacatccagcagccgtaggcatgatgatcactggtgccgatggcccctccactccctgcctggcttttgaggccccgcagaaagaaaggaacagaatcctttcataaggaaggccccagaatcctttctcctgctgtagctatgctgccagtgtcctctgtagatggaaatggaacttggattttgggtgccagaactgaattcatcacagataagattagttgatataaagctgtttctgatgagcagtttttcctccagagttttcatttttgctttttctaaattatacaaaataatagacactcattacaaagggaggatcataatgctccatacctggttttgaattccacttctatcacttattagatgcagccctgggcaaaacacacgccctctctgagccttgatttttctcattgaatgggagatctaattattttacctcataatactgctgtagggattgaaggagattggtataaataatggttttctgagagtctggtgtgtatttgctttttttcagttaatatgaattgagtacctactaagagctggtcactgttctagttgatatggaaccagtcaagagcaagacagagagggtctccgctctcatggtgctcacattctaatcagaggaggcacaagaacacaagatcacttcagttattaagaaattagaacccaggggtagcatgagagtcacaggaaggacccctttacgtcggatggccagcagaaccctccctgaagagctcaatgctttgtgacccccccggtcccaagttttccaggactcctacttttaaaaacactgcccctccaagtatataggtctcaattttgagtttggaaaatctgaccacatattagttctcttgttcattaatgggcttcccatttagagagtgagttcctggggcaggagccatgtcacaggaccttttgaaggtctcagggccaatatggacgacacttctcttgaacactcacccagttgggctgacatgaaaacctcatggtgggaggtggggggtgattagtttccagccagagcccattttgctccattgctgctttgaacattctggtttctaaggagctggaagtagtttctctcagcgagaatgtggcacactgtcatctcctgattctctgcatgcagttcttcaatggcttgttgaggctgcgtggaagcccagaggtcggggcagttccaactcacacactggcatttgaacggcagagcagtaagccctacacctgacataactgcattgccttcttggggtacggtacggatttttaaatgaccatttcagcctgctgggctgggcaacggtgatccaaactgatgagtcaggaagccactgaacagaaaggcaggctgcatctgactcacctgtcatgtcgatagttgacctccttttgtttgaccttgatttgctcagtgcaattaaagatgctgttgtgagtgcacttctgctacctgatttaaataaagtctaacatgtgacagctcagggtcttaaatgcacacacgacttaggcagacggacagatgggtgagtggttagcctttcacttacctctgaattgtaattctatcacaaggaaagggcttaatttcaggaacacggagtaattatttgagactagatacaatgccaaagcagcaggccttgattccttgctacagggcagcttaatcaggaaatggcctagatggccgcctttcaagtaggtccttgcagtagcttggcaacaggcacagggtcataattggaagaatttggctgtgagtgtctgtgggtgtttacagtgcactatagggcagggcttctcttatttatagaatattttgagcaacaagcagcagaaggctgaaaagccactaaaatctcgatttatttttaacaaattccatttttctcctcatcccagaaggagaactgagttattaaaaaacagttaaaaaatacatcattgcagagcatgccatatctaattatggggttgccagcatcggcctgcagccacatttcaagggcttcgtaaatcaaccatccattcaatctgtgaacttatatgactcctgttctccatttagatgtagagcgaaattattggcaagtgggtgctgatcagaaaaagttcttccctgtctaaattaggagatgggagggataaatatagaatagtatacttatgttctcaaaaggagataaaatcattcttcattgtccattatacttagctgcacaaacatccatcccattgcactaaatagccactttagagttttcacacattgcaatggcagttctgtgccactcaaaggcgcagtattgtgatatctcgctgagcctaaacctgagtgattattgctcacgtagtcatgaagagacataaacccagtgcttttttgcctgtgttgtcgtagtgtactagagctacaaggtgggccttcagagagacactagttttaagtatatctcattgtaggtggggaagcagaggcctaggcaagggagtgacttgcctagggtcccattaagagtcatggcagaggtgggctggggcggcagtctctgtgcttctcttgacagtgccctgctgtgctcactggagctactgtattaaacagatacccttcaggggttcacagtcttagaagacacaggcacgaagatggccaaacaatcagcccatgcataagcagaccaagatatgtgtatataacagattagttgagtggtagagaaaatgagagtggggaattttggaatctatttggatagcaaagcaaaggtaacatcagttgctctctgacccacttgggaaaagcttatagagatgctatgaagttttctaatggaaaaaggtgcagtacatttgccatgtgttagtgggaaggtaagtatgatgcagtggtgggtggtaggaggcagtgaagataagtattgcaactttggaggagccctgggaatggattgttgaggtgatttcataggaatacgaaagggagcataggaccagggcacaggccagagacaggcaatcccaagttccctggagtaccctgcccttttctgggaaagcaagtgggtggcatgagtgctatgttcccaatgctctggccccacccctggtagaagaataataactgatcatggtgggttttttctgagcctctgtatctttgagtagcattctggtagccaatatcagtggactggtgccagcctgtgtggtgaacctctatctctttcttgccctgggctgcatgtcaggcacagtgcctaagccggagtgggctttggggagttacttctctttctgaggctggaaggggcagagggacgtagggaaaactttgctagggagggcaaactgtgaaagcctctggagaagtcacctgttgggataccaaaggccagcggttttagaggatgcgaagaggccgggcggggttggtctgggcctaaactaaggctgtagcggctagcatggagaggaacaagcgacggggagtgattacggatgaggaagacgtactaggatttggctacagacagacaaccaaccagagagtaaaagacagtgacatgctaggatgtgaaccacctactacagagaaggtcagaggtggggagggaggaatcagggctgtgggcagatccagcagctgggatccaaagctgaagcccttgggttattgaatccattctttctgagaagagatggttgatcttcctgcccagggagttcctagccagactggacagtggttctcaaacatggtgccaggtgttgtcagatagcaaacaattagtttgtacacagaatgtccccaaggtcacctacacatatttgtttttcctaatctttgatacctacagccacttacctgctttcgagttctcagagttgagaacatataaatttgcagtaacaagtgcacaggaaatacttggaaaatggctgatgagctttagtttggaaatttcatttttttcttggatctggattataatttcagtacaagctagcaatttttcttgttggtaaaatagtttctagttttaaaattatttctgtagttaataaagttaacactatttcatgatggaggctgccccagctctgaaccaattttcaaaaggcagattctcctctttctctctcttatttcttgctcttgaacatttcactgtgttctagcaacttttcctgtgtgtgactcggccaggagactgacttgagtaagatccaggtcaaggggttgtgtgggtgggtcggtggtaaggaggtgctgaagaacactaaaacctttgcctgagaggagtctgggaagtagcctgcgaactggaatgaccccaggcttcctgtcacggtcatagcccatggagttggcagacttgatcactctatattgtgtgcccccaggtaatggcattagtcatcgatactgtcttttttttttttttttctttgagagagagagtctcagtctgtcgcccaggctggagtgcagtggcgtgatctcagctcattgcagcctctgcctgctgggttcaagtgattctcctgcctcagtctcccaagtagctgggattacaggtacatgccaccacacccagctaatttttggatttttagtagagacggggttttgccatgttggccaggctggtctcgaactcctgacctcgggtgatctgctcacctcggcctcccaaagtgctgggattacaggcgtgatccactgcgcccggccaatactgtctttaaatcgtccagagtaagaaaatgttgatagcttgttgtcacagccctgtcattttacacattccctgaattattgtctggcaccagcaggtgttccagaaacacttttggttctttgagccattactggtcattcctgtcaccactgccaccaccagatgtggttctgagagcattaagtaaaagttttgaaggttgtgtatgttaagactggtgcaaagtccatcctccttccttcgggctgatcagccacaccctggctatcagcacttatttactcattttcaaagtgacagaatggtccagtgggcaggggcataaggggtcacttcctctaaccacccgccagtgcaggaggatcccatctgcgcagtggctgcccatgacaggcagttccctagccccagtcggacatctccgcaccaggcatcctgctcctgctttatggacatctttggctcttaaaaatcctcctttattctgaccgcagatctgccttttggcagtgtttccttagtgacctagttctgctttttgtggcaacacagaacaaaggtcggtaggcatggcacaattccagcttagaagtttgaaggtagtgctcatggacccacatcctttccctctccacccactctatctccctccacaaggtttatgttctccagtgccttcagccattctttctatggcatggcagtcagtattaatcccagtaaaggtaacatgtatccagagagtgcttgccatgggccaggcactgttctaagctccgtacgtgaattgtcttatttatgactcaaaatcaccatatgaggtgagccctgtcatcatcctcattttaccaatgaggcaactaaggaacgagggctcacatcttgtcccgagccatgcagtcaagcagcagagcagagatttggggctaggcagtgtgactccagagcccgtgctcttagttgtggtgcaagactatcttacagcctttcctgcatagtgccaaaaataagcccatggtgcactagacttgggctggccctgctttaacttattttgcaagaaatcattagacaggagccttagttgaaccattttctgtgaaaccttcagagtttgttttgacagaacagactgcagggcagaggcatctgcactgtccccaacaaatgggttcatcctgtagctctgccaggccccacagggttcataaaatggtagctttagatcaaggtgacaaatacagggctcttgatgttttttttttttttcctgaacatggtgcctgagcaataggtttcttgtttaaagtgcttagtcatggttttatggccagaaagtagaaggagagaggtacctaagaattgcaaaactgggtcatctcttcaagtgcctaatccaatattcagtctcagagaacaactccagcagttacgggggtggaaggatgtgatgaccacctaccatccaaaactgggatgtaggtgccaaatacacattctcctgaaatgatccctggtgcctctagccaggctcttccaggagtctagagaaagatggcccatgacttcatccagagtctttgcttcctgtgctctgggatgcctgggcttttctggccacagccatacactgacagggccagaagggctgagatgctgggattgaaccatctttctctttgtgagttgctttccagatagcacgcattccggtcactattttccagagatttaagcagcaaagtgagggaccctcgggcatcgactcagagacctggaggggagcagcttgaagcaatgtaaaaagcactggataaaatctggttctaccaaaaatagggctatgagagttacctcacctccctgaaaggtaatatctttatctgaaaaatggggatgataatactactaacctggaagattgacaggaggattagatgagattctgcatggacataacagtccttggcatgatgtctagcagtgaagaaacataaatatgagaataataacttccttcttcctccgctgtctattccttctcttattctagtcctgtctgctgttgggttttgtctgttgttttgggtaaatagctaacctctctgcctctttttgtctgtagaaatgctactggttctgaatgggtacttcgcgccccctataggacatcgtgggaatgtgtgtgggtgatctggatgtcacagtgacccagacgaggcttttactgggggaagaggggaaggcaggggtgctagatataatgcttggggaacaaaagattgcccaacatctgcatagctgcctaatgctcagtgcattcttgtgggcaaaaccctgcttaaaattatctgggcctagagtctgactccaattaacacataaacacaaataatttttgcatgtttttaatatatactgaattttctgcgaacacagctaccaagtatataagatttacctatttgttatgaataggtgcaagcatttcatatatctttcatgatgttttctggtgtagcggtgccccaatacttacatattgatttacatgttgtcttatttttaactatatttcctttcttctttgtattacagttagggcattatattgattatttttggaattataagtgttgtaaggttatattacttacagatttcaagagagctaaagacatatttaaaatatttttattgcatttttgacaatatgaaagagcaagagagagagagtgtgtgtgcgtgcatgcatgcacatgcttacaaattagctagaaaaatcctaagacagactttaaatgaaaagaaatggtttcatagctcctagaaatgtccttttacataaggatatgtagtagaagtccaaatttttaactgcattcattgtcagagaaatgaggtgttttgatgtttcccctgtcccttttagaaagtatatgatcctaaaagagcctgaaacagtttccattgtcatattttttcatttttgcaatctctatttttttcactcctcccacctgtgcatatatatatttaaaagcgtccccatatagacttttaaagaaagaaaagccagccaggctccccactctttactaagtttgttttgattgttttgtggcctctgcctgcacctcggcctgagtcagactgactctgggagctgtgggcaggtccaagggaaagtcaaggaggtaatgaggcttctcgtgggggcaacttgtaggccaagttgggtgggttgaagtcagtctaccagaagcttcctgcctcaagcctgggcctctacctgtcctgaaacctgagggctctccagttggaccacgagggtctgacatccaggaggatccccaggagagagcaaccgtcactagggaatatgctgcccagcactgactgtactgagcagcagtgttgtgtgcctgttgggttgatgccatggatagccaggcgttcagaactgaacacgacacctaaaaggcaaacacgaactgtgaatgtgccagtgtcagatgctgccttggtggtcatgtgtgggctggcagtaagcttttggtcccttaacactcgctgttggaaatttcccaaggctttcatctagggtagctggtgtgtgatttccctgtcctttgttactcctatctggaaactagttgaaatcttttctatgatattgatatagttacagaaaatctgaatacttactactaagttttatagttctgcttagttcaaagtaacacaacctcataagagaaagtttgaaacaggtagagaaattgaaagatgaaaatcactacccattatctcagcccacaaagatagctactatcagcattttggtttgtttcctttcagtcctttctgtgtttatgaaattttattatataaataattcatgtccaatatagaaaaagatggaaaattgagaaattataacgttaaaacaaaactgacccatctcaccagttggagatgtcttaatattctggtgaatttttttttgtcttttttctatagacacataagaagactgggaaatattgtgtatatacgtttgtaccctttttcaccaatgtatatcaatgtatatcagttcactaatgaatactaattaaatgaaaatttattaaatgtatatctatttatatctattgatatattaacagatgccagtgcatatctattaaaagagtactatgtaagagatgatgttcttaaacataaaatttaatttaggcatgaaattactttgtcaaaagatatatcagtttatattcagatatacagtgtactgacctgcccatttaccacatcttcactaatactggtattatctttaaatagaatctttgctaatatgagcagtgaaagtggcatattatctattaaattttgacggttatgagattgagcatgtttttgtatacttactggtctttgtgtttcatcttttggggtttcctattcatagtctctgcttagttttccactgaggtatttgcctttttattgatttataagagattttgttttgttttaactcagaaaaggtagtattgcttcagttgtcacagagctttggagtcagacagagctgggtttgaaccctggctttcctacttgtgagctgagggatttcaggcaatttatctgacccctctcacaattaattagttcttctttgagaactaaacgaaacaacactgactagcatgaaaaaaaagcctggtgtgtggtttctgccaatagtttttgtgttgttatttttgttgtgattcctgcactgagtattttctcagaaaaatgaccttgagctgtacgactcatgcctgttcagacccacagacacatgatactcactatatccaaagctcagaaaaatgaaactgaaatcactgaagtttgtgggttttttttttaaattcttcttgccagaaggagacaaatgaaggaaaaaaaacaagccgatttcattttcattaagaggaatttgtagagttatttctggggtcaggcaggatacattcagacgaacattttagatctagggctgggaagatcccgagactcgttatagattacatcatcttcctccaagtgcacttgccaggcaaatggacaagtgcattttagaaaggttttcagttgttcacgtttaaacagaaaggatcacctggctaacttttagttaacccattgaacagatgtgccattcccccagcccattggttattcatgtccttgttactggtttttgatatccttgccccgtaggtgggaggagggatgggtatgagcctgccctgccctctttctcctacttgggacagagctgttgcttttatttgctgagtcactgaagcaatagagcatgtgcagagtcccagcctggaggtgggcatatctgggttccagtccctgctctagcccttctcagctgtgtgatcttggacaagttgccatacctctctgagcctcagtgtcatcttctatgtgatgtcgatgcctcccccaaaaggtcgttacgaggaccaaaggagacacgtcagggcaggaaccatcctaggcacgtgtttgatgctcagtaaacgggacgtggtcagtgttcagagttgtgggggtggcaggtgactgctctgtttcacctccactcacagcaacagggcctgtggtgtcacctagacatctcataggcatcccacactgaacatgtcccaaaccagcagctcctccctggatgggtggatggtgtacagggacctcttcctccagctgtcacatggggcatgtacctggcaagtggctttgcagccctagctgcccccttggctgggggcctttgtgcagttcatggactgggagtcacccccatgtctagaccgtcaggaaacccattggcttttcctttagagcataccaagaatcaacttctcagaacatagcaagagttgactttttgtcaccctgccgtggccactcagactgactcctcttacacctcacatcccattgatcagcacagcccctggaaatatgtctagaatccagctgcttctcatcacccccacacctaatacagagggctgagtcatagcatctcttccccggactgttgtagccgtctcctaactcagcttcctgccctgcttttacacacacacacacacacacacacacatggtatcttctcaccactgcagccagacttaaaacctaagagggatcatgtcactccccattttactcagagtcaaggccaagatccttactggggtctgcaggcccccacacctggccctctgactgcacccctaccttccttagctgtctcctctccctagcatgccccaggtcgctggtcccctagcactgggcagctccctgcggccctgttcactagctgtcctctgcctggaacacatctgtcacctctcacctcctcctgtccagcctccttggggcctttctaactgcctccctcctgtggtctgcctcctccccatctctgactttcctcccgagcacttactgccatccagcacccgacataacttacttgtttcgtttgcttgccttcctcaccaggaggtgtgccagatgaggacaaggatttttatatccctacccccatctgcagcactgccatggagaacagtgcctggcacttggatgccctcagtaaatatttgttgagagactaataagtgatcgtgggccagcatgccaacagtgtcttcgttattacaaaattgtcccgaattgaaatttggctactacaagcagtttgtggtggaaatttactcaaattaccaattctttcactgaagaaattacctggcatatgtgggttctcaataaactgtgttggattgcctcaaggctttggggcagtggtagccgtctgaggcctccttgccagtcaaccaaaccctgtgctgggtgggacataagagatgcccccagcatccttagctgatgctactatgtcaccccagaatccctggggcagcccacccctcagcagcagctgtcaccctgctgggttccgcttttcctcctgtgggcttcgtctccctaaggaaatcattgtccttgctttctacatcttatctccctgagcagctccaaaattctgttattcatatcccactgacctttctcattgtcctagtccaagcttctcacaggaggagttgtctctctgttttatattaaaacaaagcggttggactcttaaaactctattcacttttcagattctttggagtcctcaatgcttcctgctatgaaatgctgcgctctggaatgccttccagacccacccccaggatacctgtagccttccctgcagccactctcctcaactccctcctcgttcccaggggtcaatgtcctggatctctccagctttaagttccttcatgtcctcttgccacccctgctctcaccatctctgagttcttgtatccccaggatttcaacctgagtttgcatctcctgacatcacttttcccagccttctcccttttcaaccagcacaaggccatccacttccatggccatagtggacgccactgagcatgctaggtgttttcttctattcaactcatgtggtctgcacaacaacccagtgcggggaatccacccctttcacagatgaggcatctctagctcctggaagtcacctaacttgcctaggacatgcagctagtaagtggcagggctgggattggaacccaagaggccccgccctgaccaccatcctgccctgcctctcctcgggcacccagaatcccctcactctattgtcaaaacccaccttgtcctgcctgtctggtacctaggggagaaccctcagcctcttcttctgctgccacttgcttcctcttctgccaggaaggtcccacgcctggccagcctgctctggagacacgcccactgcctggccttgccaggaggctctgatgctctgcaggcttcctgtcccacggatcccttcctgcctgtcctggggtcccaccaccccactttgtagttggccttgctctttattgtggtgaaaggtgcaggccattccatccaagatcctataatattccttttctctgctgttgaatgttcttcccattccccccacattctcaaagaaggcatgtggctttcttcactgcgtctcggcctgccctgagtccagcccctgctgcctggcccagcctgtcttgttggcatcccctaagccctagccagaaacacaagcacctttcaggtgctccatcctaactccaccctccctcacactggcctctctccctttgccaccagataacagcagtgcattcttttgtttcctttagaacaagatgcagatgttttccagaattttcttcaacttcaggcagtaagttttttggtgaaaggagtattactccctgagtctgtagaaccaggctctctcctcttattctgtagcaattaaagacaaagacaggcaagaaaacaatgaaaagaaacaggagccaggctgatgcaccttcatttagctggtccttgagcatgactcattgatccttcttgcttccatcagggattgcaccctgtgccctctttgaatgcaggggcatgtcaaggccaagggtcaggaagagagctttggcctcgccagcctggtccccagagtggaagtggcagggcaggaggggtgtggcagacagagcacatatcgcccccagccttgcccccagatgttgagtgctgggtgccggagtgcagaggggaacaaggcctggaccctgcctggggagaggcagcacctgggagatctttgtggcttcagatcccatgtggtcctccaggtaaagcagagcatctctggggtctaggctgggggaaaactcttgcaaaaaattcctggttctgggacagaatgcatggggtctgcgtgaggggcagaggacagtgccaggccagtgagcacgcactgggcaaaggaagtggccagagaccactcataagaaaaagtgggacatgaacctcagagcctgggctgctttcagaggagccaagagcctgggaaataagcatcttctggtgaggaaatcagcagggggaggggagggtcatacaggaggggacttttaatcctgaatggccttgcagggcatggttcccctagtgtgccccatggaacccttggctgttagatgtgaggtgataaatggtgtgtggatgcatacacttgggactcagactctgctgcccttagactttcaccctccacagggctgcgtttaaaggtccaagaagccctgcagaagaaaaacctaactattgaaccagcattccctatacgtatttggcccctgattttttcccccgaataacatcattacaatcctatgggattagtgttccatggcagaactttgggaagtgttttttgaagaatttgtaaatccctgcaccctctggactgtgcccatttcttagattgcatggaggctgtgctgtacagtggaaggagtatgggctttagatgggactggcctgtgtttaaatctgctttcccattatacaaaatctctgatcttgatcaagttacttactctctcaaacttagtttccttatctgtaagacaggggatgaaacattagctagttgtcttatgaggctgttgtgatggttaatgggaagataataatgacacttacagagggcttgttatgctccagacaccattctgagcactttatatatctcacttacttttcaccacaactgtgaggcaggtaatgttatccttatcctacaggtcaggtcaggagaccaatgacacatacaggctaaatgttgtgcccaacatcacacggctggtaaatgtgggacctaagatttgaaccctaggcactcatacatgatggggtcaggatttgaaacttgaccgtcatctcccatcagagaacatgctctgaatcagtatgttctaaagggtctagagcagtaaaagcactaattggtatcagttcccttttcagatggttcgtggatatgttagggggattgatggttcctgggactccaagtcattctgcagtcattaaaatcagccctgttgaaagagtaatctcctcgatctgcttgcccactcagatgctcccattgtgaccattttgtttgctctgctgcctcatcctgggccacttcaatttgggtggctgctcagcgttcaggtggagtcgggccactttccacagccatctcatctgtggcctgtgcctccacttccaggaccaagagtccccccaggatgcccagtgagttggtagcttgttctctttctacacctcagtgatggacttgacaaagggttaagaagacatcccttttatcattcagcaaactgagtgcctttactgagctagatgcatgccctgggggaactagcactgtttggtgacttagttagacctctgaatccctctaccaaccctcagtagctgtctgggagactgggattctgtggactctcctctatcaacgatattgggggtcttttccacaaagaccagcctggttttgattgacaaagtgcctcagatttacaaatcttaccccttgcaggatcctctcaactgatcaagccccatagctccaaatgccgtctccttgattgatgtttaatttggggatccacaagcatctagagctaccagttgaatttgggtacccaagggccacaaatgggcccccctcacaccctgacccctgacaaccagcacctttgagactgaagtaccactgcatatagtgctgtcctctgctcagggcattctccctaccagccaggccacccggcaaacccctgcaacacctcataagacctcttcgctggtctcatctccttttattaacacctcctcagcacccctccacacacacccaagcccacaagcaaatcattttttcatctgttttgctcttgtaccttacctatgctccactaatacaaaaaaagcacgccttcctcaagacacttgactgccacctgctggagagttgtcatcatggctcaacaaatatctgccacttctaaacccccaggcacctctggagtagggcagtgcattgcttgtacagctgtaaacatggcctgcctgttgaattggtcatgctgtcatgtacttattaaaacactcgtctttctaactggactgaggacatcttgaacgtaaggactgccgatttctgtcttcgtccccattgtggcttctgctaggggctagagaaatgcttattgaatgatccttgtgcaaacacctgttaccttaggttcagggcatctgctgtcattcagtgaaggtcttctaaatctgtctgttgcaaagcaaggctcgccacaggctgtcagagtaaccatggaggtcggacaggacttgcagtggggacagggccccatcagcctctcacctctgctcagaggcaccaccctctgaacagatcagagcataaacaggtcagagcaattcagcattcattccctctacagacatcagggcaggcaccatgtagtggagagtggggccaggggccatctgccatggctgtttgggctggggaaggagagcagtacttctggagcatgtgctgtgctcagggccagctccctgtaggtaggttgtgggaatgcagaggtggcaactcaagcacccctgctggggattcagagttttgtggagaagtagatcagtaagcacatggataccagatagggttgtcaaggatgttgattcactgttgtccctattttcctaagctcgccacatcatggaaggctgctacccaagtgacattcttgggcttcaccaagtgttttaacagagctccacccagctgtcacactaggggtaacacagtgggccagaaggagaggcaggccttccctggggtcccattttaaaaagggggaagtcctctgttcttttacaacacttgtttaccccaagccattcagcatagtattacttaggtcccatacagagaaccttccaacagatagctctccttgctcaggcctgtcctgatgaactccctgatattcttccaggtcttaaaagagtgagagctgagcatttccctctctgccctggctgccaggaagctcagagataacttgtttgctcagttcctgtagctttcctgacccaggacttctttttcttataaattctccttgttccttttccaggaatgcttgctttttatgttttgtttgtttatgttgcttttgtctctgtattatactttggggggtggtttttggaggcaggattggcagcagccatggtagttagaagcaccagcagtaaagctggacacacctgggtttcatccccacttgctagctgtgtcattttaagtaagataagttgcctcttcagttctcggttcctcaccttgaaaattgggataatgatcataatgaatggataggttattgtgaaaattaaacttgtttattgtaaatgcattgtttcctgttcctgctcttggatcaggcttgatctgtggctgtagaatcctagtcttaatttccttcttcctgcctgtgtctgtcagcatatgatgagttgtacaatagtagtgactaggggaccaaccatcccggtttgtctgggacggaggggtttcctgggatgcaggactttcagtgctgaatgggaaggtcccaggcaaatggatgagtcggtcaccctggtaataaacaacctcaacatctcagtggcttactgtagcaaaggtttatttcttcgttgtgctactgtccatccagggccttggctaaaggaggagcctctatcccaggaaattgacagtcatgggcacagacagaggaacacatgttaaaggtcctttagaaagttgtggctgtcacttctgccctcattcactggttggggccagtcacatggccaggcctgccaccaggctgtgcagaaccttcccactgggtgggacagctcagcctggaacactgatccactctgccaggctcacctttctcttcttttgcattttagggtgctggagcagggaccagggaaaggagagagtcacttggtctgaactgggggtcttggatgtgatcatcttcctgtagatggtcggtatgggtttcttaaggggcagggttcagcttcaccctgctctgctcagaggagcagctgtgtctcctttggacgccttctagtggttgatgccctcacctttctcagctgccaaggcctctctcgacagggcaggctgggctgtgacttctcttccaccctccttgctccttcctgtggagcccctgagatcctttccccatgctcctgggtggaatggagggtgccctctcacattcttccaaggcatcttgcgcaagtccctccatgccctgctttctctggcggtccagcatgcctccatctcacctttgggactctctagcttggaagtgggcacacctgcagcccctgactccaggaccacaggctaggctctccccaaagcatcctcatcacacaccatgtggatggccaggtcagggcggccgtcagagcccaccctcggcaaggataccctctcaaaggcacctctgttggctcaaatcccttttggaagtagcccagaaagaggctttcttttttcttatcttttgttgttttatttattgttcttgcatctaagaacaccttcttggtcagaaaacagttttccagaaataatgttaagtaagtgtcacaactggtttagctccctaacctggtctaagcatataagagaggcttttgaggctgggcgtggtggctcatgcccataatcccaatactttgggaggccgagatggagggattgcttgagtccaggagtctgggcagcatagtgagaccttgtctcttctaaaaataaaaaattagctacgtatggtggcacatgcctgtagtcccagctacttgggaggctgaggtgggaagatcacttgaggccaggagttctaggttgcagtgagctatgatcacaccactgcaccctaacctgggcaacagagtgagaccctgtctcaaaaaaaataaaaaaggctttttgatttttgttttgcagaagtaccaaaatctatattagcatttattatttttatttctataaagtaaatttgagtattgggaaaattgatcaaaatgagaaatttcatatggagtttagtacttgaaatttggatccttcatctaaatttcagggaagtcagggctgggcatggtggctcacacctgtaatctcagcattttgagaggccgagatgggcggattgcttgagcccaggactttgagaccagcctgggcaacaatgcaaagcctcctctctacaaaaaatataaaaacaagccagacatggtagtggtgcatacctgtagtcccagctacatgacaaactgaggcaggaggatagtttgagcccaggagatggagattgcagtgagccgagatcatgccattgcactccagcctgggcgacagagcaagactgtctcaaaaaataattaaataagtaagtaaatttcagggaactcagagaacgagaaaggacatgaaattgttcatttatttagcatttgttgagtaccacctggagtgaggcacgagatcaggcacaggagacgcctataaataaggccctacctgcctgaagcttatgggaggtggaggagacacgcctacaagcagagaatggtcacagggcgtgaaggagcctgggcaggagctgctgcaggagagccagggagagaggatacagctctgaaggcttctccaggaggtgtgcccacgggcacaggaaaggaaagcaggagtttatcaggtgactgggtggttgaaaggagccacacctgcaagaaacgtgggcccagcagaggcagggtggttttgggaactcttgtcttttagtctgtcggggggctttgggtagcagatgggagggttgggctgaagactaagcagtgtttcctgctgggtgggtttgaactttgtttggaagacttagggggaacagtgaagctattgcagtggtctgagcaagggggtatcccgcctctgaccacagtggagaggggatggggctggagacgacagcagactgaacagaggcagtgacaaggatctggagggaagtggctgggcccatcccttagagggctgtgtgggggctgtggggtgtgggaggaagagaggaaggaagcccagggtaggttctgggttgctaatttgggggctgggaggatagcgtgtgacctaaacagagaatcagatttagatggaattacctatattaagcctggggatttcatatctatttgctgctgctttaccagttgaggctcaagaatgagaagcacaaaatttctggtcacattatttgcatgtgcccagactggggttaacagaatcggacagtgagcgttcctgaatcagactgcaatggggaatgaatgccttgggaggctggaagcagttgtattcgcagatattcatttggagatctctatagcgatcgaggcaaagataccccaaagactgcaagaattagccagtggaatttgaaatgccaaaattttttttcagaaaggtcaggaaagccccgtttaaaatctaaattttgccatctcaaggcagtgcagggatggattaggaggatgtggggtgacccttttcttcctttcagagccagtttctgccagacacaggaatcctccacatgagtcatagggtggagaggagacccctcagtcctttcagtaaggtgggagggcagtaccgcccggtggctaccatgaaccctgtttcagaatttctttcttaacttcgtgtgtgcccaggtgcacttgagattcactgatgttttctttagaccgaggagctcgcttcagcagttagtttcaggtgttggctctgctggcattatgcttcggcttaatgttttctgaagacttgttttctgttgtttttcattgttcttgttgtctggcttcaggccactaccttcaacctagcaagagctgagtggtgccttcagcagtgaggtagcttctgaaggccaccactctcttgctgtgtgactttggctagtttctccacctctctgtgcctcagtctcttctgtaaaacggagaacacaggagtatctccctcatagagttactttcaggtttcaatgagttaatctacataaaacaataaggatagagcctgacacaaaatcacactcaacaagttttcacaattatgattacttgacccagtaggagaaataaaaaacacaactaacttccttctaaggacatgcccaagaatccagttttagtaactttgaaggcattgtttttcaccgaaaatatctcctgccagattttttcatgtgtttgcagcttagctttaacaaggagctgaaggacggccaggcagcaaggggtggtgagtgccggtagagtgtgacgagctcgcccagccttcctccctgtaattaggagtcatgaaccatctacaccatctcccttagctaataagagatttttacatttacttacctcaaagtgacctgtctgggttttcttttcttgtggcccccactgtaggtttttggaagaagctgaccgcctgaaaagaaattataaaacatgaaaatcgctttgaggtgaccaagtccagaggcccctaactcctcccaagctggatctggggtgtaagaactgtgacttcaggtaacaaagtagtatcccctccctgccccctgtgaactcatgattcttggtagcttgcatggcagttcttcctttaggaagtgtagtttcttccaggaactctgaaacttggggtattctacctcatgcggttgtttggctggtcaaaaaagggagtgggggattctggaggtacttcatgtctgctgcatggcccaagggggccagggctccataaatcaccaagaccctgagggcagggctctgtactcattcctggccctgcttctgtaaatgttaatgacaaaataacaatgtcacccacccaacagggtctttaatatgattaaataatcatgaaatacttcttgaaggataaatcagagagaatagctaggaaatttccaaaaataaagagcagtaggagagtatttgttctgctagctattaaaatgtattctaaagcacagttgtaaaaacagtatagtactgtgatggaaataactagatcagaggaacagagtagagagtccagaaataggtgataaatcaataaaggtgtatttcaagttagtggcaatgggatgcatggactagcaaatggtgttagaaaaaatctcctatccattagagggaaataagaaattcctaagcttaggtagtatatcaaaataatttccaaatagcattaaattaaaaaaatcattaaaatcttagaaaaaagaatatttatattattttgggtaagaaaagacttaaaacatgtcacttttggtcccacatacaaatatcgtaaacaaagttaaaaagcaaaagggtgggaaaagtgtttacaacatcaatgatgaacaaagaattaatattcttagtatacaaatttattcgttcattcaatatttattgagcacttagtatgtactagaaagtattctgggcactaagggcacaagcagtaaataatgttcctgttctcctggtacttagaccctgatggagaggactgccagtgactatggtagattattgtaggtcacattttgataagggctaaggacaaaacattacgtaggtggctgggctagggaggcttggcagggtttgcattatgtggatattcaagggggcttcactgatggaatgacatgtgaagaaaaagggaaagtcattgaatgtcgagctgatagcacatttgctgtttttggaatgtcgagctcataggatttgctgatggattgaatgcgggttgtgaaagaaaggagtcagggtggcttctaggtttggggcctggcaaccagaaggattgacataggaatgactgagaggcttggcttggagatagagttttggttatggatgtttcagtttaacatctctcttgtatattcaagtgaggacgtcagggaggtggtcggccataaatatctgtaattcagggtgacatctaggctggagatataaatttgggaattgttgcagtgttgatagtatttgaaagaatgacactagctagagcccctggagagtgtgtgtagatacagaagagggcccaggacatccatgggaccctcccttagagttgagggagatggagccagctaaagagagcaaaaaggagtgaccactgaaatggaaggagtcccgtgagaagggggatctcccaagccaagagacagtgagaagggcgaggtcagctctcctctggatgtgctgatgggcaaggagagaactggccattggatctagcagtgaggaggtcactggtcaacccaacaagggctgttttatgggaatgatggggagagaatctgtttggagttggattattgagaataagaggaaaaaaactggagacagagaaatgggacaatagctggaggaggatggtattcaagtaagtttatttttcccaagatgggagttacataactcttgttttcacccaagtggaaatgattcagtagcgtggggagagtggatggtgcaggattgggctggggtgagggttctgaaatggtggtctcgaggaggtgggagaggtagaatccaggcatgagctggggaagggatcctaagtaggagcatctaaggaggtggtaggtgtgcacctgcctcttttctcagttcactaagaagcagagtcctcagcggagaatggagactaaggagacgatggaagtttgaggagagagggcaaagtatgaagtccttcatagcagaatgagaaaataaatggccaggggaatgaaggattgctgggcggcatgcaggcctctaaggggtatgtttctccagccatgtcctgttacacaggtgaacacggggtaggaggccattgtggtagaaaaacaggacatgagcagacacaacgtaagacagagaaacgcctgtaaagagaaaaagcaacatcagtaatagctgaagaatacaagtaaaaacaatgaggttttctttttttctctttagactggcaagagctcttgttggggatagaaattattgtcgcttttctggagcacagtgttacagtatgttccagaatacaacgtgtgtcccgttttgacctgtcagtcccacctttagaaatttattctaagaaataattgctcaaatgcaaggaaatatatgcacaaagatgttcaccccagcagtgcttatcaaagtgaaaaaatggcagtcatctaaacaggaggcagctggttcacttatctgtcggcctaacagtgatagtgggaaacagtagctcacactcaccctcctgttttgcagatgagggaagttgggtccagagaggggtagtgacagctccagtcctactccacggagctcagaccccctggctgtaggcaggcaccctgcccaacctcttcaactgggcttggagtcagagtcccttgcaaggcacttgtcaagcccttttcaagggccggtttgcttaatgcttttaaaatacgagttctcaaaatgttttgcaaatttgtttacaatgtcttcatttcatctcatggctttccttgcaaaggatgctgacagtggggggaaaacaggccgactgcctggccgtgatagaggggaccatattttcctgattcccaagtaagacttacagtggaagaaaggatattttctgctttcttacagtgtttacaaaagtcataacaggatgtgaggactatctggctgcaacatctgtcaccccattggtcgccagagttgattgggctgatctggctggttaggcaggtgtcccattcctccctcaccactccatgtgcgtccctcccaaagctgtatgctcagaaaggatgaccatccccgatagaggaggactggtctttggtcaagggtatatgagtagctgcaatcttctgctagggacccccaaacaagctctcaaaagtcataacaggagtacaaagataataaggaacttgcatttatttgtttccttgatcatatgtttattgattagaagaaaataaaattagcagccagccgtggtggctcacacttgaaatctcagcactttgggaggctgagacgggcagatctcttgaggtccagagttcaagaccagcctggccaacatggtgaaaccccatctctactaaaaatacaaatattagccaggtgtggtggtgtatgcctttagtcccagcttcccagcgttttggatggctgaggcacgagagtcacttgaacctgggaggtggaggtggtagtgagctgagattgcaccactgcactccagcctgggtgacagagtgagactttgtctcaaaacaaataaaaaataaaaataaaataaaattagctttgtgtgtggagaaaagggaggaaaaataattagcattgtcagagaacatctgggttatttggtcccctccgtgggaactgccctgggttttcacttctagagtttctggttctggtttaatttttccacgccacagcacagggaccgagaagctgctcagcttctctaggcttttatgtcttcaccagaaaaatgagcgggtgggcttaaatttcctacaaaaactcttaaaataaatatgatgctctttccattctatcacatgcctgttctgggtccgggggtgtgagagatgcattagtgctgctgtaaaccagccccgggtctccccccccggccccccaccaccaaacccccaagcaccaacctgggttctccaccacttttgagagctcatcgaaataaacacacctttgtgcctcttgtaacaattccagatcatccaatggcagaccagagaatggacatttcttcaaccatcagtgatttcatgtccccgggccccaccgacctgctttccagctctcttggtaccagtggtgtggattgcaaccgcaaacggaaaggcagctccactgactaccagtaaggcctttggggcatgtcttcctcttgttaaacttggtgtcagttctcgggcatggaacatctagcagccagctactgtttcatcctggaaaaggggatgggaataaaaaacccaactctaggtggcgacacagttggtttttggctttaccttcccctagtttgtaagcaagaaggagccttcagcagtgctgaggcatttaacttccacttcctgtccccaaaatgttctacacccagagaaaaagaacagccttaaggccaagttctgtcttttacccctttcttcgtcttctttctttgctcctttgagcaagagggttaagtctatgggtgtcatctcagggggttcaaagagagctttgcctgagggcctctctgaggaagacagcaagtgtcaggtgcttaatgaatgtttatggaaggaatgagtggaggtcctctctgaaaacaatttaggaacattgatgttgtccttaaacattatttaaattagtatgaacttgttatattaaatagtatttttgtttatttttagacttgttgacttttcgtttgagtaagtaaattttcacacttacagtcatcccttctatatatgtacaaacacctagggaataaggcagtgtagaatattcaaaggcacattttgttttgccgaagcacctgcgtggaatcttacccaaatgtccatttaagaggttttcttttgtttaatgagggaaaatctccgaggaggtataccccctacagcagatgtcctttctgctgaagttcacaggtcgaatttggggagcacaatggctggaggtcagatgcccactaggagatgctatgattaatatgtaagttatcccagatgattaagacagccaacacccaggggctggagagtgggtatgagggctgtgagggcgttcttccatagcagtaactccccagcagaaagactgcgagatgttggccacaaaccctttgtcttgagcaagcgctaagggagccactgatgtgttctaaggcctctgtcatctggacctgtgggttccagcctggtcaccacccaagatttcccttgtggactctggtttgctaatcttctgtaattcatggagactcaattaattaagcaaccttaatccctttcactatcattttaatgtaactgaagtcatctgtgactgtcaggcagagctttttctcacctgagattatcacctggcctcaaggaacagatagaattctagacaaaagggagaggggagtttttgtccttccgtgcggcctgcgtgatctctgaactttagaactagctggggaaactctctgcctgtgaggaaccccagggcgtctaattgggaacactgttctagaatgcccatgatatgatccagtgctcctagaaacagctatttttgcccttgggattacattgtttgaagggccatgctctctcctttcctgtgggataaaggaaaaaggagagaggcccagctggcagtccatgccctcctgataaatgtatggattggagaaggcggtgagggggatttggaactccttcctctggggatttcagtctgttttcttctactgaaccacaggatgcaacgaaacttggttttctgaagtctgtgaaagggagggagatccttgctgtgaccccaggacttctgtggccctcagccccactacgcccctccatcccaattcctaaaatctaggggttcccacctacctgagaagcagaatatttggcagtagtgcctttgaaaagctgcctggggctctgctcagtactttgttggtactttaattccaccctcctcacttcgtcccttccctgccaaatagatatgtatgcacatttatctttgatgctcaatatgttttgcaaacagaataagcttcatttatccagaatgatggggggggagaatgagaggttatatagatatttcaatcctatggttaactaagcatttttataaacactacatattcccaattttcaaacaatcagaatatggtaaaatatatgttaacacacaaactcttttgagatgataacttttgtttgataacctgagaagctggtccaggttttatagtaagttcaagttaattttcatttgttttacccttattatacatcattaattgatactgtggctgttcgaactttatgattgtttggtttctggataaatgagagccttctgtcttatgataagaagctcttctgtatgtctttattaacatgcagtcacattctcttttgttttttcagagaaagcatggacacagacaaagatgaccctcatggaaggtaccatgaacctagtaatttgaacttcagcatccttatagccattttctttgcactgttacacattctgttacttggggcagcacccatgtcctcaactggagatgagcaaggaggccgtgagcctgtgggcgctcactgtgtccctccaacccccagtccccttgtgtgtctgcagagagatgacaggatcaggcagaagaaaacagcaatgtgtaactttgccattcatctccagagaattatgtttttatcttttgctttttcctccccccaggttagaatatacagaacaccaaggaaggataaaaaatgcaaggtaagcttggaccttattttgtctacaaagcatcctagttctggttgcttagagagcagctgaggaggctctgcatgtttggtcctgtctaagagttctgttgggcactgtcacctccttagggaataggcaggtagtgggccttggccgaggtggccttctgccctccatgctctccatactggctggcctttactctttgctgtctaagcacctttaacctgaagtggatttgaaggtagcagaaatcaatcaaggctcaagtttttccccagtcttcagcagagaacgtcttcctgactggagcgccctccgcaggagacatggctcagtgatttggttcctgggctgggacttgcctctgtcaggggcccctattgcactgcgagttgcaactgaatgcaccacatggggcatgctcggtgtctcgagtagattctctgcctgggtctgtcctgcctccagccacacttgctgacctcttcccattgcgtcctcagttcttctgccgttagtaccaggctgtgttctgaggctgcgtcatgacagactgatacagggggctgcagaaattggctgccctaaggcttcaagctcttccctcggaggccagccttagcaggagctcccatggctctgtatctgcggcagctgcagcaaactacatttccatcgttgctgcacctccttaggaggaccatcaccaatggcaggtgcacatcagtcagtgtcaccctgcctcagcgggaggagtgtgacattcctcagaggaggctcctggggacagatgtagcatctgctgcacctaggtggggacctagttttgatccaaggatgacggcgttggttactgggtgccctagtcagtgaggctgtgactggaaagaattggtgccctgcccaggtcacatggccacacagcgggctcctcacagacctcagggacagcccacggggctctggatgctctgtgctatgaagccaccacctcccttctctttcctttcacccccatttcaaaatccaatttgacaaaggctgagaggaaaagaaacgaggagaaatgaacaattcagtttactctgaagagacaatttttgtagcttttctcctgaattctaaagatgaggtaaacataaaaaaattaatactgacctggcagtgagaccattttcttggagactttagttgaaaagtctaattttaaacattctgcaaattctaaatttgccttgtcagatgaacattgaaaacagttacaactcatttatttttgtcatcttttcttgatgcttggttacattttataagaaatcgtttttcatattgttgttcagggaagctcacagtcagattgaaaagcggcgtcgggataaaatgaacagttttatagatgaattggcttctttggtaccaacatgcaacgcaatgtccaggaaattagataaacttactgtgctaaggatggctgttcagcacatgaaaacattaagaggtgagaccctgggctctattgtcctttatgtccttgcccacaaatgttaccacccttgcctagaatgttcctatccctaaggcagatgtttattacttgcaattatgtagccttcagtagtatgcctttactcttcagcaacagccgtgatgccaaatgaagtgattattgagcttatgtgggttttgacatgcaattttgcagtcacacattctcagagcatagaaactgtgctttgcacgtctctgtatatgcatgtaatcaggctatgtgcctatcagagatgatactgctctgatgtctcacatcttgcctatgtttgtgcctggatcccatccttacaattataacacgcagaaatgtaggtgcacacagtgacacagaaaagtcagttcaaagatgaaaattcatcatggttcctttgaaaagtgagtcatgggttgtgggttctcgcgacattttgttgtcaggaatgaacactgaagatattttcatcttcctggaattttcccgaaccagatccactctttgtgagggaggcagtattttccttcttttctgagtgtggggagggtgagaaaacataggcagaaaagtggaagtgacttatccaaaccacaagagaaatctgaaatatatcaggcattttagtgaatgctgttcctggaattttccatagctagtcttggacttttggaggaaattggaaagtgggcgctcagtcagatctctgacctgcgtggtagaagaattgcgtctttttatatttgcacaaggccaccagaaataagaagtagctggttttgtctgactttagatcattacccaaaaatataaatgttgtatcctgtgctggaagaatggcatttaaaaattcatattagcaaagataacatgggttaaattattataaactaatttctattaaattggaaaaaagtggcaaatctcaagttacagtaaagagcagggatagggatcaataggatggttgcaacacgtcctgtctccttccctccccatggtactttgaattgttacagatccatttccttttattccttcactattctactcgctattctacagactccaaatcatttactgctggcatttttctctgttaagtgattgttctcctgaaaaatgccagattgacagccttttaaacctaagtcttgtcccctttcagtcctgggagtgcgagctgcattgactgaagcaatgcattcctccacattgccacgctcgtttaactcacccctgatgaagagtaactcacattaaatgccttccacaatatatttactcagggcctggaagactgaatggtttcccaagaacatttagagtggtgatttgaaggactaccagacaacccatttaatacagatcttaggaggagggaactctctgaggagcctctaccagtttacttccagagctgccttctttcttagaagcagattgttaaacttccttctattatctcttggttttccctgtaatgagaaaaacaggcttgttaggtctcctgtgggtaacagtgttctctcttccatggaattctctttggcttacaggattctgtccaaagccagatctaggctcatctcagttaaggcctaaacaataaaatttaaataccaggtcatagagactaggccacttacagaaggtttgaggcagcaagttagaatgagacattttctgaatatcaagtataccaattctttctctttttgcccctaaggtgccaccaatccatacacagaagcaaactacaaaccaacttttctatcagacgatgaattgaaacacctcattctcagggtatgttcaattatgggattgttttacaacgtttgtttttataaattttcaagtaagtaccagcatgtgggaatttgatgtttcaacactgagcttttttttttaggcctgcttcctctctcaggtccctccctttatcttattgtttggacaggcttcacatttcttccacaaaaccattctcctcctcttttaacctcgtctagacaaaaatggaaggtctatgccaccgcaatttaaaatcagaagagtcaggatttgttaaaaataagggggatttgagaatcacatttctgcatgaagattttaggaagggactgaaaccaacaacaattgagaatttctcttcacctgatttaaccactagcacaaaaaagtccacctaaatctttacaccaaaatctcatcaaaataacaaaactgtggctcacgcctataatcccagcactttgagaggccaagacgggcagatcacctgaggtcgagtttgagaccagcatggccaacatgttgaaaccctgtctctattaaatatataaaaattagctgggtgtggtggcagatgccttcttgggaggctgagacatgagaattgcttgaacctgggaggtggaggttgcagtaagctgagatcactccactgcactccagcttgggcaacagagtgagactctgtctcaaaaaacaaacaaacttacaaagactagtggtccaaaaaagaaaaataaatgcaagagatatatgctttcacctgcttgacttgagtgctctctctgtcttgctaaatctctgctgggagatggttgaggtggcactatgggaacctgttgtcttccatgaagaattaggtcggcacaaagctctaagttgtgttactaggtaaagtgagattaacttgggaattgaagggaaagaaactggattcagaaacgtgttcttgtagattgtaaacagatgaatagaaaaacgtaactaaaaggaaggatacccgcttccacctcccacaaagtcagggctgaccttacctgcacagccaacagaatcttcctacccatctttgagcagaagtttgcaaagctctagagtagagggtagtccatctggaattttgcatcatcactatccattttcagctctctataagcctggcctgtctgctcactccagcattctctatttatctcctcatgacgtgctatctcaaattggaaagcattcacctgcaaggaccagaagacctgatgaataaatagagtttaatttctcaagtataactggtctggagtaggttatgttgggttgctgcagtggttcaatgaggtcaataggaaccaggttctttgtctttgcactcagccacaccaagctagcatgctagcttgtttccttaatgtagccaggtacctttgccaggtctaagtagccagacccactgtaaaaacaggggtaaatgaagctctagtctggctgtcctttttatcaagaaaggatacaccttcctgaaaactcaacagtggacttcagcttattcaaaagtgtgtcacttggtcacgcctagctgcagggcagggtgcagaaacaagtgtttatagattttccagcctccctggtggagacaggcaagagagaaggggcctgggaatggtgttgggaattggcttccccaacagtgtttgccacacacactttccagagccacatgcatttgctcgattccttccagaagtgactcccacaacccaatatagtgcttcaactgtggtctgattggcctgaggttgaatgggactagtgccttccttgccaaaaaagccatctgattagtactgtatcatttggggcagctgcagtactgcctcctcccccttctctcctgaatatgaattattgttaggtcaggttttttacatcttgtataggtgcttttttgaacttaagataggacttctctttcatttctgtcaaaacctgtttgttgaatggccccacagtccagcttgtcattagtgacccttggaatctttgtgtgacttgtagatccaatacatgcctctgtgcctttcatccttgtttattcataaattcaacaaacatttttgtttacttactagatgcatggcattgttctaggaacatccaaatcaatgataaacactttagggtgggaccaggctcccgatcaagtgagtgatagtcttttggctaccactctcaggacacagttattcaaacacccaactttgcccacctctccatccttttcgtaaagatgtccgtgttctcagagaggatttgctgaggttaaaatatgaccgatgcctgtagcatctcgagagctgccgtcggtgccagcttcatgggcatgtgacctctgcagtttcacaaggccccatgcttggtttaatgccctgtcaccatcttgaaaacgtaatttttgaacaaggatccctgcattttcattttgtactgggccccacaaattatgtaactggtcctgattcccatactggtaacagatctgcagctgtagatgtgataggcctgcctctatgcctttcattcttgcgtattcatgaattcaacaaacccttttgtgtacttactagaggcttggcattgttctaggaacatccaaatcaatgacattttgggctggggtacaggcttgattattttaagaaaaagaatctatgtctttatttcatatatatatatatatatatatatatatatatatatatatgtaaaataattatcaagcagagtcctgtggatggacaaatttaaaaataaataaaacaagctccttttgcagtggcacgtgcttaatcgttttcttgttgctgcttttcttaataattttctatcagatacccatacttaccagggtatggaacaaggattatcatgctatctcagctaaatacttcatgttgggcttgtctcttctactcccttgtttatgcagcactcaagagtgatctctcttgcccgatgaaggttttgtcacctctctagcacgtgtcagtggctgtgaaatactgtccagtcccttatcacttccagggtcccagttccagggacttgcttccacagaaagccaggtctactcagatgatgttcagacagtttggccgcaggagctggacttctgcttttcctcagcaatgcaaaatggacaaactgctttctttactaagtgctttcaaaatatctttaataaagtgtatgtcagggatcagtcaactgtatcagtttacaatgtctacgttagtctacttccccatgttttgaaaactaggcagaccgtaccaaggcctctgtgtcttttattaaccagcaccatcttcccaagagtgaccctgccactggctggcccctgtggctctgtggtgctggtagtgttctcacagcttctgctccttagctgtccttcgggcccggctccttcacagatggtctgctggccagggtgctatggagttggaatgtccagagcctcccctcgctgatgcattcactgctttggaacctgctggctttcctctggagtactgaaatagctttacctgtgttgtcggttcaggcctgaccctgcccagcattacctccagggtgtcacagttcccttctgtccaggtacctttcaagccacattgccacatcaatgaaaagcctcaaaaacacttccatgagatacaagattatctgcaaggcaaacgaggaagtttttaataccctatttgttgacagaatgaggcttccagcagatggtgcttggaaagttacttccccctcactgtcatcccttgcccctgggccagcttagggacctaacttaggaaaggatcctccccagcttccttctggctgagtagcctgccagggtcttaagcaacagtgattctgttcccctctcactcatttcttctgtcccagcacaagtacatgcaccattcttttaccttctggcacattaattcatttcctagttctttgaattaaaccacatcatgaaggcccttttgtggaaaaagagaacagtttctctgtatttttccaaagagcagattaaggaccagtgaataaggtgagaaactagtccactgtgtattagaacgagggagggctgagtcataagagcaagggcatgacagagtggggcacaccctccttgtcaccggaagaccccagcaggagttgagtggttgtatgtctggaaggcagtgggtgggattcacacagcccaagctctcaggcactatagcttgggtatttacctgcttcagtctctttaccaaatgttgtcctatcttaatggctggctttattggaacatttagattttttcctgtatttaaactgaagaaggggtaagaagaatctaagcggggagttttgcttttctgaatgcaaatagtccggccctggatggagggataacatttgagagtagtagttctcagccctatgtacattagaatcacattaacgtggaagtgggatgggtttaaaaataccccagtgatcagccccatgccagaccatcagcataaaaacaaaaacaaaaaacactgctccgaatgttgagaaccactgttttagagagctccctgtacgtggaggttttcaagttgaaggcagatgatggctgagatgttggagaggggattcttgaagagtccttccaaatctcagattctctgactctccatagagttgttattattagagcaatgaaatatgattctctggaccatgataccttcaaaagaacacgtgcaagctgaattctgctttgaaatataacttactttaattggactttcttcctataataattagatgatatgcagaaacacacacacacacacacacacacacacacacacacacaatcttacagttcttcagagacgtttgttttcagcatcctgcactcaggatatcactgaaactgttagtgttcctgtgctttggatgcttagaaagcacatcctctatttgttatcagggtgattacaaattatgtttcctacagtatgagaaattgattatccatttctcctgattaggcagcagatggatttttgtttgtcgtaggatgtgaccgagggaagatactctttgtctcagagtctgtcttcaagatcctcaactacagccaggtattgttcatgctcctgttgatggtgggcagcctcacagcagtcagaagtgtcactcaattttgtcagaataattatagtatacaagtcacatgtgaacttcttccagaaaattcttaacttcttaacagataaattaatttagacttagaacaatcttgtaatatgttccgtattccccccattgaaagatctgactctgatctgatcgatagcattatggctttcttctattgctgcaaaataaatatcccacaatatgtggcaaggacagagggtaagaggctatctgacaagggagaaaggtaggcaggttaacacaataccagagaatacgtcacttggaaatccactccatactgtgtttgcagtgctgtgtcacttcttagctctattgaacctcagtttactctaaaaattaatgataacttataggatcaaataagagtaacatttataaacgcttctagaacagaacttttcacctattatgtcccccagagtttttattcatttattcattcactcacacactggtatttgcatggaagcttggtaggcagaagacttgaagaatcaaaatgacatttatgtaaattagaattaatgtaaatttaatttttccaaagatttctgctctttttagtctcagagcaaagttatggaggaagttgctgttatctctgttaatagacaaggtgactgaagcatatgatatgcgtgacttgcttgagaacagagaggctgaacagcagagctggaatcagagcccacccctatcttctgccttctgaggtcttacaggggaattccaagattgttgccttagaagagcataaactgtttatataattgagggttttcccgtcatgttatcaaaaccaacctccagatgcctccttcctggtgtcaggcaaagtggttggacatatgtacaggttcacataggaaaagtttgaggtctcatgcacaaaaacacaaaggcaacatgcagactgtgcatgcttacttgttgcataattgattttctgcatgcaattgacttgtcatgtttaacatttcatctccccagaatgatctgattggtcagagtttgtttgactacctgcatcctaaagatattgccaaagtcaaggagcagctctcctcctctgacaccgcaccccgggagcggctcatagatgcaaaaagtgagtaccagagaggcctcgcatttcctcagcagcccactcacaggcagccaaccctgagtgagcagagggcgggtgtgtgtgatgggctcagcctttccagtcctacttctctgtcctctttctggggcaccagagctatctttggctaaatggaattatttatgttctttggtcttttacataaaaagaagaaaaaaatctcaatgtccaaatttattgaaaagaagagctatttagactggattctttctgatttttagacttttcttttttctttcagaatctagaaaatcccagttgtatgctcctgagtttaaagggctaagtttgatttgttctcccagaacaaatgggctctatttacctgaattgcacacaggcagcctcataaaagtaagaaaacgtcaactataaatatggtgtttcttcaaccaaagtgttcctccttaggttggctcccccacctggctttcttcttttgcagtagtggaaccaccatccacatcgctccctctgcccccagcttcctgctactgcacacacttctgtgcaaggccccagtagctgtcatctactttagtcctgtgggaggctgtacactcctacagttaagaatgagagaatgaggactctggctgggcgcagtggctcacatctgtaatcccagcacttcgggaggctgaggcaggtggatctcttgaggtcaggggtttgcaaccaacctggccaacatggcaaaaccccgtctctactaataatacaaaaattagacaggtgtggtggtgcgtgcctgtaatccaagctacttgggaggctgaggcaggagagtttcttgaatccaggaggtgggggttgcagtaagctgagattgtaccactgactgcactccagcctgggtaacagagcaagactctgtctcagaaaaaaaaaaaaaaaaaaaaagaatgagaacacaagggagattactgggctcattccggctccaccattcactagctgtgtgaccttgagcaagttacttaacctctctctgtctcagttttctcatttatggaagagtacctatttctttgggttgttgtgaggattgaaagtgttaatgtatataaagcaggcagaacagttcctagcacatagtaagaacagtatcagtgtggcctaatgtcttgctcccaagctgtccacgttaatccctggaaaaaaataccaccagataatctccttcaagtcatctctttcattacagcacaccgcttgttcctaaaagtaaaatgcagactttggtatctgttgttctttatagtctagccttggcttttttaagtgaccttaggagaaaaatatgaatggcatttgggccttgcctttgaggctcttagcatatagtcagagaaatgagacagacagcaccctgcatagtaataggtacagccatagaaatagtgccaggcatagagaacggatgattaattctcatgtgggcgcaaggacaggcatcactgagtagatgacaaccgaggtgggtttgaaaagatgaattaatgtttgccaggtaatgaagggaggaacaaagaggaaacaatctgtgcacaggtgcaggggtgtggagccacatggcttgcttggtgctattggacaaaacgtgcacggaggggaagggctgaaccatgaagaccatttgttctgtggggacacagtgaagagctctgagttgggtggggcaggctcggattggcattctaggggagatcgcagagctggcaatgtgggaggtagatgggatgggaggaagcccagaaggagccctgggcagtggccattcctcggcacacttgctcgtgtgatggccatgggtgtgttttccctcggcttctgtactgacacctagccagtgtttggtaaggaggtgtgctcctcagaatcacctgggagcttttcaacatagtcatgctccacccccagagattctaatttggtttttccagacagcacagtccaataaaaacataatgcaaaccacaaacatgagccacatatataatttcatattttctggtagccagactttaaaaaataaaaataaatgtaaaattaactccaaaatatttcagcatgtaataattataaacaactaataagttcgttcacattcttttatttttctatactgtctttgaaatcctgtgtgtatttaacacttacagcacatttcaattcagaaaagccacatttcaagtgctcagtacctgcatgcagctagtggctaatgcattggacagcacagatctagaatggggtccaggaatctgtaggttgatcatgcatccagggtattctggcctacaagccaggttgagaacttaaggcagtccggctcccaccttgccttcccaatatccatatcctacccatccttcagtgccagcccaagttccttctcctctgggaagcacaggttgtctttgccatttatttggcactaatcatacatcaccctgtcctattattaatcttttcttggtgcacctccatttgccctttgttagccataagcgtctattgggcaagaaccccatactatatttcttttcatccccagagtacctaatccatttatttagtagcacactctgtgatttataaacatttccagactgacaacacacctgtccatgctgcatctgttaaagcctaaacttgggagatatttatctcatgtcatcattataaaacagtgaggcaggcaagaaaaggctttgctcaaggtcacactccccctcctgacagacaacactgctctcagtttatcacattttgtgtattgatttgcagctggacttccagttaaaacagatataacccctgggccatctcgattatgttctggagcacgacgttctttcttctgtaggatgaagtgtaacaggccttcagtaaaggttgaagacaaggacttcccctctacctgctcaaagaaaaaaggtaacaatttaacagtccattaaaaccctgtgacaggtgaagcatgctttctgcagcggagctctcagctgggcgttggttccatggtttctggctggccagagtggcaggtcccaggactgcagacaggaccctgcagtcctccctatgtgtagggcagttgggagcagaggagagagctgaaaagcctgatggcagagatttgtggagaggcctcctctgtttaaattgtgtttcttttaacatgattgaggaagaatactctcagccacaatcctaactgccttatgaacagccaccagtccaccaaaattactctgagctcaccagtgaccttgatgttgttaaatgcgatgaacatttttcctttgtcttccttcttgaagtgttctcttctcctggattccatgaaaccacattcttcttcctcctccccgaccccctgctgctacaggctctcttgctggcccctttgctggctgcccctctctgtcctgggctgcatctctgtctgcagtctctctctgttggtcatgtcatctactccctcagctttaaatgccaacaacttccacattcatatttccagcctagacttgtcttttgaactccagattcataaatatactgcttactaaatcaacctgctttggatatctcaggggagtctccaacaggatacgtgccgaagtaatcacctgagcctctcctccagcataaatggcactgccattcagctggctgctcatgctagaagccggggaggtgccctcacttctgcttcaccaccccactcttcaatcccgttagttatgaagtcctgccacaatgagtcccatctgcaaaagttctctgaaatgtttgtccctttccatgctgcctactttcactcagctccaggctgcccccaactctcaccaggtctcataaagtgtagacccacatgctccccacccccaacacagcagccaggatgatctttttatcagtccccttttaaaaacccttcagtgttccctattgttcttgaagaaaagctcaaaatatttaacgtgaccatgcagcccccgaccctgccactaagcacatgtgagccatgttgacttcctttgatgcctcaagccccttctgggcaatgcttctgcacatgctgtcgcttcctggttggaatttcttccctctccccatgaactcccttcacatggctctctccaacctcagactgccttatgtcttatagcaccctactggtttgctttctagtgctttcttatacttgctgttatatagttatttgtgcgattatttgtttaaagtctgtctcccccactaggctgtaaactccacaagggcatgtctgatttgtttttcactctattccagtaaccagcacagactccacgcttggcagacactccatagtggtttgcttgttggtgaagtctataggtgctccacatttaatgtgtcccaaatcgaactatcttttttctctctctctcttctagtctgttttctttcttctctgagtcagtgaatgacaccagcaaccacccaatccagaaaagttagagtcatcttcatttgtttctttcccttaagcctgatattcacagcaaatcccaacagtttgatctcagaaatttctcctgctttctttctctgctccctctcatcttcactgcactgccatagttcagtcctcctaatctcttgctgtattatagccactggcccctgaatcagccttcctacttctgttttctactgtcttccagttcatacgtcactctgctcctacagcatccaaaccacaatttgattttgctgtttctgcacttaaatacctgtagatgctctccatttcctgccttaaaaagacagaccaacattggttagaaagtaatccaaggcccttttaatcttcctccaacctgcctttccaatttgcccctcactcccagtacctccaatttcacttcaaccacacagagctcttggccagttcctatataggctgtgcctctgtgcctgtgtacgtcatcagcctttatacattctagtccctcagccactgctcatccttcttgatccacctcctctactggttttttgggggagccttcctctccctaggaagagttagatattccttccttggtgtatgtaatgaatgtccatggtataactggccctacttaagcattctgacactggatgacagtttgtttctctttccgtctgcccctttcattagatgcttacttctggagagtgaagccttgatttttttttattttttgactccctacctacatcccatcccaccatcggccgtgtacacctccatggcccaaacctagtgctgacactaaccacgaactttgctttctagcagatcgaaaaagcttctgcacaatccacagcacaggctatttgaaaagctggccacccacaaagatggggctggatgaagacaacgaaccagacaatgaggggtgtaacctcagctgcctcgtcgcaattggacgactgcattctcatgtagttccacaaccagtgaacggggaaatcagggtgaaatctatggaatatgtttctcggcacgcgatagatggaaagtttgtttttgtagaccagaggtaagagtctacatactacccttgagcaatgatggtagaggattttcaaccctgatctaaaaagcagagaagactgggccatcagctggcttttctaagaatgaagaaagaaagaaaaagctgggtgcagtggctcacacctcaaatcccagcactttttgaggccaaggtgggtggatcacttgagcccaggagtttgagactagcctgggcaacgtggcaaaaccctgtctcaactaaaaatacaaaaattagccaggcatggtgacacatacctgtagtcccatctactctggaggctgaagcaggaggatcagctgagcctcgggaggtcaaggctgcagtgagctgtgattgcaccactgcacttccgcctgggcaacagagtgagaccctgtttcaaaaaaaaagagacaaatgatgagagtctctgttaaaaaatgagattcaataggatatcatcataaatacagagatttttctgtcattctttggcatatagagacaattaagtggggtgccttgatgtccatggctaaaagaaaaacagtagggatagcatgctgtctgaatctatggaatgttccagaaccattattgtgattgaaattcttttgaatctaggacttggaagcaattatttagtcctgagctgtccaataaaatactcgttggccatggtagcctcccatgtggctaacggcacagacatagaacatttccatcatcacagaaagtcttgttggacagcgttgatctaatccaacctccttattttatggatgaagaacagaggccagcctggggactggtctcctgtaggattcacaattaattggtaatagacctggaccaaggacccaggtgtcccaaatttactgctgcctactgctttccctcagaatatgcacaggctaataatttttctggctactagagacagccacaacatgctggaaaaagagacagcctcagctgtcttgtggcctcagctgctgcagcttctggcatttggttgtcctgataaaaaggaggcagcaaaaactagaagccttgcactgaggtttagatttataccacattttaatctaattaatgtggttccttttttaaagacagatctcagtctgtcacccaggctagatctagtgcagtggcgagatcttggcttactgtagccttgacctcccgggctcaagcagtcctcccacctcagcctcccaggtagctgtgaccataggcatgtgccaccatacccagctcattgttctgtgtttttggtaaagacagggtttcaccatgttgcccaagctaatcttgaattcctgagctcagacaatctgcccaactcggcctcccaaagtgctgggatgacaggcatgaaccaccatgcccgactggttgcaatttttaaagccccctcagatttgatttcttgtgataatagtccctttacaaaggctttgctctgtttccctctatttttatagccttgattaaattcagatgcctgaaaaaaagagagaaagatccacacagtgagccctctgaaaatccatccagctcttttgcctgcagctttgaccttgctctcataggctgtagcagggtttatccattgcaaagttgcaattaatcatctgaatggctttttcttctttaaatattcctttattcccttttagggcaacagctattttggcatatttaccacaagaacttctaggcacatcgtgttatgaatattttcaccaagatgacataggacatcttgcagaatgtcataggcaaggtaagctaggatgtatgaaagatcttaagttgaaagtgtccccttgcttctagactagtcaacatgaccttccagggaaatctgtccactgaggatgtagagtcagccagcctaggactcttcaggtcagaacatctgtgtgaagaggaagctgatacctgcaggcactgtttatcccccttgtagttgccctgtgctgactgcatggcagtttctgaaagacatctcttgttcagagggttttcccagaccctgtaaagatttagtatggcccagactgatctgattctcttttccattcaagcctgcactacctcctgtgttttctgtcttgactaatgctgtggcttcatgtgcaggctcctgagagagaccaacattgaccccttctttcactgtgtctccaccagatcctgttcattcacctcagacatgcatttccaaaagtctactttttaccacctctgccatcaccctggttcaggccctcgtgcctacttagagacctgtgatagacttctcagggtttctctgatccctctcacccccagttcatcttccatagttatcctatttatccccagatagattgagcctggtaacatcagcctgcttaaaaacctcctgctttagactcaagcccaaatgcttttgacaggcaatcaaatgtgagaccttccaccttctggccccagcccacctcctcagtttcagtccccatccctgcctgcagaggcctgtgctccaggcacactgacctcactggcctctccccaaccagaccctgctgctcctcaggcactgctgggttcttccctccctccttctcttggcaaactcgtgttcatccctcaaggctctgatctcttctccctgtatagccttccctcactactcttcttgagggcaggagtcatagcctgtctcctcttgtatctccagtgcctggcacatgagaagggctcattacatgttacatgaaagaatgaggttgaataggtgagtagcctctgttgatttggatgttcttagaaatgagataagttctatattgcccttgggctttgtgattgagataaagcatgacattttggacagtgccttctcatttgctggtggtcatgttagagctgattccagttagatgtataacatgcagtcagtaattccctagagcctcaattttacagactatggaaaatcatgacagcttcacaaatgaattgaaaggctctgagttagaccctcagaaacaacctatttcctgagtgttgaccactgcagtttccttggcttactaaagagcgatgtcgttggagctcaagtacctttaatattttgtattggatgtcctgtttaatactttggtctgagaaaacaacaatgtccatgttttctttacattttcagttttacagacgagagaaaaaattacaactaattgctataaatttaaaatcaaagatggttcttttatcacactacggagtcgatggttcagtttcatgaacccttggaccaaggaagtagaatatattgtctcaactaacactgttgttttgtaagtacttttcctatatctgaagctccccttgcttcaaacagatgcctagggttcctcatctgggaaatggggtgcaggcaacatccagtatcacatcctttaatgccatcttgctaatacctgtgaagcctcaggactggcagaagctagaaaggattgttaacaaagggacaagcttcaggacttgtaccatgcaggccctggcttatgaaactgctccaggaaatagcaacatttccttccagataaagcagctaacctttgaattccacaggccctgcaccctaggcatccacttgtgctgctgtggaggaaggggttggcaatctatgaaaggctcattcaggcactagctcacactggccttggctgaggatggggaggtctccatacctgtcaggcagggggcccaagcactggcagctggaatgccatctcaaaaggctgctacctgctagatgagcagagggaggtgaaggagcctctctttggccaggcctgctccccacttttccttccccatagtgtccaaaaccccacctatggtaagagctgtgtgaggggccggggctaggtgcactgcaggctggcaggaggaggtgctgtaatgatggcagtaggttactgcagccaccacctctgctgaactgtgtcccacacatattaggaaggcctaggcaggcagtggggccaaaggccaggatgctatccattatattatcaaacagtgagacctgtttacccactcagacagacacttcattttctggcctgtccaggtccagagtggacaccggacaccttggccaagttgaatggtgcacagttctgagcaggcctgactcacgtttccttattgctgggatgttcacagagccaacgtcctggaaggcggggacccaaccttcccacagctcacagcatccccccacagcatggacagcatgctgccctctggagaaggtaactatgtgctgctggggccctggggcttgcccgtgggaaggtgcttgtggtcaaatatcctcccctaaagtattcagggtcccctccattcatattctgtggaacaagggaggcctcgaggggatgatgtgcggatttccccatgaatgcagaggacactgtcatgtcactttctctgttgagccggaatactaggagctcactgctgcacttcccaaagctgctggcccctggaagcccttgagctcgcaaactccctactccccttgtgctttcctcctgtgttggctagtggccatgatgtgaagtgctctttcgtgactgtcactaactcctgtggttggcaggcaggtgtctttcggcaccagggtgtgtaccatacccactgggctcccttctcaggctcagccttggccctgcccctgctgtccacgctggactcatccttcctgggaccatccccacatgcatggctgcagcccccatcgatgactcccacatccacatctcctggcccagtctctctcccgagctccagatctgtctctccaaatgcctcatagacagaaccacctggagtctcagaggcacctgaaattcagaatatcccaagctgattttctgcactcccctacctgattggttgtttaagccagaaacctggctgttgtctctcccccattatatctaaacacggagtcctgaaccttctatctcttaaacttcgtcaccactattgctatttcaccctcctcatctgctgcctggattattgcaaatcacttcgcaactctagtccccctctccccaccccatcctccattgtagttcattctccctgccgtggactttctaataacccagttctcatttgtgccttttctgtgtatcgtcctttggtactcctcattcccttgtggaaactgtccaaattcgttagtacggcatccaagaggcccctcatgatcggattggtacctgctgccccagtttcatctatcatgctctcatcatcatttatgatgaattccttggaggagtctcccaagttttaacctgcctcagtgctcctgcacgtgttggttgctgtgcctggaatgctttctcctccttacctctctgccaagctaattcatattcatctctcaagactcagctcggggttaacttgctccagaagctgcacctggccccagatgagttggttgcctcgtgcttgcctgtcaaacttacaacattttgctttagccattgttcatcttgttggttttcctgttaaactgtgagctccttgagggcagggacttgtctctgtaaccctggcacatacagtggtcttcaataaacgttttttttcagtgcatgaagggaaagaattagatgctgtatgaagggaaaaaactggcctcagatcctagaaggaaacttgagcctttccctgctggaatgccttttcctgacaagctgtagccctaaagtccctcaaggcacaactctgatgttgaactgcaaatggatcatgggataaactggttttactttaatacataatagtatttcttcctcagttttcccctttcctactctcagattcctttgttgtaggtggcccaaagaggacccaccccactgttccagggattccagggggaacccgggctggggcaggaaaaataggccgaatgattgctgaggaaatcatggaaatccacaggcaagtaacaccttctagttcctctgttaaaccagtggttctcaacccagggaaattttttcccccaggcaatattttgcaatgtcaggagacatttttggtcttcacaactgggtgggaggttgctacttaaacatcctgtggatagagaccagggatgctgcttgttaaacatcctacagtaaacaggacagttccctcctccccacccaacaaagaattatccaatccaaaatgttagtagtgcctagattaagaaatcctgccttaaataaagaagctaaaccaaaatagcccagcgctaaagagaattcttgagaagacttaactttcttatggctcaaggagcttctcagtgcggatagatgtacctttactttacaggaatgcaggagtagagctgtgaactatcagagtgatctggaccttaacaaaacattcactttttttcaatcaaagagctgcccaggattagtactagaaaccaagcagatcagctagttattactagctgtcttgggagagacttcctttccatatgaaagagaaggagcttagaagcagtccacctgggtctgagtcctgggcctgtctctctacctggctatgctgagacttacttaacctcttgctctctgttgatttaaaccataaaaagaaagcactatttcccaagaattgtgttaggattgtgagggcactcaggaaagttccaggaacacagcctgacatatagtgagtgcttaaaaattaattaaatctgtctttaagagcagtcgagagggaagcagttatcataagtctgtccaaatttggggaatagagaaggtggtaaccagattcttcagaacgaaacttaatgtaacataagaaaaggaagaaaacactgctgccgctggattctctcaggagaattagaggctggcctgttttccaattggccataaaggggctgttatccccctataggtaacacagctcttttccaaccccacaggattagtgggtgtgacttctgcatcaggaaggagacatgagggtagtgtgcagtgtaatcaggttcaaaccctatactttgcatttgcataccctgtattttgcttgagaccatccaagaacagtatcaaacagtccttgacctcaagaattttaaaatcttttataagtctattttctttatgataacaggaaaaagggagggtgcatgggccaaagcaagcaaaagaggaaagatttgaacttggccttagccagggtttgcaataagagtggatgttccctctagaaaagccagggctattcttgagtgggcatgtgagtggcaaattcagggtcaagaaacaagctacctaactgggcaggctttgtgtaggaaggagacacagagctatgataggcgattaagaaacacaagaaatgatactgtgcagtttggaagaaacctgtaagaccccatttgttgtaggatgctgaacaagcatccaaagtcttgtgttacgctttgtggaagttgcattggaatagggagagatgaaggtgggcatgtttgacaactcaggaatgaggccttatcctacagagatgacactgccaaaagagaaatcaatcatctaaggtctagcgtttgaagatgaaatcaggaatgatgaaacagcaattccaagatgagaaacctgggaaaatagtggtttcatagacataagtagagaaaggtgggggacactcagcaatttttccgtaagcaattagcagccgtttgtgcatgctgagaatacatgatatgtagttgtaaactgccgttaagaagcttctaatccagaaagaaaacttgttcactcataaatctagagaactaggcagtacaagaaccaaaagacttctgggtggtggaggagtggtctctgggtcacccaaaagctacattcatccatgtaggagctgagagtcctgtggttacacaactgccatcacactctccctaaactgtagctgcaatgccaagtgatggattctttcctgaggtccttcagcctgacaagtatttaggtggatttacagttctaagtcttcccttctataaatcttctgagagatatgctagataagaaaggcctggacccatttttcatcaaccactgccttcgaaggctgcttttcctgtcactactactaggctaccttttagaccctggtgccgtccatgtcctaagagtattcactagctaaacagtgtttgtggagaaggggacaaattgttttctgtggatcaaagatggaggttgatcttagaagttctcctccaattcacctggattctgtgaggaaataaaactggccacttacttgaaattcaccaactgaatgcaaactccaatccaagggctttgtcagtgagatgcttgactctagggactgcattctagatcaggtgcctgtagaacaaatccagcttgtcatctgtttttgtaaataaagttttattggaacacagccacaccgattcgtatctgtggctgctttcaagctgcagaggcagagttgagcatttgtgacaagacaccatatggcctagagagcctactatctggccccttacagaaaaagcttgccaaaccctaatctagatcttcatcccctttctcacctttaccccttaacaaagcacatacactccactgaaaaaagaaaaggcagtgtaattctcttttctgacaggataagagggtcatcgccttctagctgtggctccagcccattgaacatcacgagtacgcctccccctgatgcctcttctccaggaggcaagaaggtaagactgatgattcttagcctaagctagagaacctcttgcccaagatctgaaatgttgggggtgggagtatggaattgcaactgcgattgctgaaacaatttggactacttcctccttgaagtaaatgcatctgtgtgaggctggatacaaagcatactggtagggctagggaggcttgctgacatcctcagaggctttcttccatgtgagtggaagaagggagaaagaataaggaatggggaactgtcagttcatttaattgagggagcaattcaagagttcccatgagggaaagattattgagtacctcacatagaaaagtttctcattttctgccaggaattttcaagggagaaaatattagtgtctagggcaggcaatggaaacagcaatgccaccagcagtgctttggaaatcaagccatgctttatagctgcagaatacttggggatctgctgcctgggggttccattggtgtgacagcattggatccaagcagtggatcaatcaccagccctcatgaagagcttgctataagactacactataaataggtttaggaaccagtcatttgttttcatctttgctggagaacttataagcctaggcccatcttaatcgtaaattataaatctgtttatattgcctgatgccagtagagcttaggacagtttaaaggccatcattttggacacaatggcttcctttccccatctcctaaaacagagagagagaatatcaggaatttccataggcaggactcctagggcacaaaccatcaaaagcagggcaaggattttcaaaactgagctcctcggaggtttgttcaggttaccaagagctgtggtgttaccaggtgggatgggcgtggggatagttgctaaggagagagggtaagagtagaaatcctgcttctacaagggcagcaatacttcttttttatacaggaatcttctgcaaacatttctatttgaaaaagcgttttgctccccccaaaaaaggttgaaagttaacaaattaatgggtaagactacaaagtaagacctgggttcgaagcttggccttgccatgtgctagttatgtgaacttgtacaactttcaagccctagttttctttataatggagctaataatggttagggtagccagcatctttgcacgaggtcctactgtgagataatatatgtgaaagtgcttggcccaaaataccactgacagatgaagtctgagcttggtgtcccgtgacccccgcccccctgcccacaacacacacactgcttgccagctgtcttcttagctgttcttctgttatacctccaggtccttcctgcatattggatccaccatcttcttagggtggtcttccagtctctgcttcttaagttaacttttaggcacttgacttgactcctggtattaccaaggattctacttcttggttttgaaaggttatcagtccagtataggcttaaatattactcaaagaactttcatatacattgtctcatctcaccttcacaacattatagtgacaagatccaggctcctcagcgttcgttttataagtatggcccccaggctacaatcctgggctcatggcttccaattcttttcacatcaacaactaccagaaatcaaaagctgtgctctgcatcataaagccccagctatttttgaggcacttatgaaaattctcccttttctttgagaagaatggattataaaatggatctgtgagaagaaatttggatgtgttctcacgagatgagtcctgggcagcaggacttataagaaaagcagcttaaacaagacagttaaaactgacagcagtattaaatggtgcaccatacccagccctttccagtcactttcaaatttggaaggtccaaaaatgaaccatttagcctgcagttgtttgtcaggatcaagctaaaaaggaagcctaagtgagcctccataggtcgcaagagagtacagacatccagaagcactaaggaaaattcagataaagcagcagttctacaaatgtcatctgcagtctttttccagaaagagagggggcacaagatccttttaagggtctgcaaggttaaagctattttcttaataacattaaaacgttaattttttccctgtattgataatgtgcactattcatactaaaagcacggttgggtaaaattgctggcattttacaaaaatcagacaagtggcaccaaactatactagtagtcattgtattcttcaccaccacacactcacagtaaaaaaatagtttaaagccagtttcatttaagattgtccatcatggctaggtgcagtggctcacccctgtaatctcagcactctgggaagctgaggcaggcaaactgcttgagtccagcagttccaggcaagtctgggcaacatagagaaatcccatctctactaaaaaatacaaaaaaaattatccaggtgtggtggtgtacctgtaatcccagctactccggggactgaggtgggagaatcacctgagcccaggaggttgaggctgcagtgagctgagattgtgccactgtactccagcctgggcaaccagagtgagaccctatcaaggagggaaggaggaaaggaaggaagggagtgagggagggagggaaaatgtccatcattacttttataaaattctcaagcacacatctttttaatgctctgtgacaaaatgagaagtacacagaacttgtgctgcataccaaagtatgatgtttgtctcaaaaactacttgtgtgattaagttgtgagttgaactagctactattttcattggacaccatttttattgtatatggtcattcggttttgggtatttagaatactttttttttggaaatgaatgaagtgaacctgtcactttaaggaaaatgactgacatttgttgccaatgataaaatctgagctttcaagcaaaaattggaatttttagaaaacttgtctctgctactttgaccttgagatcttcctaaaacttaaaaaatgttgttgatgagatagggagtattaataatagtgatattttgatgctctataatgaaatgtgtcaatatatagaagatctgcataactcagtgaaccaatattttgtaactaaacaatgcaaggtatttcaaaatcatgtaagggtaaaagatccatcctaagtgccaagatataaagagtacaaaacattcattgatatggtttcagattccacattgcaactcacctttaagaaacttctacgtgtcaagttttgaagtggtatcaaaaaagaatacaattatttgaaaagtctattaaaatatgcctcccttttccaactacttatctgtgggaggttggatttccttcatatacttgaatcacaagacgtatctaaatagactgaatggaaaaacatatatgagaatccagttgaaaattattaagccagacattagatttgcaaaaatgtaagataatactctgcctggtaattttttgttactgttttagaaaatagttatttttcattaaaatactattcattatttatgttaacatgtagcgggtttattacatttaagaaatctattagttttaatttcaaatacagtaaatattgataaatacagcctacataagcaaaagttctttggagtcctcaatgatttttttaagagtgtaaaagggtccctagaccaaaacgttgctgtggaaataaagtaagttataatgccacctgctggcaaagcctgaaatcattgctgctcctgaaagcagcagctaccaaactgtttcctcacgtatatccagataggtctcaaagaatgctcttctttgagactcagccaggggaaggcagctggggtgagtgggggagattttgagacagagttctcttactgagtagtagtaataatcctccccagtagcctgtcttaacttaaaccacaggttactgaagttggcacctgtagtataagagatttacttctgttttcttcatttgactccttgagctgtgtctcttcacagcttgttaactccactttttcttcttcagaaatatctgtcactataagatgttttattcccttataggggaaacgtctagctgggctcattgaagtttaggcattggtcctaaagaaatatgtgggcatcatgattccaggcagttgaatgctcttgggattttattcagcctttaagttgcctctgtgggctcactaaaatggagagaaaagaatagttcgggggagaggttttttcttactctgaccatgtctgtctaacagttccttgtttgaaatcatccaatagaaaactgaagccatttgaagcttctccccaccccaccccatgcttcattttccttttggcattgctcataatactgattcaaacttcacacttccctccttttgtttgtagattttaaatggagggactccagacattccttccagtggcctactatcaggccaggctcaggagaacccaggttatccatattctgatagttcttctattcttggtaagtggcatcattattcgtttccattgcaatgagcttgcaaaacatcttacataaagtcaattttaagaactgaactgtgtgaaacaagctaatcctagataaatttgataggaacagaataaaagtttaaaatttgtttaaatctctaaaaagttgaccagtatttgagttttggtggaggtccaagtttgtgcctggaactcaagaggaggctacagctacctagacataggctttctcccatgtggggcataatctcttcagagagagaaggctaatgaaggttcagagataatgcctagaagggtgattagtaagcatatcagaaggtattaaaagtcattaagtgaaaagagtttgcttttcccatcacatccatctttttctcccctgggctttctagatctgtttttttcctaaactctcccttcctatttgcctttctttttgtaactcctcttaactggttacatcagattattaaaataagcttgactcaaatatttttaacatttactaaattttaagcgctttgtacttatttctaaaatgatcatttgattccttagagctgtctcttcacaacgtaaccccacttatttcttacgtatttttaaaaaattggttctttcctctaaaaaacagcgatataaaaaaagatagccatgcagcccaaaaagcagcatctcaccctaccattaaatgtaactttcttattaaaaatgtgcttaggaattgcttacttaatctgaagatgctttaaaaaagaaatcactgaccagtctttatctcctcccacaggtgagaacccccacataggtatagacatgattgacaacgaccaaggatcaagtagtcccagtaatgatgaggcagcaatggctgtcatcatgagcctcttggaagcagatgctggactgggtggccctgttgactttagtgacttgccatggccgctgtaaacactacatgttgctttggcaacagctatagtatcaaagtgcattactggtggagttttacagtctgtgaagcttactggataaggagagaatagcttttatgtactgacttcataaaagccatctcagagccattgatacaagtcaatcttactatatgtaacttcagacaaagtggaactaagcctgctccagtgtttcctcatcattgattattgggctagctgtggatagcttgcattaattgtatattttggattctgtttgtgttgaattttttaatcattgtgcacagaagcatcattggtagcttttatatgcaaatggtcatttcagatgtatggtgtttttacactacaaagaagtcccccatgtggatatttcttatactaattgtatcataaagccgtttattcttccttgtaagaatcctttactataaatatgggttaaagtataatgtactagacagttaaatatttttaataaatgtttcccttgttctat

SEQ ID NO: 15457 - DNA, 109469 bp, Homo sapiens; identical to SEQ ID NO: 15436

SEQ ID NO: 15458 - DNA, 55617 bp, Homo sapiens
agtgccccccgcgccccgctccggcagctccacgctcgcgcccgccatgccggagcagttcagcgtcgccgagttcctggccgtcaccgcggaggacctcagctccccggctggggccgccgccttcgccgccaagatgccccggtaccgaggggcggcgctggcgcgggaggaggtgagggggccgaggcgggaggggtcgggggtcggcgccgggcctggccttgacctccacaggcgtgtcgcacccgagctgcgatggcccttcaccgcgccccgaaacctgccccctccctaggtctgggaggaccgagcgcatctccaacagctgcgtcctcaccgtcgaggcgggggaaggcccgagggaccgttttggggggcctcgaggtctcttcgatgacaaactccacaggtcgggggacgtaccccaagtgccccgcgtgaccgcctcatcacatatgtgtttgcctagcgccttccagcctcagtttgcgttttcatcttcggagccccacaagtgtgccccccgagtcactccccttctgagaggcaggcttcccgcctcagtcctgaactttcttccccccggctgcagagaggccccctcccgcttgcggctggttcggagatttggcccgcgtttgtggaatgaatgcggatgggaaggcgccaggagccggggttcaccttggccgggctgttggcaagtttatcgtctcctctcccctcccctctcctctttgtctttcccagcaaagcgtcccaggccttttctttcggtcttgcaggctgccccaccccattcccatgctcttcggagttccttccattcctcttctctgaacctgctgcagctttccgcagctcctctgcaaagaatattctaggacagacaccccgtggccttggtccaacggagaataatgtgtttttgcagctccccatccaaaggatgccctcaatttgggtggcattttggacctcagcaacggctctagccttccacccttcaccttaagtgtactaggcacccactgcgtggcagatacaaagctcagtagttcataacaccctgcgccagtgtcaggaaatctgtcctcttctctcttgtcagggtgaccctccatctcggagtctgtttgtatcactttgtaagggtgatagaggattgtggaaggagcatcgactttggggaaggcagaccttttttctttccttttttttttttgagacggagtctcgctgtgtcgcccaggctggagtgcagtgacgcgatcttggctcaatgcaaactccgcctcccaggttcacaccattctcctgcctcagcctcccgagtagctgggactacaggctcccgccactacgcctggctaattttttttttgtatttttagtagagacggggtttcaccgtgttagccaggatggtctcgatctcctgacctcatgatccgcccgtctcggcctcccaaagtgctgggattacaggcgtgagccaccgcgccggccaaggcagaccttttttcaaacgctggctctgcagtttgccatttgggtgaacgtgggcatgtgacctgtcctgtcatctgtggaatgggggtaataatgtgtacctcacatgagacaatgcatataaagcatgcatcttttttttggagacagagtcttgctctgtctcccaggctggagtacagtggtgcgatctcagctgactgcaatctctgcctcccgggttcaagcaattctcattcctcagcctcccaagcagctggaattacaggcatgctccaccacacccggctaatatttgtatttttagtagagacagggtttcaccatgttggtcaggctgttcttgaactcctgagctcaggcagtctatccgccttggcctctcaaagtactaggattataggtgtgagccgctgcactggcccatgcctcttgataaatggaatgattatcgtcagattaatcggcagatctctttagacagtgattgggtctcttttgtcttcatttgtctcacagagcctcaccttgtctcatttgtctcacggagcctagcctactactttgcacatagtaggggtacatgttttattaaaataagaagcagccggtcagatttggcttccttccttgggcagagtccactgcctgtggatgtgggttatattttactgtggggctcacagggaaacactgctgtccagcccatcctttggagagcttcctgagatttgtcttcatagcctcacatttcatgacccagaatagctcagtgccatccacattcttagggatttcatggttcatcctcctccccaggttgttcattagaatcttagagcaggagaaggggctccaatatgaaccttatccatggacagaaatgcccatttatgcccatacatctggccttgcctggctgtgtaagtgtaagcactgtgtgttgggggagggacccttagaatgggtctggaggccacagcaggctctgttcagggctcagctttgccccagttcaggcaagacaaaacccatcctcctttgccttcagatttttggtttggtgcacgtagaggttcattgttacaacagaaaggcttgcggcacccaaacacagcttttctcttcagcatctcagggcccaaaaagttagagtctgaactttggattagacttccctgaggtttcctgtttggttttgcatttgcatttatattttgcgattatattgtgtttacatatagtttgatgctgcaattttttcccccagttctgggcttgactaacccacccccaggcttgtagctctatttgactgaatcaaaatgcaactgattcttaagtcaagtcttccagttctgactggtttcctgggagtaactagggaccctgtcctgggactcgcagcccttttgtacagtcctgctgggaaggaccctgggcagatcacaggaaactagaatgtcagggctgagggacccttttaagatagagaccagctagaaactctctcagataagatggagtaactgatgtccagagaggccaagagacttggccaagctcctgcggctggatagtgggaaagttagcatttctacccacgtgttctacccccggtcctgttctctttccttttaaagtccatctgtctgtcctccctacgtaacttctctgaaccttgttattttatccttaaaatggatctcttaatcactccctgcttaccttactgggttgttaaagttttttgtgttcaattatgaagcaccatgcaaatgtgagggagtatattaagatagtcattacgtcaaccagcctcttcctgtcttgggcccctttatgcccatcatctcattgatattcacaacaacaggtgaaaccgggcctagggcagtggaggcagctgccctgtgtcacacagtgggtctctctgactctgctgtgctctgcctgggctctgtccagctctctgtgccatctctatggacataaaggacactaaggacataaagatgctactttgatttgctgactgactagggagaagtagcctgttacagggagatcagtaagaaccccaggagtttgtcctgagtccccagagaaaggtacagtcaatgccataagaggcaagtggagcaggagagggagagagcagtaaggactggtgcaatgagggagaagttcctggaggaggtgacacttccaggtggaaggatagatgaaccccatttatcggagaggacaagggagtgaattcagagactggtgggaagagagcatattgggaaccaagtaagccattttgaccagagctaagaattcatactatattgtgtgcctcaaactgctagtggacacaccccctccagtaggtctcagatgaagcagtctgccacaaataggagatcttcaaaggcttgttttgtatatatttttgaaattttaaaagaaagttttaattggacaagtggcataatttattattattttattttttgagacagggtctcactctgtcacccaggctagagtacagtggcacaatcatggctcaccacagcctcaacctcctgggctcaggtgattttcccacctcagcctcctgagtagctaggattactggcgccggcttaatttttgtattttttgtagggttggggtttcactatgttgcccggctggtcttgaactcctgggctcaagtgatctgcccacctcagcctccaaaaatgttaggattacaggcgtgagccactatgctcggccagggcataatttgtaataagtaatttaaaacataacagaaaaggcctatgaacaactatctcaatccctgtattctccccagaggtaattgctatggaaatgtacatgcttcccaatgtatctcctcatggaaaatatattatcagtgggggaatgggagtggctgggggaatgtttacctaaattggtatcaggtcttataatgcacagtttaaattgttttggagttacatttttcttttcctttgtgacttttgcttttttgaatcttgttttagaaaggatttccttcttaatttttaatattcttgtgaattttacagtttgctttgtaaaatgtattttagtgtaaaaattgtgtaatcttagagattgtttgcaagaaacataaaccctgtcaagcttgtttctgttggagggaaatttgtttgtttgttttttgatcgtcagagaagaatattgagggaaattggctttaaagaattagaggtgcctcatgagactgaagagccggaggtaaaagtacacctctccagggcctggaactggaggctgggaagttgtcaggaactaaggcagctgcttcgtcattcttgttctctcctgcctctgcttccctctgcacatctgatcagtgctttcgctcattcatcatcacataggccccaaagcacagcccccatgctcacatgacctcactgggccagtgtctaaaggtaaccggacactagattgagccagtctcatgtcccacttccaagttcctggcagaggttgacagcccggcccagtttctggattgggtccagtggctgggtctccacccctggtttcatcagcagaggtcatggagggaaagtgaccggcagggtaaacatggccattgagacctatggtgtgggagggggcgcttctcagagaagaggggcagggcctggaaaatcccctcagaagtatctatggcgattcctctttatttcacacagtccaggttccagggagaggtgctgtgtccatcctgttctgtacctccctggtttagatcatttatgcatactctcaggtatagaagaacccctttagaaaactcaggtataggagttttttcattttttattttttattttttttttgagacagagtctcactctgtcatgcaggctggagtgcagtggcacgatctcagctcactgtgacctccacctcccaggttcacgccattcttctgcctcaacttcccgagtagctgggactacaggtgcccaccaccacgcccggataattttttgtatttctagtagagacagggtttcaccgtgttagccaggatggtcttgttctcctgacctcgtgatccacccgcctcgtcctctcaaagtgctggcattacaggcatgagccactgcacctggctggagtttttttttaagatagagtttcactcttgtcacccaggctggagtgcaacggcacgatctgggctcactgcaacctccacttcccaggttcaagcgattctcctgcctcagcctcccgagtagctgggattacaggcgcccgccaccatgcctggctaatttttgtattttcagtagagatggggttttgccatgttggccaggcttgtctcaaactcctgacctcaggtgatccacccacctcggcttcccaaagtgctgggattacaggcgtgagccactgtgcccagcagtttaaaagatttaaaagatgagattagaatgctaagggggtgcagcaagacttggagggttttgaatgccaattgagcattctgactttttgttgggcggtgtggaccagtggacccaatcatgttgctcaaggaatggatggggttggccctgccagcatagtgcctgggggactgctccatgccaggccctgtatgaggcactgggcagatgcatcgctcagttagagatgcagtccctgccctgtggaccttacagtcttctggcaaagcccaacagtaagcaggtaaacaaataagtcacagccgggtgcagtggcttatgcctgaatgccagcactttgggaggccgaggtgagaggatcacttgagcccaggagattgaggctgcagtgaactccgatggtgccactgcatgctagcctaggtgatagagcaagaccctgtctccaaaacaaaacaaaacaaacagaaagaacaaataagtcagaagttgctcattgtactaagtggcacgaagactcatcctcctcgtcaaggccttctttgaggtttgttctgggtcctcatctcttcagggaatcttgtccacacgtgtggccttagttacctcccatctccaggtgactcacacatttgtacctgtagcctagatcctcatgtcccagtgcatacttgaccacactcctaacttccctcaggctcccttccagagctgttttcacaatgagtggtgcgacctctcacctccacgtgtgcccctcatcaccaaggaacatcttcttttttttttttttttttttttgagatggagtctcactctgttgctcaggctggagtgcagtggcgtgatctcggctcactgcaacctctgtctcctgggttcaagtgattctcctgcctcagcctccccaaggcagatggatcactggaggtcaggagttcgagaccagcctggccaacgtggcgaaaccctgtctctcctaaaaatacaaaaattagctgggtatggtggcacgtgcctgtaatcccagctacttgggaggctgaggcacgagaattgcttgaacccgggaggtggaggttgcagtgagcccaggtcacgccattgtactccagcctgggcgacagagcaagactctgtcccccgacaaaatattattttattaagatctaatttgtcaatagattttgacttctatgagaatagaaactaatctcactgttgtgtccctagtatttaccatagaaccatagtgtgttttcagaaaatgttggttgaataacaaataaatgaaagaaaaaaaaaaactaaaaaggagcattcatagagaataatggtatgggggtgctccagatggaggggacctcttaggcaaaggtcctgaggcagtaaagaagctgaaatatatgtgaccctgaaagggggcccaaggggcaaaagcactgagatgggcaaagggaagagtggcacctgctgagtttgggtggtggtggcaaggccatattcaagtttgatggccctggtagtgagtttaagttttatttagtacacaggcaagcagcataatccagtttgtattttagaaagatcatatcagttgctgtatggaaactagattggaagggccaggagaggacccaaggaggccattctgttatttagggaagagatgatggtggtgtggatcgggttgtggttggtggaggaggagagaagtgcacagattgtagaagtgttttataagcagtcaagatttgtcgatggagtacatgtgggcagtgctcaagattgtgtcccacatttctttttttcttttttttttttgtttgattgggatggagtctcactgtattgcccaggctggagttcagtggcaccatctcggcttactgcaacctccacctcccgggttcaagcgattctcctgcctcagcctcccaagtacctggggctacaggcgcccgctaccacacccagctaatttttgtatttttaatagacatgaggtttcaccatgttggccaggctgttctcaaactcctgacctcaaatgatctgcccgcctcagcctcccaaagtgctgagattacaagtgtgagccactgtgcccggccttaaatttctgatggaagggtgccatataccgagaaggggaaatctggcaggggaacaggtttggggagaaatcaagaattctatttttttttttaattttttgttttttagagacagggtctccttcttttgcccaggctggaatgcagtggtgcagtcatagctcaccacagccttgaattcctgggcttaagcaatcctcgtgcttccacaggcacatgccaccacatccatgctaatttgtttcttctcttggtaaagatgaggtctcgctgtgttgcctaggctggtttcaaactcttgggcttaagtgatcctcttgccttggcctcccaaaatgttagggttacaagcatgagccacttgtgcctggccaagaattctatctgtatatctttataggtcttgagacatccaagtggagatgtcaagaaggcagtatgtgagtttggaattcaaaggagcgggctggagatacacatttgagagctgttagcatcgagaccgtgggtttcaaacctgcatctgtgtcagaatcacttggcgtcattcccagagagtatgattcagtggtggtatcttaggctttttatggcaagcaagagaaaccatcctgagctgatttaagcagaaaagggctgcactgaaagggaatgttcagtagttcacagaatttctgggaagttggaaaactggggctgggcagcaggcaggatctcagccaaaatcatgccaccgagccagtttggcaggacactgctgccacacactaaatgccatcgctgtgtcactgttccctgaacactagacaccattgctgtggttgccaccagcattggaatggatcttccactgtgctcctgattcaaagtctgtagtgagggcttctgattggttgagcttaggtgtaagggaggctggaaaagcaagaatttgttgttttcagctttcacaggaggtgaactctgccaagacctgtgcagtgaggaagtccccagacataggaaggaggtcagatgccagactggcacacaatgacagatgtacttgacagcaagtttgccagcttgtgggattgtctgggaatctgcatttaaaccagcaccctggaaattcccatgcaggtgctgcctgaaccacatttgcatccattgcttgaactggtacttaaagctgtgggggctgggcgcggtggcccacacccgtaatcccagcactttgggaggctgaggcagggggaccacttgaggtcaggagtttgagaccagcctggccaacatggcgaaaccccgtctcactaaaaatgcaaaaaattagccgggcgtggtggcacgcacctgtagtcccagctattcggaggctgaggcaggagaatcgcttgaacccgggaggtggaggttgcagtgagccgagattgcgccactgcactccagcctgggtgaaagggcaagactatgtctcaaaaaaataaaaataaataaataaataaagctgtggaatggacaagatcacctagagagaggaacgaagaaggcccagacccaagccctggggaccctcggtatcaagagattgggataggaagaggaattaataaaggagaccaagaacgggctgtcagtggggaaggaaggaaataagacagtgttgtgcctcagaagccaggagagaagtgttccgaggagaaggggtgctcggctctgttagatgctgcccagatgcccagaggtaaaataagacaatgacagagacacagcctctggctttggcaacacggaggtcattgggaaccttaagagcagatttatggctcacgcctgtaatcccagcagtttgggggactaaggcgggtggatcacctgaggtcaggagttcgagaccagcctggccaacatggcaaaaccccatctctactaaaaatacaaaaattagccagccatggtggcaggcacctgtaatcccagctactcaggaggctgaggcaggagaattgcttgaacccgggaggtggatgtttcagtgagccgagattgtgccactgcagacacagcaaggctccatctcaaaaaaaaaaaaaaaaaaaaaaaagagcagatttaatgccattttcgcctccacaccatcctggactgatttgaggagggggcagatgagaagttctccctagaaggggagcagagacatagggtgtggctagggccctgggatcagcagggttttctaggatggactggggacccaactccactgaaccagcctcctccctaccaacagcctctgcacagggggccgagggtcttcccagagttgtcaaccttgagcctgtctctcaaagtctccttctctccccaaatttgtctttttttgtgctcacttccttgcctagtgttcagctgtttctggccactgaggtacaaggagacagatgactcaggcagatttggaggcagaaactgtaactttaggtcagagcagaaggaacatgctttccctgaaggcaatttgatcatatcattctcagacaagatgctgctagaaggtcccttcgatgggcctagaacttgggcccagggcagatgagggagtgagacccacaggggaacagtgagtggcttctgtgactctaggtcagggccctggaaaaactgattccacctcaccaacgtcacaggaggtgctttggagggcatgggaggctgagctgggaacagctgctgaaggttctctaacttgactggttttagaccttgaaagagcttttaagaatctcagctgctgcgggctacacccagacccactgaatcagaatctcccaggggcgaggcctgggcaagtgtgcagttcagaagttcccaggtaactgatgagcagttggggtgaaaactattgtggtaagctattgcatgcccactgaaggttagtaatccattaagccatatttactgaatgcctgtggtgtacaaaggcaggctctgagggcacggagagaactagacaaggtctccttctgggtgggaggactctgccagtgaaaagttgattgacaacctgtagcatacagggatgtggctgaggtctgtggcgagagtccagtaactaaagtcagacagacttgggtttgaattcctattggctgtgtgactttgggcaaatgacttaacctttctgaatctcagttttctgatctgtgaattagggatgaagataattgtcttatgggtttgtttgaggggataacacatagaaaatctagcaagcatgaacctagcacgtaacaggtacttagtaattttttaaaattccctcttactgtaaacacaagtacacctgcacatagggtagttaaaaagatcaggaaacatacagagaaaagaggaaagtaattgcaatagggatgaggtaattaccatgagtgagtgttgagattatctgtgcggtcctggcaccagagcaaaaagagaaaccttatgtaccttggaggttttggggaatgaacagctaagcctgattttggacaaggcagggtcttccctcagctctgccctttgctctctgcctcctgttcatttctttgtcaaacatttgctgaggccagtgtggtggctcatacccgtaatcccagcactgtgggacgccaaggtgggaggatcacttgaagccaggagtttgagaccaccctggtctcaaacaacaaagcaagaccctgtctctacgaaaacaaaacaaaacatttgctgagaggctacctagcagttctcagtcctggctgcaccctacaatcccttaggttgcttttaggtagatttcctctcattcaggtaaaattcacataacataaaactcaccattttaaaatgtacaattcagtggccttaagtatattcacagtgttgtgtagtcatcaccactatgtaattccagaacatttccatcatcccaaaaagaaaccctgtattgattagtagttactctccactccttttccccggcccccgacaactttccatctctatggctttacctattctggacagttcatgtgaatgaaatcctactatatgtggccttttttgtctgatctctttcagttgcacagtgttttcaaggttcatccgtgttgtctgggttgtgttaaaaagcaataaaaataggaaaaacaaacacaccaggcagtgttgtaagcacttttcagatattagcacatcataacacagggcctgtccagttatttggatacagagaaggtgtctgctgggcaggaatagctaccatgaagccctttctgtgtgtattatgctgggccacgtgcttaaatgcctgactgagttcagtctgattagatagatgctgttattatgccatttgacagatggggaacatctatcagagaagctgtgtcacttgcctcaggtcacacagctaagaggactggaaccagaatttggactttaggacagtatgacttgaaagccggagtccttaacccttgctgtcttttctatattgccactgggccttgctagtatgtattcatacatttaatcattcattcattccacacatgcttattaacacccacatcctgagttttgtgttgagtgctgcagatacaaaggtaaatgagccattccctgcctttctggagttttcagccccgtagagatcagacatgtatggcaaataagggccaggatactctaatgaaagcctgtagtgggcataggatggaataaaggtaggcaggatcagttctgttgtggtggggagggggtgacctgtaagttgagtcgggaaagatgaagtgtttactagacagaatggggcaagggccctccaggcagagggagcagcatgagcaaaggtctgatggctggaaacagtttggcatatttaggaaattgccaagagttcaatagggatggttttaagggaccagtgatggatagcaagcccaagtggggggcagggagggattcatcctggccaacaagggaacccagaaggtgggaagtactgtttgctgctctgtccaagagggcaggccaggttcttccccaggattgggtggaattcagggcttgaggccaggggtcgggtaggaggaaccttccgcggttagtccagcaaagttcttgttctcttagctcatcaccgccaagcaatctcctgaggaaaatcccagccaggaaacttggggtttgcagaggcctcagcatacatcgagggtgtggctcccttcttgcaacccctcttcctccctgcttcccaccaccccacaagggacagccggtaaggctgagctggtgaggctggacaagtgcccaggctgggaagacgtctgcagaggcctgaccaaggggcgcacggccagtcacaggccccagcagtgcaggaaggaaaacagcaagaggccaggggatcctgaaataataaatgtcagagcatacaggagccttccctgtcaccacccaaacccttcattccagaagaggagtcagaggctcagggtgggaaggagactggccaggtcacaccgcgagacaggggcagggctggggctggccctgggtcctggctcccaggccttgcagtgtagccaccgtaggggctgtggggtggcaagcagggccaagggccaccttggtatggatgaggcagaggggtagctgggaagagcactgccctcctctggcacccccttctgccccagcctggactctcaggtgctgggggtgggggctgatccagaggaaaaccatttggagtctttggctcactcttgctggtggctgaggttggagcagccttgtagggtatgactaacctcaactgtgtcctagcgctttggcctggaaggggatttagagctcgtgtctgttagctcaaaattggacagatgaggaaactgaggcatagaaggaggaaggaactcgctcagaggcacactgagggcttaatggcagagacagccctaaaattcagcactttccagttcagggctcttggtctcatggccttgttctatatgcagtagaaggccattctctcagaatgtttctgcagcacctctgaagatgcctggcttccaccattagaaaaaacattacctcaatttcttttcacagcaatccttacagagataactggggctcagagagagaagatttagctcgtagtttgctttagtgtgatagcaagaaagggctctggaggcagaggtctctgcgtttcttagaacttcctacatgaccttgagcaaactgcctaacctaccccagcctcagtttcttcatctgtaagatggggaggataataactacctcacagagttgttgggaggaataggccaggtaacaaacataaaatgcctgccccaaagtgagcagtcagttagtggggcgataggtagttgaattcatgctaataatagactcaagctgggagcttggaatgggagtccttcctgttgggtgatctgctccgggccagggcctggctgtgttcctatcaccctgtcatgcctgggggacaaggctgaaccctctttgtcccgcttgaacatggatctgcagcccagccctggagttaaactttctatgttgagaattaccaagtaactgccctgttcagaacccttcaggagcaccccatcacttatagaataaaacctagaggtttggttaaaagcatggactctggagcccaactgcctgggtttgagtttattttatttattattattgttattattatttttgagatagggtctcgctctgttgctcaggctggagtgcagtggtgcaatcagagctcactgcagccttggactcctgggctcaagtgataccctaccttagcttcccaagtggctgggactacaggtgtgtgccaccatgcctggaaaattgttttgtattttttgtagagacagggtttcgccatgttgcccaggctggtctcaaacttctgggctcaagcaatccacccacttgggcctcccaaagtgctgggattacaggcaggagccacaacacctgacctgcattttctgtaaattggtaattggatctagaagtgagaagccctgggttttttttgtttttttttttgtactttatcattttgttaaatattttaagtgtaacttggtttgctcattcaggtattgtactttttttttttttttttttttgagatggagtctcactctgtcacccaggctggagtgcagtggtgtgatctcggctcactacaacccccacctcctggattcaagtgattcgcctcagcctcccaagtagctgggactacaaaaattagccaccacacccggctaatttttgtatttttagtagagatagggtttcaccctatctcaactaaaggatggtctcaaactcctgacctcgtgatcctcccacctcagcctcccaaagtgctgggattacaggcgtgagccaccgcaccctgccaaacgttgtatttttagcatcatgtttaatatgtagtacatataatttaatcatctttgtggacactggcgtcagagaccaaagagccaggattcagccatcccacaggaaaactcctttttagcgttggagtttcattgatcttcccacatcacgtatactgttagtattgattgattgaaaaatatgggaaagaacaaatgaattcaagaatgcttttaaagggttctgtgtcttattgatcatagagttgcacatatttggaatgtggtcagactaatttgtgaaacatttttatactcgtcagtagtgctcatgatgagtgtggcttcacagtgtcctgctagtaacaccatggaccttcagggtctgggtccattgcctggaaatgaacaagggagttagagtcttaacggtttagttcccaggtccacattttggctgtgtgagctcaggcaatgatcttcactgttctgtgcctcgctgactcatcagccagatgggaacaaaaatgatgactgccccattaagatgctgtgtgtctgaaatggtgggtgtcaaactcccttacaaactgtaaagctctatacaagttttaggttgtattttttttttctttttctttttttttttttttttgagacggagtctcactctgtcacccaggctagagtgcagtggcgtgatctcggctcactgcaacctctgcctcccgggttcaagcagttctctgcctcagcctcctgagtagccgggactacaggcacctgccaccacacccagctaattttttttgtatttttagtagagacggagtttcaccctcttgaccagggtggtcttgaactcctgacctcgtgatccacctccctctgcctcccaaagtgctgggattacaggcgtgagccaccacgccgacctagtttgtatttgtttcttagtttgtttgcatttccagtgaaacctggggcaagaaactcacctgagcctttattttgcagtctgtaaaatgaggaggtaatgttagataatctctaatattctgtgacttcgtctcttaaggaacaacaccatagtccaaagcaaagatagaaaatgtttttcatctcctctgccaactctagtttaattggtagaggctaccatcatatcttaacagaatgatgaaccaaatccacagtcagtggggaaaacactgtgatcgattaataatggctataatgggccaggcgtggtggctcacgcctgtagtcccagctacttgggaggctgaggcaggagaatggcatgaacccaggaggtggagcttgcagtgagccgagatcacgccactgcacttcagcacttcagcctaggcaacagagcaagactccatttcaaaaatagtaataataataataataataataataataatggctgtaatgggccgggtgaggtggctcacgcctgtagtcctagcactttgggaggctgaggcgggcggattacctgaggtcaggagttcaagaccagcctggccaacatggtgaaacccctgtctctactacagaaaattagccaggtgcagtggcgcatgcctgtaatcccagctactctggaggctgaggcaggataattgcttgaacctgggaggcggaggttgcggtgaactgagatcacaccactgcactccagcctgggctacagagcgagatttcatctcaaaataataataataataataatggctgtaatggtcatgggatgacacagaagtgataactatgtactatattataatggtccaaaggaatgaatgtctaatggtgaaatgtaatctgtatctcccaaggccttagctctagcagctctgcccccttggcttgagttgccttggtaaccacagctggctctgagaaaccatgggaatgaagaatgggtcctattgatgaatcctgacccagaagggggcatgcagaaggcccttctaggcagggcagctgggcatggcctagtgctgccatctgtggtcttttgcctgcagagaacacaaaccagagagccagagcatggtgtgtgtgtatgttgggatcagggtaggggacacaaagggcagtgccagcagctggaatttaggccttgtttagggccagccagggtaggctgcccaaaggactccagtgggctttccaagctcagacgtgtctcttacactaagatgtgtttcagccacctttgcccagtgcctgccaggctcttgcatggatccattgactcttagctttgaatgaaatctaaatagctgtccattctaatccaaaatccagtgtctgaatcactctctagcacctaaagtatttgaatacttcaagtgacagggagctcactgccttcaggggtggcctgttcttccttagaaatgtcccctgtttgagctgaagtctgtttctgcctccctaacttccacctctcagtcctgggaatcctctctgaggccagcctgaacaaatccgttttcttttcagtaggacatcctttacagtgtttgtattcggggcctcaccattgctgtcaaccttgttttccttggacagatctccctctgtgccctgccttctccctttcctaagcctgaggggatggtgagggaatatggtagaggtggtagaattgggatttaggtttggaggcagatccagtcccaagatcaaataagctgtgccccctaactttgtggggcagcttagagatggggaaagaacattggccctggatttggctagtcctggatttaaattgtaactctgggccaggtgcagtggctcatgtctgtaatcccagcactttgggaggccgaggtgggcagatcatctgaggtcgggagttcgagaccagcctggtcaagatggcgaaaccctgtctctactaaaaatacaaaaattagctgggcatggtggcacacgcctgtaaacccagctactcaggaggctgaggcaggaggatcgcttgaacccaggaggcagaggtggcagtgagctgagattgtgtgtctgcactctagcctgggcgagagtgagagtctatcccccccccaaaaaaaaagaaagaaaaaaaagaaaaaaagttacagctctgccactgttcatcactgtgtgacttggacatgttcctcctcctgacagcttcatctttaaaatgggaatggcaatgccttcctcaaagagtggccaggatagtgacaagtaatgaggctgcacagagcaggcacttgggacatgctgcttgcactctccctgcccggcggcagaggtctgctgtggtccctctccacctgtgcttccccacagcttgctgacgaggatcaacatggagttgggggtgtggggagatatgtttaattaattcaatgaaagttgagaaattcctaaaccaaattcaatttaattttgaagtagataacatttttagttatcaaatagtggacagtattctaagcactttacctatagaatttacttaatctccccagtaaccttatgtggtacgcaatattatcatcttcattttatgaatggggaaattgagggactgagagatcacatcaggtacctggtggagctggaattcaaatccaggtagtttggggacagccccatacttttagcaatgatgatgtactgcatctctgaagagaattagaacagtaattcccaaactttagcatgcattagaatcacctggagggcttgttaaaccacagattgctggacctcacccccagattttctgattcagctggagaatttgcttttctaacaagttcctggatgatgcctgctgctggttgagggcccccaccttgagaatctctgactatcagggattaaatgggcccacctgaacccagaagctgatttttttttttttttttttttttttttttttttttaagacagtgtctcattctgtcactcaggctggagtgcagtggcatgattatagcttactgcaacctcgaactcctgggctcaagggctcctctcatcccagcctcccaaatagctgggactacaggtgtgtgtcacagcacttggctaacttttttaaaaaattttttgtaatggtcgggtgcagtgcctcatgcctgtaatcccagcactttgggaggccaagacaggaggatcagttgaggtcaggagtttgaaaccagcttggccaacatggcgaaaccccatctctactaaaaatacaaaaattagccgggcatggtggcgggcacctgtagtcccaactacttaggagcctgaggcaggagaatcgattgaacctgggaagtggaggttgcagtgagccgagatcacaccactgcactccaacctgggcaacagagagagactgtgtctcaaaaaaaaaaattttttttttttttggtatagatcggggtgggggtctcactttgttgccgaggctggtcttgaactcctgggctcaagcgatcctctcaccttggcctcccaaagtgctgggatgataggagggagccgccacacctggcttttccttcatctatccagtttcatgggaaacgagggctgatctcacacagaggcagaaaacaaaccacagtaagaaccatactcatgttttccaaatgcctcaagccttgccatgtttgtgatctcattaagcctcacagtaattctgtgagttaagcagagaatggatttttctgcctgtaatcccagcactttgggaggccgaggcaggcggatcacgaggtcaggagtttgagaccagcctggccaacatggtgaaaccccgtctctactaaagataaaaattagccaggcatggtggcgggcacctgtaatcctagctactcgggaggctgaggcaggagaatcatttgaacctgggagacggaggttgcagtgagccgagattgtgccattgcactccaggctgggcaacagggcgagattccatctcaaaaataaaaaaataaaaaaataaaaatctattttaaaggagaggaagtttagaaaactagctgggctagtatcacccaaggagataattttggagatgctggggctagaatcttagttactgactcatcatagcactctggaaacctctgcctttcctcaaaataccttcctttccccaggctactatcagaatcgtctccttaaaactaaatttttttatgagtgtgtggatgagtggattaaaaaaaaaaacctgcatttctttagcttaaatctttgagccctattataccacaggataggtgttatcaaccagtgtaaatgattttcagatattttcttgagaaaggagtaattagaacttttcccttttcatgctccctatgggcacttgcatgttcttaagtctgtggttctcttgaaggaaggggccatgtcttatgtgtccccaccatctggcaccatgcctggctgaaacagtcaccaagaaatgcttgttgaaatgaatgaatgaatggaggaactatgttcctgtccttgtccattcttcccagagcacgcctcccttcctggcagtcctaccattttttaccaagcattccctcccctctacctcatagtgtagtctctttagtctcttttctgcctgtccaggggccagagttaagcaacacagcttaagggacgccttccccattccttcaaagcagacatggctctgttttccctggactcccaggaaccttccatcatagccctcatcacattgcatgataagtgtctgcttataatggctttttcttcccttcaatgatgatgtccttgagagctgagattgtgtcttttttgtttgttttttgagacggagtctcacactgccctcctggctggggtgcaatggcgtgatctcagctcactgcagcctccgcctcccaggttcaagcgattctcctgcctccgcctccctagtagctgggactacaggcacatgccaccatgcccggctaattttttgtatttttagtagagacgtgttagccaggatggtctcgatcttgacttcgtgatctgccagcctcagcctcccaaagtgctgggattacaggtgtgagccactgtgcccggctgagattgtgtcttttttacacagggtgtagtgggcactcaataactaattgaatgaataaacagccatgtgaacttggctgccaagagcagtagggacgggaatggtatctggctgggaagctgtttcctgatagatgtctgacaagggcatcgaaaaacagtttgtggccgggcgcggtggctcacgcctgtaatcccagcactttgggaggccgaggcaggcggatcatgaggtcaggagatcgagaccatcctggctaacacggtgaaaccccgtctctactaaaaaatacaaaaaattagccgggcgtggtggcgggcgcctatagtcccagctactcgggaggctgagtcaggagaatggcgtgaacccgggaggcagagcttgcagtgagccgagattgtgccactgcactccagcctgggctacaaagcgagactccatctcaaaaaaaaaaaaagaaaagaaaaacagtctgtgagtgattcgggtgacttgtctccctttaccagttagagctagtttcagccacaagtggcagaatacccagtataacagtggctcaaataagagatttctctttcatattaaagaattccacagataagtagactggggctgctagggtagtttcctaatcactagggacaaggctgatatcttgttgctccgccatccataacaaatggcttctacttcatggtccaggattgctgcctgagctctagacatcgccagcacattgtagccagaagaaaggggtgacagagggtacccttgcattccccttttttcttttgttttttttttttgtgggggggtgcgtttgagacagggtcttgctctgttgcccaggctggagtgcagtggcacgatcacagctcactatagcctcaactccctggggtcaaacagtcctcccacctcagcctcctgagtagctggaattataggcccatgccccatgcctggtttttaattttttgtagagacagactctcactatgttgcccaggctggcctcgaactaggctcaagcaatcctcccgccccagcttcccaaagtgtgagattacagccgtgagccaccccaccccaggccctttttttctaaattaaaaaaaatcgactttattttttagagcagttttaggttcacagcaaaattgggcaggaagtacatagagttaccatatacacacagcctccccctctgtcaacagctcttaccagagtggtacatttgtttcaatgaccatacattgacacatcatcaccaaaagtccatagtttacattagggttcactcttagtgttgtacattctgtgggattggacaagtgtataattccatgtatccaccattatagcatcatacagaaatgtttccctgccctaaaaaccctctgtgcttcacctgttcctcctcactacccccatccctggccaccactgatctttttactgtctccatagttttgccttttccagaatatcgtatagttgaaatcatgtagtagccttttcaaattggcttctttcacttagtgatgtgcatgtaactttcctctgcatcttttcatggtttgatagctcatttcttttcagtgatgaataatatttcactctctggatgcatgacaatttctttatccattcacctactgaaggacatcttggttgtttccaaattttggtaattatgaataaagctgatgtaaacatccgtgtgcaggtatgtatacgttttcaactcattgagaaaatatgaaggagtatgattgctgactcatttggcaagagtacgtttagttaagaaactgtcaaactgtcttccgaagtggctgtaccattttgcattcccaccaacaatgggagtttctgttgctccacatctttgtcagtatttgtgttttggggttatttatttatttatttgtgtgtgtgtgtgtttttgtttggttttttttttttttttttttgagatggagtctcactctgtcacctgggctggagtgcagtggcactgtctcagctcactgcaacctccgcctcctaggttcaaatgattctcctgccttagcctcccgagtagctgggactacagcggtgtgccaccacgcctggctaatttttgtatttttagtagagacagggtttcaccatgtttgccaggctggtcttgaactcctggcctcaagtgatccaccagcctcagcctcccaaagtgctgggattataggcgtgaaccaccgtgcccggcctccctttgccagtatttggtgttgtcagtgttttggattttggccattctaacaggtgtgtagtccctcccttcctttttatttttcaattttttaaagccactttattgaggtaggattgacatgtaaaaagctatacatagtcagtgtatacaacttgatgagtttgggggttatctcccttctttgtaagatactttttggaagttaacaattaaaatattatattccatggccaggacttagtcccatgaccacagttagctgcaaggtaggaaatgtagtctttattctaggtcgccaagtggccatctgaaaagtcaggtttcttgtgaaggaagaagagagaatggacactgggagccacccagtgatctctgccacactgcagggaagggaaatcttctcaaacttgcttaaaggaacttcgttgggtggattcaggggtatttcatggaatttcaccaaagacataatgtgtggaggttgcctctgaagaggtagcatctggaaagttgccagaaaccagcaccactcttcctcttctgccttgctgtggcggtgtggggcttgttcatgtctttctacacatctgctctgttcttttctctctgcatgtggcaggaaggacatcccagctttagcatttcagtcagtcaactagctttccagagcccaattccaaagtccttggagagagaatctgattggtccagcttgggtcaggtgggagagagaatctgattggtttagcttgaaccaggtgtctgtcgactctggctagaacaaacaaggctgcaggggcccacctccagaggaagggagggcagttttcagaaaatgggtgtcatgggatgggaagactcctcagaatgtatctagagcatgaacatactcctctcaggtccatgtcccaggactttgcaaaccatcattcatttaggtaaacatttattgggcaccttctgtgtgctaggtacatggatctgccctctagggattttggaaatttttttggaaattgttcatatcttttttttttttttttttttttgagatggagtctcgctcccattgtgcaggctggagtgcagtggtaccatctcagctcactgcaacctccacctctcgggttcaagagattctccttcctcagcctcctgagtagctgggattacaggtgtgcaccaccacgcccagctaatttttgtatttttagtagagacagtgtttcgccatgttggtcaggctggtcttgaactcctgacctcaggtgatccactgccttggcctcccagagtgctaggattacaggcgtgagccactgtgctggcccagttgttcatatctttaacctgaattgtcttttagagcgaaatcatagctccttaaattactcaccttttagctttccaggtttcaagatggggatcaagggatttggtaaacacatgcttctgtttccccatctggattttggggaaccatagaagtggccatgttcttgcctctttttttttttctttttctgttggccagtttagaaagaaacgttctcccctccacctctttgtctctttagtaagaaacattttggttgttttttgtttgtttgctttgctttttgagacagggctctctctgtcacccatgctggagtgcagtggcgcaatcagggctcactgcagttttgacctccccaggctcaggtgatcctcccacctcagcctcccaagtagctgggactataggtgcatgccaccacatggagatggggtttcgccaagctgtccaggctggtcttgaactccttggctcaagtgatcctcctgctttggcctccccaagtgctggaattacaggtgcaccccaccacacccagctaatttatttattttttcttttcggtagagacaaggtctcactatattgcctaggctggtcttgaactcctggcctcaagtgatcctcctgtttctgcctcccaaagtgctgggattataggcatgagccaccatgcccagcctcatgttttaaccaactcaaatatgatgccgtctccttaatcttcctgattcttttgttttctttcttcagccctgggatgggcctccacggatctcaaatatgaaagtgtctcaagttcacacccgaggaggagaatgttagatttctagcccctgtaggaaaagcacctggaacttggcagaccttcctagcatcagcagcagctgatgataacgatcacaggtgctgttcattttgaacatactccatgcctagcaccaagctaaatcctgtatttgcatcctctcatacatatagccctcataccaaccctgagaggtaggcatcgatttccccattttacacatggctaatcaggaagctcagaaagaataggcaacttgtgcccgggcacggtggctcatgcctgtaatcgcagcaccttgggaggccgaagcgggtggatcacttgaggtcaggagtttgagaccaacctggccaacacaatgaaaccccgtctctactaaaaatacaaaaaattagccaggtggtgggcacctgtaatcccagctagtcagaaggctgaggcaggagaattgcttgaacctggcaggcagaggttgcagtgagccaagattgtgcaactgcactccagcctgagcaacaagagcaaaacttggtctcaaaaaaaataggcaacttgttcaaggtcacatagcccccgagtagtggagctgagcttcgtaactagaccccccttcctccagaggcttcccacatgccaccggcctctgagaacactccacattgcctctgagttctgccctatgcatgttctcctgtgggtatcattttgaatctttggcagtaccatttccaatgtgtttactaactcttgtcatgtaactctggaaatcagactctgatcccattttatttttgtcactgggaagaacagctgggctggggtcagggtggggctgtggtacatggatggaacactgttctgttgcacccgggaagtccagctctgtggcttccccaccatgtgtctctcggtaagggcctcccatctcttggcttcagttttctcatctgtgggccccttccagctcgacattctgtgttttccaagttaactgtgcatttcgcaaggatttcatgaggttgtcaacttccatgccccactgaaagggggagtgtttcccatctaggctgagcctgcttggggcatgtgagacttgcttcttgccatcacatctctggcctttcccacattctgatgtttgttctgcagcctctgggctttggggttatctggtgttgtctctccagttctccccagtggtgatggagtgtgctcccgccaccctctgccatctccccagactcaggtaactgaatgcctccaacccctctctgctcacccatagcatcctggcctcttcctccttgtcctgacataactgtttattgagcctggggtttggtgaacaagtgtaccctgctttgtatcttaagggaagatagagatgtgtgtgttctcccctctggccttttgctcagcattttgtacatatttacaaatcattcatcttctcagcaactccacaagtcccctagtatcatccccattttgtagacaaggcactcaaggctcagagaagttaacagatttgtctaacggacacaccagctactgccagaggcaagattcaaacccaggcctggcacaccctgtcatgccacgtacctttgactcactacatttacgctgcattggattcagggagaaaagtctgtggtcttcttggagtggtgtgactggtctgtggtttctgtgtggttttttgtttggtggggtaaacaggaagaccctagggataagttccagaggacagcaaaactcaatgtatttgtttggagggcggttggggggtggaaatcatagatacagcgttcctgaaggaagcaccctattccagcttggcatccctgaacctctgtccacatttgcttccagatcttggaaggagaccaagccatcctgcagagaataaagaaggctgtgcgggcaatccatagctccggccttggtaagtgagcctcctgggtgccccgcctggtcaggaagcccctctcccagccccagcctggagctaactccaagctcccgtctgtacctccacaggccatgtggagaatgaagagcagtaccgagaggccgtggaatccttaggcaacagccacctgtcccagaacagccatgagctgtccacaggcttcctaaacttggccgtgttcacccgcgaggttgctgcgctcttcaagaacctggtgaggcccctgtctcttccttgcccagactcagggtaaatctagtggtcttaagaacctgactgggaaagggtccgtttccttccttctcccaatttgcccttgatctctgacctgagttcagacctgaggtccctttccagccctgacccttcttttggataatcctcctttctctctggcttcttacccaactaactcttctctctgttctcctccttctcttcacccaggagcagagggggtctcacagcagggaagagccccgtgcaagggagggttccctggaggagctttgggataaaggagagacaggctcgggggttcctacctttataccactactgctgccactgccaccaccaccgctgccaccgcctcctcctctcctcactccctctttgtcctctgctttcccaatccacatctgcttcgtacttaaatcccaggacctgtccctgcctccacaagcgtctcagcccctgtacatggcccagtggcctcgggttgcttcccgatggcctccttggtgactgcctcctctctggtccttcaagtcctttcctcaaggccaccctgtgacagcagctcttcccatgtgcaggcacagttctcactagttcatgtgttcactcattcgatccggatgcacagctctgtggggctggtgtgactgttgtctccaccttacaggctaggaaactaggacctcaaggttaagcagcttgcccgaggtcacacggttcggtttgaacccaggttgtctggctccagagtccaagcataagcctggctacactgcctcccaggaaagcctctcatctccctccaggctccatggcactggaccagctcttgtggctccagtcctacccagcatcctccctggttggcaggggccacatcatccttgagaggcagtgtgctcagtggttaagcacccaaccttggacctagactccagcttggaatcttcactctgctgcttactaggtcaagtcactcagtctgcccaagccccaggtctctcatctgtgaaactgggataataatgctgcctacctcacagagcggtaatgaggattaagcaagttagtgcctactttatggtaagcgctcagtaaatgttggctaatattatattaatggcaaaacagcaattacttttgcaccaacctaataaaatctatcattgttatagctcttggcatagctgtgcctcgtacactgtcctgcatgtaaaaagcctttaacagtgtttgaggctgggtgcaacatttcaaaccttaatcccagtggtttaggagcctgaggtgtgtggatcgcttgagcccagaagctctagaccagcctgggcaatgtagtgagaccctgactctacaaaagtatgaaaattgccgggtgcggtggctcacgcctgtaatcccagcactttgggaggccaaggtgggcggatcacttgaggtcagagattcgagaccagcctggccaacatggtgaaactgtctttgcgaaaaaatacaaaaattagttgggtgtggtatcaggtgcctgtaatcccagctactcaggaggctgaggcaggagaatcacttgaacccgggaggcggaggtggcagtgagctgagatcatgccactgcactccagcctgggtgacagagcgagattccatctcaaaaaaaaaaaaaaaaaaatgccaggtgtgggggcgtatgcctgtggtcccagctactcgggatgctgaagtaggaagatcagtttagcctgggggaagttgaggctgtagtgagtgtgatcacaccactgtgctccagcctgggtgacaaagcaagaccctgtctcaaaaaaaaaaatagtgtttgagttcaattgaattagtgtccttctttgtcttcacctcttctctccctgtttcagtcaaactagtgtttcctgggggtctgctgtctagtggacattgtaccaggggttggtgacacaggaaagtgtcagactgcctcagagagccacagtctagtgggggagagaaaaactagggtgtggactagtgtcaagaaataccagcagcatggcacaaactcaaggacccagcagctggtgtcagaggcctagtgctgccatggttcagaaaaggggagatcagcatagaccaggcgggaggagtagccaggagagacttcctggaggaggagagacccaagctgtaccttggaagctggttgaaatattaggcctctttaggttgcgaaatcacagaaacccaactcaaactaggttaaatttttaaaagggaattcattagcccctgtaatgagaagtccaggggcgcagctggcttaggctctatcctttcctcttaaggtagtttctctgtctctgctcagtggacaggatagcccagcaggcccagatgcccatcttaccaaaataaagatggtctttctcccacaacttaggcagaaaaatcccagcgaggattgtgattggctggcttgggtgcgtgcctgttccctatccagtccctctatcctggggctggggtgccctgctcagatctgacttctgcgtttaccccatctgaccacagaggaggagttccccacaggaaagggggttctatgaccattaataggggaggctctgaagcgttagccagcccagaacaacagacgtgcactacaggtcaacttgagagagtcagagaggagaagggaggctgctcctggcgaggaacaggggagagattgactgtgggatgctgctggagcagtgcagcgatgaggctggagccatcagggaaggggctcactctgacacacctcggcctcccctcctgccccctttcacacaggaagcctggcgggcagcaggtcagccatcctaagcagaccccagagctggatcctctagtccccccccgcaggctcagcactcctgccatgacggtcccccttacttggctgtcatctctttgataacatcttttcctctcccctacttcccttccccgctgctctctttgccaagtgatgcttcactgtacaccgaatccctaggggctggatgccggtcacctgaggcgggaatgagcgtctctgttttttccagattcagaacttgaacaacattgtctctttccccctggacagtctgatgaaggggcagctgagggacggtcgacaggtgagtctccatgctgggagtggtggtgggacagagtaaaagaggggtgggcaggagactgttggggggcagggctggactgagggtggaggccaggtgaaggggctgtcttagcgggagtgatgagcctggggaggtctggaggacctggctcgggtcagcctaggatggctgacctgctgtctgccaggccccttgtgtgaaacatgtcatgtaaatcttacaaccatcctatgaggtaggctttgtgggtacactcatccccattttgcagttgaaattcgaggccaagggagttaggtaacctgctgatggtttacataactaggaagtagagagcccatgtgggaatccagggatcctgaatcccatactcgagctgctttctctgtgcctggcagcccttggctggatgcagagtggagctcaaagaaggtgacagaataatctctctgggcaatctgccccagacggcccaggggaggagccgtgctcccccaagagggttccctccctgccctaggctgccagcgtggcaccagcctgctaaccacacaaaccagacaggcagctttttcaccttgggagtctcggggttgttcagaagggtgtgagcagcctggctggatgaggcttaggcaagctaggcagggggtagtcaggtctccctggtttgctgtatggcctggggtagacttctcaacctctctgtgcatgttccttgacctgtacccttgctctaagaggatgatctagcaccaggcaggagaaaatgctgggctaaagttaggcagggggaatttggccttcatcctcccatcctcatggtcatgactgatctctcttctgagcaagaggactcagggtagagcccaaagatctcttcacaccccaagccatggcccaccaaacctgactgattcttggcatctctggggaggagaaggtctgctgggaggagggccttagctctgagaaatggggtcagctgagcctgtttggtgggggcaggtttgcagcaggactgtgggggcaggggctggttagagaagggctctgagcagctcaggggagcacactagcaggtcctcctacaggcagcagagcatactgtttattccagtgctccagcttccctctgggcaaattgtccttttttaacccacaggattccaaaaaacagctggagaaggcatggaaggactatgaagccaaaatgtaagtggccacagccagggtcgtttgtctgggagagtagcacttaggctggatagggaagaacctaaatgctgccgagacatgtcatccagaattgggtgacatctggctctgtagaggcatttacagcagattgtttatacccagacctgactggattctggggactgggccacgagaccaccaaaggagctattgtgaagggacctcaggatgctgctctcagagtcccatctgctcagtggtgccagacatgggcagggatgggaaggagctagcactgaccaaacacctccgcgtgctggccatttaatcttcacagtcaccctgtcatgtgtgagagaggtattagtatcacaattaccacaggaggactcagagaggttaagtcacttgcccaaggccccacagcttggcagaggcagaactggggtttatgccccttgctcctcgttcctcagtgtcagttggtatatctagagaaggaaatggctttctgtgtcctgtgcacaccacacgatactccagatctctcaccagctactgggacatcatggggaaagaaggagcctcagtcaaccagtggccaattcctcctgggcagagactccttgggctctgtcttatgaggagtctgtccagatcccagcctttgccctctgcccagccaggcccatactgtagagcattgtttgtgcttttttgtaaaattttgttttctcttgcattttgccaaagcaatttatgcttattatgaataattttgaaaatatggagaagtaaaagaagaaaaaaaattaatcatccttagcagaggcttagggttatggcaggcggataatactctctgttgtttgaatttttttttttacaaggtctgggtaacattgcagttttcatcattaaaaaaaaaaggttggatggggagaaactacccaaaaataggagaaaaattcttaattttcaagcctaaaatattaacattttaacatttatttttctatgtatgaagaaatgtttttataaaaatgagatcataacaacatactgttttgtaatctgcttttttcattcaaaaaatacattgtggccatctttgtacaccattacatattcttccacatcaatcaaacgggtgtgccaaaacctgcataagccattatgtatttaatctgttcctgtcattggagaagcatccttggatttaaatatttgtccctactcataattatttttgcaggatcaatttcaagaagtagatcctggagctttttattgttccctcagctcccagagccatggcaccgctccaagtctgaggcaaggtcacatcttgtccctgcacaagcatctccagccccagctgtgggcatagatcctgtgatgaagggtgtagacactgtgtggccatccctgtggggccctatccctgcctgtgatggggcacggccatctgctctcactggaggcccagggacgggtagtgagggcacaggctgaccttgtcttcatgatttgctgtggggccacatggccctcttcttcctgagttaccttaactaagccgttagactttcggggatcgtctaccaaatagaaataataagctctactctgctgaccttcccaaagcaggtctgcttttcctaggtttctatattgagccttcctgtagcatttcatttacaggccagactccatttagttgatgggaaagggggcttggctgaggttattcggtgagttatcgataggacctggactagaacccagggcttctgagtctagtgctatttctgccatgtggtctcctggctcccaccatggagccacatagtttgagctaatgtcttggcacgggtgactgtacactccttttcatacgggctccaggtgtagccagatatgcgtgagccgtaagttcctatgtaatttcaccacattcctaccaaacaagtctgagccccagctggaagggcccagggccctgatagcatctgtcaaataccactgggagcttcacccctggctgttcatataggaggaggattacctctccacgtggggctgctgagaaaggcatcccgggccctgtacagaggccaaatttatctaggcagttccatgtacaggtctgtttcctcatctgtacaatagggacagtaatacctttcagggtcaatgcggcgatgaataagcacggtgcatataaagcactcagcacttcagttcagcaagtatttattgaccacctatatgagccagaactaggaccagaataacacaggaagagattgacaggcagaaacccacacatctgctggtagcatttaccctagccagcttttaatcttgtgcaagccattttccttctctggatctcagcttcatcatctgtaaaatggtccctgttctgagagagactgttatctctcagaaaataaacagtgtgactgtcagcagctcgcaggaatgaggcagggaaggaggaatggaacaaacctgagtcacagtgttggttgcttgggctgcccctaaggcttaggcaccagccagtcctgggttcaactcctggccccaccacttaacagctgtgtgacttggacaaatgacttatctcagccataggctcctcttctataaaatgggataatgatcctgccttatggggctataattttaacatatgaagggcctagcagagtgcctgggcctaaaaattataactaggagcctgtaatcctagcactttgggaggccaagacaggaggatcacttgggctcaggagttcgaaaccagcctgggcaacatagtgagaccttgcctctatttaaaaaattgataataataatacatatataataaatataatacatatatttagaagccacacatggtggctaatgactgtaatctcagctacttgggaggctgaggcaggaggattgcttaaggccaggaaatttgagaccagcttgggagacagagctagaccttgtctctaaaaaagaataataataataattagtaataatagcagcttctactttagagtttcctttgtgccaggcagtggagtaaggtctttgcatctattaccagatttattctccctggcagggaaagctgctattgttattcccaatttataggtaagtagtgaggaatccctgccacctaagcgtggctcaaggtttcaaggttggtgggtgtgtggtatttaaatactttcctgcctgcaccaggagtacctgtacccatcccatgaataacactggactgttgctgtagtctccttctgcaatgatctcggtcttagtaactagcatttaagtactttcacccactatttcatttcattccttctattgcaattccactcataagacagaaaaatgtttctaacatttgaaatgttttagaaatgttttaaaaatgttggtgatcctttgaggatagggaaggaatgggacttgttattttataggggaagaaaagcactccccagctattaggtcatctcagaatgactatgtcagactttgtagggaaaatctctatgaattatcttagctgaggctgagggacagaactgtgataattgacaaagccattttgtcacagctgtgtacattttgtcaaagctgaagtacattgacaaagttgtgtacttcacggcttatctacaccttgagttaagtagcatcttttaatctctactagcattcaaaaaataaaagaaagaaagaagaaagtaccatatgctgaaaaaaattatctaaaagggatcaccagtatttactactctgtcatcattgccatcacttgaatcatcataatcctaccattcattgagggcttgccatatgccaggaactgtactgtttcctatgcattatattatccaaggactaggtgtcattacagtggttcccccttatccttgggggatacgttccgagacccccagtggatgcttgaaactgaagatgatactgaaccttacattaggttggtgcaaaagtaattccggcagtttttggcattaaaatgtaatctgtgctttttcctatatatacgtacctatgataaaaattaagcacagtaagagatgaacaataatagtaataaaacagaacatagtagcatcactactcttgcactctggggccattatgaagtaaactaagggttacttgaacacaagcactgcaatagtaaaacagctaatctgataaccaagaaggctactgaatgactaatggcaggtggtatagaccaggggtcctcaacccctgggccatggactggtacaggtccaaggcctgttaggaacctggactgaacagcaggaggtgagcgttggcaggcgagcgagattaccgcctgagttccgcctcctgtcagatcagcatggcattagattttcatagaagcacgaaccctattgtgagcttcacatgccagggatctaggttgcatgctccttatgagaatctaagcctgatgatctgagctggaacagttccatcccaaaaccaccctcccccaccctgctatccgtggaaatattgtcttccatgaaaccagtccctggtgccaagatgttggagactgctggatagacagtgtaaatacactgaacaaaaggatgattgatgttccaggcaggatggagcagaaggatgcaggatttcacatgccactcataatgatgcataatttaaaacttacaaattgggctgggcatggtggctcatgcctgtaattccagcactttgggaggccgaggcaggcagatcacctgaggtcaggagttcgagaccagcctgaaacacattgtgaaaccccggctctactaaaaatacgaaaattagctgggtgtggttgtgggcgcctgtaatcccagctacttgggaggctgaggcaggagaatcgcttgaacctgggaggcagaggttgcagtgagctgagatggcgccatggcactctagcctgggtgacaagcaaaactccatctcaaaaaaaaaaaaaaaaagacaaaaaaacttatgaattgtttatttctggaattttccatttaatatttttggacaggggttgaccatgaataactgaaaccacagaaagcaaaactacagagaaggggggactacagtattattctcattttccaaatggggaaacaagctcagaaagttttataaaggttaagtaagtgaaggagctgccattcaaatccagaatctacatttctaaccactgtactgtattgtggtttgctttttgtccatttactctggagcagatatatttccatgtcagtacagtcatccctcattatccatgggggattggttccaggacccccgcagataccaaaatctgaggatgctaaagccccttagtcagctgcctatatcctcaggctttacacccacagatatggagggccaatcacatgtacagatattccttcttcttttttttttttcttgagacagagtctactctgttgcccaggctggggtgcagtggtgcaatcatggctcactgcagccttgaactcctgggctcaagtgatcctcctacctcagcctcccatgtcgctgggacttacaggaccatgctaccatgcctggataatggtttaaaattttgttttaaagtagaaacggggtcttgctatgttgcctaggctggtcttgaactcctggcctcaaatgatcctcccacctcagcctcccaaagcacttggattacaggcatgagccactgcacctggccaatcttcattctaacagctgcatgatatttctatatatcgccatactattatttgtctaactacttcctactgatggacatttagcttattttccatttttgactattgaaagatatggtaacagtgtacactgggagacttcccctacgccagcccacctgatgtcacttggtctccctcattcctttttttttttggagagacagggtcttgctctgtcacccaggctggagtgcagtggcacaatcacagctcactgcagccttgacttcttgggctcaagggatcctcctacctcaaccttttgagtagctgggactataggcacacaccaccatgcctggatcatttttaaatttttctgtagagacagggtttcaccatgatgcccgagctggtttcgaacttctgggctcaagcaatcctctcaccttggcctcacaaagtgctgggattacaagcataagcttccacgcccagccctccctaattccatagcaagctgccaggcactgctgctgagatgctgcaggcccagccatcacctcccctctctgctgctttttttcagattcacaaagaagtctgtcctgaccctcaggcctggttcacaggatcagttcctaccctacttctaccactctttacaaactcttgcttggggtatcagaaagcttaaggaaataaaaaataaccccctctttaaaattaaaaaaaaaaaaaaaagcctacagagcctgcaatgtctggagacatttctggttgtcacagctggggggatgctactggcagctagtgggtggaggtcagggaggctgctaaacatacaaaccaccaggcagccccccataacaaagaatcatctggccaaaaatgttatcagttccatggttgagaaactgctctacaggtccccagggacagattctgtatatgaacactatcccagaggtcttacctactcaggagggcccagaactttagagtcagaagggacctgagaacttaccgtagaccattgcttcctccatttacagatgggaaaacagaggccttgaggggcctacagtaaaagctgccatgtgtcttctatgtgctgagtcttttccatgctgtgcctcatctgggtacagataagaatctccgttttccagatgaggagaccaaggctcagagaggggaataaatgcagccagcaagcagcagagtttgtattaatcccactctgtctttgtcttctctgctcagggctggcccccacttgagagcagaactattaagcaagccctttcctttacatgggatttggagtcacatgcacccagcctgagatgtggaaatactctcctggctgtgagtgggtagtctgctgggcgtgggatttccaggaaaccatttacacacagatccacccatccccaaagagggaaaacagccaacctctgagggggaaggccccagttactcttagctacaaggatgggaagcgctttctgtctccacttaaaaagagaagagcacggtggggcgtggtggctcatgcctgtaatttcagcactttcagaggctgaggtggacagatcacttgaggcccgagttcaaagaccagcctggccaacatggtgaaactccgtctctactaaaaatacaaaagttagctgggtgttggccaggcacggtggctcatgcctgtaatcccagcactttgggaggctgaggtgggtggatcacctgaggtcaggagatcaagaccatcctggctaacacggtgaaaccccatctctactaaaaatacaaaaaaattagccaggcatggtgacacccacctgtactcccacctactcgggaggctgaggcaggagaatcgcttgaacccaggaggccgaggttgcagtgagccaagatcatgccgttgcagtgagccaagatcgtaccactgcactccagcctgggcaacagagcgagactccgtctgaaaaaaaaaaaaaaagattagctgggcatggaggtgggcacctgtaatcccagctactcaggaggctgaggcatgagaatggcttgaacctgggaggtggaggttgcagtgagctgagatcgcaccactgcactaaaaaaaagaaaaagaaagaaaaagaaaataaaagaacaaaggttttctgagctttaagtatgaagctccatgggctcagaagaatgaaagcactttgaaataactcagaaacagaaagtcaaacactgcatgttctttctcccttataagtaggggggtaagcaatgggtacatgtggacagacagagcagaatagtagacattggagacttcaaaaggtgggaggataggtgagagatgaaaaattacctattgggtaccatgtacactattcgggtgatgggtactctaaaagcccaggcttcaccactgcacagtatatccacgaaacaaaactgcacttgtaccccctgaatctataaaattaatacaaataaaaaagattgaaggcacctgtgttcttaaatcctttccaggaaaatcagaactgtttgccccaaatctcacttggcccttgtttgagtccttcatccccctgaataaacaccttcaaatccttcccattactcttgggataaagaccaagaatatattaacatggtgtgaattagaccctgcatggtctggcacctccttaccttagctggcaccagccctctccatcttggcactcgctcctgccttggggccatcacatggtccatccctcttgcccagcagtagcttcctccaagcttctcaggcttcagatcccagctcagacatcacttcccaactagccccaacgaggttggatccccattttctctcccatagttctctgcgtggctgtgatttgattcatgtctttctcccccaccactctgtggattccctaaactgtcttgttcattgtacccagccccaccacacagctggcacaggagggcctcctgcaccatgtggcccctttgctcatgcatccttggcagaagaggatataggggctggtgagacttgttcaggcttctctttccttggggtctagggccaagctggagaaggagcgcgatcgggccagggtgacaggagggatccctggggaggtggcccaggacatgcagagagagcggcgcatcttccagctgcacatgtgtgaggtaaggggtgctctggatgagggagggggggcgtgggatgtgtcttcctgtctgcctctccaggggaccagtcacagcctcagctcaggtcctggccacatggccctgtgggatgtcaccaaggcccagtcgcagccaggaggattagcctgggatggggactgcagcccctcgttcccaggattctgcttcagctcacatcacgtatcttgccctgccctcctcctagtatctgctcaaagccggggagagccagatgaagcaaggtcctgacttccttcagagcctcatcaagttcttccacgcccagcacaagtaggtatcttcccgcgtccctgccactaacccttccagtgtcacagaacaaggcccctctcaaggtgtgatagacctgagagtctctttggaggcctgcatctttttggcagaactttcatagttcctcattgagtgctcaccgggtgtcaggcatgagtactttacaaacatcaattcgctcaattccccaacacttctgggagcaggtactctattatccccattttatagatgagaaaactgaggcttattttccaagattacatagctagtaagtgggatttgaacctagtcaagagagactcttgtctatggagtgtctgttcttgaccgtcagactacaattccctgaggtgccctgtgatccttacggcagcttctcccacacttctggcttcatctctcatttccatctttatctggacccttgtttggcctctgacacctcttagctttttccaagatggctggaaggctgcccagagcctgttccccttcatcgagaagctggcggcctcagtacatgcagtaagttgggtctcacccttgggcacgtgatcaagccccctgtccttccaggaaaatctgtgggtgtggaagagctggcttctgcccacagagtgaggctactgctctgctcttctgggtctgggctctgtgcctgacatatttgttggctggtgatgggatcccatcctctgtcccatagctccatcaggcccaggaggacgagctacagaagctgacccagctccgggactccctccgagggacactgcagcttgagagcagagaggtcagcccctgaactatcccaaaaggaatgccctcccccaaggcccaccgtggagggagggagagaaggaagacccacagggtcccctggagaagtctccctgagtgagcccccgcagaatggggctcttcccactgagatgccctgaggtctcctttgcatgtccgagggacaggaacacctgagccggaagaactcaggatgtggctatagcatccaccagcaccaaggcaacaagcagtttgggacggagaaagtgggctttctatacaagaaaagtgacgggtaagtgattcagagcttacataatttgcccaatgtcacactgcaagtaaatgacagggttggggaagctgcccaaaggaactgttctaatcatttgtgtagacaccgagggttgcaatgtaaaatcctcaattcctgggttgtccaggacacctgggcatgtgaacttctgctaaaggtgactggttattttaagttaaagaagaagaatagcagtagctaacacttttttttttttttttttttgagatagagtctcactctgtcgcccaggctggagtgcagtgccatgatctcggctcactgtaagctccgccttccgggtcatgtcattctcctgcctcagcctcccgagtagctgggactacaggcactcgccaccacactcggctaatttttttgtatttttagtagagacggggtttcactatgttagccaggatggtctcgatctcctgaccttgtgatccgcccgcctcagcctcccaaagtgctgggattacaggcatgagccaccgcgcccggctggcagtagctaacacttattgcaacacttactatgccctcattcttttttttttttttttttttttttttttttgagatggagtctccctccgtcacccaggctggagtgcagtgacgtgatctcagctcactgcaacctccgcctcctgggttcaagcgattctcctgcctcagcctcccgagtagctgggactacaggtgcccgccactacgcccagctaattttttgtatttttagtagagacggggtttcaccgtgttagccaggatggtctcaatcttctgaccttgtgatctgccagcctcagcctcccaaagtgctgggattacaggcgtgagccactgcgcccagcctatgccctaattaatctctgcaatatactgaatatgcctagaaatgaaagtattggctgtgccttgcttcctagtgtaaaaaaaaaaaaaaaaatcagtctgtgggccaggtgcagtggctcacacctgtaatcccagcactttgggaggccaaggcaggcagatcacttgaggccaggagttcaagaccagcccagccaacatagtgaaaccccatctctactaaaaatacaaaaaattagctgggtatggtggcgtgagcctgtagtcccagctgcttgggaggctgaggcatgagaattgcttgaacctgggaggcagggattgcaatgagccgagatcgtgccactgtattccagcctgggtgacagagaaagatcctgtctcaaaacaaaacaaaacaaaaaaacaaaactgctgtgaaatgcaaaggcccttgtgggatatattcatgtttctacctaccaatcagtttaatcggagaagaataactttgaagaagaaaccaatgaatatttacctgttacaggagaagtgttacggagttttggatcatggacttgctaattttattttggggatattaatattgatcttgcttagttgaaccacaatttatttgttgttgtcaagagcctgtgcctctcagactaggagctccctaatgatataagctatgtctcccccatcagactgggagctctcagagggccaaagtcacatcatccccttagaataaggattcccagggagtgaggctgtgtttctccatcagactggcatcttcctaagagcagaactgtgtctcctccatcagaagggagccccagagagtcaggggtcaggggtgggggtgtagggttaggagaagaaagaggtaaagggatgtggctagagatcatacaggtgggggcaaatttctgttctctgacacctgcgaactaggtgtgagccttgggtcactgtccttctatccctctgggctttagaattcgaagagtctggcagaaaaggaagtgtggagtcaagtatggctgcctgaccatctcacacagcacggtgaggcctagaggtggtgggagtctcagggcacgatggaccctcttcttctggtgttctgagcaaataatgtcaagccctccctctaagactggcccccaaacctaggtccagggagctggagacccgtttgggaggacagatgggacctgaaggccccaatctagtcttagtctacacttcacatccttgaggtgctgctgggtgaggagaaacacaaatggaacaggatgattatgcccatttaacagagtgggaaatggaggcctaaagaatgtggagggccagaggtaatgcatacatcctccgcccctaaattcccacagataaaccggcccccggtgaagctgaccctgctgacgtgccaagtgaggccaaaccctgaggagaaaaagtgcttcgacctggtgacccgtgagtggtccctgtgcctctcccccacccacagctgctcagggcttctctaagacacctgtcagctcccggggggcttcagtgaggggtctgtgtccagttccacacatggtgtcgaattgctgctactgcagacataagaatccttaggtctaggatacccacatcacattaaatgtcaaaatgcacccactttacataataaatgtggctatttatacagagcatatttgagtggatttgggtcatctgggttttgaaattatttctttttttaaaattttacctttttttcccaaatacccagacttgaaggagatgaaattattgtttctttacattttctacttttcgttcttcagagcctttggtgcaggctttgtgtgagagcagacacaggctgagaaagacctagatcttgtcctcaggaaactctctggcaggggtgtggggtgggtacccaggactgtaagatgagggggctgtccagaagatgggtgcagatatagccccatagaagattagggagcaggaaggcctgcactgctgtggggaatcaggaaaggctcctggaggagacagtatttgagtttagccttgaaggacatgtagaatgaagagtttgtggggtgggggcttttgaggagacaggattagcatgatgaaaggcatggaagcaggagagtgggtctggccggtttggccagagtggagggttcatgtagcagagtgagagatgaggcctggaaatccctcttaaaagtttggaccttatttcctggcaatagagagccatgggagatcttggggcagggcagtggtgtaattagagcagagccttgggcacaacagttgggagctggtacaggctaggggaaaggggaaatgggaagcagggagaccagacaggaggcctggtcgcccaggaggagaccaggaagggcccagtggggtggtgacagttggttcagaggatgccctgcctcagagctgggttctctggggttccaagccctttgagacctcgtctgagcctggaaccagggcttcacgcagagggagctttgttgggatcctacttcggaggccagttctgagaaactgcccctggtgctggccactgtcattccactcccttcccactcctagcttgagagtccgacttgtcagggacacatctccatgtggccccagcggctttggtgggggctccctgggctccgggaaggccagcagcatttctgtgggtcagaagcccccttctctcccgacagacaaccggacgtaccactttcaggcagaggacgagcacgagtgtgaggcgtgagtgccccctcggccagcccggccagccttgtgggtgggggccggcggccctatctcttcccacttgacatccccatcccaccccgttcaatctccgcaggtgggtgtcagtgttgcagaacagcaaggacgaagccctgagcagcgccttcctcggggagcccagcgctggcccggggtcctgggggtccgccggccatgatggggagccgcacgacctcacaaagctgctcatcgcggaggtgaagagcaggcctgggaatagccagtgctgcgactgcggggctgcaggtcggtccccggggccggggcaggagggaggcttaagtggaggggaggggctgcacctccaggctccagctgctttcctctgcagaccccacgtggctcagcaccaacctgggcgtgctcacctgcatccagtgctcgggcgtccaccgcgaactgggcgtgcgcttttcgcgcatgcagtcactcaccttggacctgctgggcccctccgagttgttggtgagggcggggcggggcctggaaggggccagaagcggagttaggggtgtagtttcatccgggggcggggcttgcaggttgtgggtgggacctggccgaggtgggctgggacaagccaggtagcgggtggtcaggggcggggcctgaaccgggagggcggccgaggggcgggactctgggggcttggagctccaccctatgcaggcttaaccgcccggtcttactccgccccacgtctattttcctacgactccagctggccttgaacatgggaaacacgagcttcaatgaggtcatggaggcccagctaccctcacacggcggccctaaaccctcagctgagagtgacatgtaaggggattctcagagagaggggcaccctgcctaggggattctgcctccgcagtgtccagggtcgtagaaaagtcttggatcagaagtctggggaggctgggcgcagtggctcacgcctgtaatcccagcactttgggaggccaaggcgggcggatcacttgaggtcaggaatttgagaccagcccggctaagatggcaaaaccccgcctgtactcaaaatacaagaattagctgggcgtggtggcacacgcctgtaattccagctactcaggaggttgaggcactagaattgcttgaaccctggaagcagaggttgtagtgaaacgagattgcgccactgcactccctcctgggcaatagagtgagactgtctaaaaaaaaagcctggggagaggggagcctcagatctagacgtcttcaggacatggttctggagaaaaagagagctgtatctcctgtgggagggccccagggatcagctgggcagacacggtccatgctctgagatcctgtggttgtttttggtaggggcacccgcagggactacattatggccaagtatgtggagcataggtttgcacgccggtgcacacctgagcctcagcgactctggacagccatttgcaacagggacctcctgtcggtactggaggcctttgccaatgggcaggactttggacagccgctgccagggcctgatgcacaggtgagaacccctccaagggccacttataacccacctgtctaacatattccccagttcttctccaggaccagctgttactcccctccaccccacctctgacatctgctcagatctcacccatcagagtggtaagtgggaaagagcacagcttcagtcaggcagacctgggtgggaatcctggctctgttttttcctagctgtgtgatctagggcaggttacttctctgagtctcatttcctcatctataaaaggggttaataatagcacccacggtgatgaagtgagaagtcatgtatataaagggcttagtgtacaatgggcatgcaataaacgttaatatctttttctttcacctaaatagccctgaaatataagggcatgtcagtttagagccaggaaggccacattgctttggctattccaagaacaaacacatgagcatggagaaaggatatcagagacatttgaaaaagtaaatcaacaggagttgctgactgattcgacatcaaaaattggatgttggctgggtgtggtggctcacgcctgtaatcccaacactttgggaggccaaagtgaaaggatcacttgagcccaggagttcagaatcagcttgggcaaaataaggaaacccccatctctacaacaacaactaaaattagctgggtatggtggcacacacctgtggtcccagctactcagaaggctgaggtgggagggtggcttgagcccaggaggttgaggctacagagagctgtgattgcgccactgctctccagcttgggtgacaaagcgagaccctgtctcagaaaaactaaaaacgggtatctttgaactgtctgtctgatatcttggtgggctatccaatgggcagtgcagcacttaggtgaggtaagaatttggaacagcctgcacatgtgtgatagttgaaaatgtgaggttgctgaggtcttggtggggaagtgcgatcagggagaggagccgagagctgagaaagaagtttgggaaacacttgttgggggcagaggaggaagagccgtgaatgggaacaatgggagaatggcccttcaccttcctcccagacatgaggctctgcccttgcagtctcatctctccagggttctggcagcttcctatggggggataaggggttagcaagagttcaagagggaaatactgggttggaggcaggtgcactggggggggaatctcagaggtgtggatgtgttttcaggcacctgaagaactcgtcttgcatttggctgtcaaagtcgccaaccaggcttccctgcctctggtggatttcatcatccagaacgggtgagagcctccctgcctgtctgtctggctcctcacactccctctcctttccttcctcttctcccattctcttccctcctttcccctcccactttttcccctgactttgatcccctcattgatctgttccccttcctttctccctgaaccctcctctccccagtggtcacctggatgccaaggctgctgacgggaacacggctctgcactacgcagcactctacaaccagcccgactgcctcaagctgctgctgaaggggagagctttggttggcacaggtggggcttgaatacctcctccgtcagactcctattcctgactaccccttatgtggacttccgatggtctcgggctctaatcctggcttgcttctgaccacctctgtgatcttaggggtttgtcattcagctcttgaatttcagcttcctcatctgtaaaatgggaataataccactgacctagcaggactgctaaagaaaaaagaaaataatatttctgggagtacttaggcaaataaatattagctagatctgaatgataatgattgtaatagctaatatgtattgtttaacatatgcctggcaatgggacaagtgctttttgtatgttaattaattgaatcctcacaaccacttcatcaggtagttccaagtattatactcatttcataaacaattttgtcccaaaaggttatataacttgcctatggtcacatagccagaaaatggcagagccaggattcaaacccatacattctgattccagaggcccgtcttaatctctaagctgtaatgtttctttgactatgaccatgaaccctgactttccccgctcacagtaaatgaagcaggcgagacagctctggacatagccaggaagaagcaccacaaggagtgtgaggagctggtgaggactcggggaggcaaggggcccctgactctttctctctccctgctgagcccccaaccctctgaaccaccaagcctttgtttttggcagctggagcaggcccaggcggggacctttgccttccctctacatgtggactactcctgggtaatttccacagagcctggctctgacagtgaggaggatgaggaagagaaggtgggtcccagccctgtccctcaggcctctggatggcagaaggaaagagccagattgggcctggtgtgtgttggcgggggcggtgaggcggggggacagggctacaccggaggaaccaggctgtcctcatcctcaatcttttgctctggcagcgctgcttgctgaagctcccggcccaggctcactgggccagtgggaggctggacatcagcaacaagacctatgagactgtcgccagcctgggagcagccacccctcagggcgagagtgaggactgtcccccgcccttgccagtcaaaaactcttctcggactttggtccaagggtgtgcaagacatgccagtggaggtacagttggatgcccagataaatgctcaccatgccattcacagaggacctgtatatgctggggcactgagctgagtgcatatgttagtccgtactatccttatgatgacctcccaggaaggggttctcatcttccccttacagataaaagaacagaggtgttaagtcacatgtttaagatcccacagctaataagtctctgatgtaggattcaaatctcagcccatcttattccaaattcctcaatgctccacttaacaagagagaaacgagtttattgagcatccccttcatcctgagtcctttgagggctaccaagacacagtctagtaggggagataaaaactggaatgcaattcattataatacaaggcacaatgtgatatagaatgtaaatcccaaaaggacaaggactttgagtgtttcattgaatactatttgtccagtgcctagcgcagagcctggctgttctcaagaactatttgtcgaatgaaggaacagacttgttgtgggaggttggggcagttggagagggagcatgtcctgctgggattgggggttggtttaagaaggcttcctggtgaggatagcatatgagtgaacctgagggatgagcaggagaatccaaactgggacagggtatgagcacaagcaaaaaagtgagtcagcatggccctggccaccgcgaacaaaggcttcatcagttgaaggagaatactggacaggtagatggggaatggactattggcagagaaccagaagagatcctaggccagatgtggtggctcgtgcctgtaatctctgcactttgggaggccgaagcaggcggatcaccccaggtaaggattttgagaccagcccagccaacatggtgaaaccccatctctactaaaaatgcaaaaattagccaggtgtggtggcatgcacctgtaatcccagctactctggaggctgaggcaggagaatctcttgaacctgggaggcggaggttgcaatgagccgagattgcaccactgcactccagcctgggtgacagagtgagactctgtctcaaaaaaaaaaaaaaaaaaaatcctagaggccagagactgctttgaggttgggcacagagcaagtgataaagaaaagctttatcatttctgatgtttctgattccagatcgttctgaagtctccagcctgagttcagaggcccctgagacccctgagagcctgggcagtccagcctcctcctccagtctgatgagccccttggaacctggggatcccagccaagccccacccaactctgaagagggcctccgagagcccccaggcacctccagacccagcctgacatccgggaccaccccttcggagatgtacctccccgtcagattcaggttggtgagggcccagctgtgcaaccagggcaaatcccctgacttctctgagcatccattgatttccacacctctaaatagtacctgcctaaagactgggtcacacgccatctctgggcccatcacttatgcagaaatgctgaaccctgggaccccttcccccttcacacacttgctcccaaatcctgcatggagagctgaggaggagccagggatcctccctgctgatgttggagtaaagtaggcttagccccctgtgtggcttattctagaggctctcagtggggtcttcactctgtccccacctccaacccaggatccagtcttctcccttccatacaaacccattcagtctggagtttggggagaagtagacctgcagatatccacagagtcttctggaggtcagttccagccttcttgggcctgtgatggacctggcctgggggccttgtggactctacccacccatcctaagcccccagactggctctgttcctgagccctttctccccactctgaggggctctctggacatgagggtcatgttggcctttccctgccttccagctccgagagcactcgctcctatcggcggggggcgcggagccctgaagatggtccctcagccaggcagcctctgcccagaaggaacgtgccggtaggaactctgggaccatggtttgaggggcggtggcagggtgcctgggaggcagagttagtcaagagtaggcgtattggggtgggagacctccccatggttggggtacagatgggcccaggcagccacagtttggacagtccctgtcctggtgcccaggtgggcacggtttggccagtccctgtcctggtgcccaggtggccacggtttggccagtccctgtcctggtgcccaggtggctgcagtttggccagtccctgtcctggtgctcctctttccatgctccagcccagggctgggtgaagctgaggagagcccaggccttgagggatggcagtgatcatgaggcccaagctctggcttctccccaggggaggatgaggaaagttgtgttagccaggccagtcgctcagagaaggcatcacttccctgcagaagaggcaggattaggtggccgtgtaccagcccttgtttgcctaactctccccttgttcatgagtctcctggaatccacagggactttcagatcccaggcatagagggatgtgacagggacagggcaagagctgtcatccttaatccagcttctccctgctgaatcaccaagtctccaacaatggcatatattagttgaacctaggagtgggcacagatcagagccagttgtgttgggaaagaagcctcttctgtcccttgttcctctgggaattcctcagaatggcattggttgtgttgggagtcaggatggcaggggcaaaagctggttctgtctggggaatcgtcatctttagtccaccagagttagtcagcagacacaaatctatgtccatattctggttccactattgccctgaaaaccaagtatccatcagatggcatttaattgatgcctgtgattgtggtgtgtatgatagcaagagcttgggctttagagtaaggagactttggataagtggcttcacttcctcaagcctcagtttctttgtctgtaaaatgagaataatttaatttatctacaataggacagatgtgaaactgagtgagatgaacacctggtatgttacaggtgctttgaaaatgtcagtttcatccttctttctgcaggttggcatcactgaaggagatggctcaaggactgggagtctcccagcaagttctgtgcaacttttgcaagactagctccttgctggcccccacatgccccatgctaggccccaatgttcagagctgggacttgagctcacaaaactggggagctgagacatttgttctcttggatctcactctctctgtcccttgtgcctctgtagctggccttcttcctgccacaggccatgcctctaccaaggacacatggcctttccctgttaggactgatggcggttctttcctatctcattacccgctaggggcctgggagccctgtggctggatctgagtgctcctgagctggcttcagctgcagaactctcagtccctcatcagatcgagactctatttcccccgtcagtctgggggcttcacaagggcaggagagccctccatcactgacttccagatcagggaccctgccaagtagggactgtcttctcagccagccatttattagtctaatattccttcactaaattccaactctatgtctggacctgtgttaggcacttcagataccacacgagtaagacaagggccctgcaggggtggtcctttggtggaaagctggtcttaagggttgggcttgggaataggcagggtcagattccagggcatggctctggactcagctggtttatacctatatgaccattacaattgtctacagatcacatccattctggctggtcaacatgcatgctgtactggctgttaaataaaaatattctgaatgtcactccttttgagggacagcacagccttccctaggcattctcctatattccccagccaaattgtagagtcagatgcacccacatttgcctgtgtccttgatttagcaggaaggaaaggaatagtcagggttgatggatgcccacttctcttctctttctcttggtcaactcaggagccttttagtctgagggaatggagaggcaaagaaagaagggagagtaatagaattgggagggcagagacttaagggttctgcttcccagccctagaaattctatcattgctcagccccaatgagaaagcagatacacctaagccatcatcaaccactaacatctcaacttgccagttgctgggtgctgggccctggcaggaatgggccaagccaagcaggggagactagagagcaccaatggccaacacagctgcctggctggggaggctgtgctgtttcccctggagacctgactggtctgtggttcccacaggaacagggttgtcttttgagcccccagtgtctggtttcattcatctcagacttgttatttcactcatctctaataaaggattggggggtcagtt

SEQ ID NO: 15459 - DNA, 54458 bp, Homo sapiens
agtgccccccgcgccccgctccggcagctccacgctcgcgcccgccatgccggagcagttcagcgtcgccgagttcctggccgtcaccgcggaggacctcagctccccggctggggccgccgccttcgccgccaagatgccccggtaccgaggggcggcgctggcgcgggaggaggtgagggggccgaggcgggaggggtcgggggtcggcgccgggcctggccttgacctccacaggcgtgtcgcacccgagctgcgatggcccttcaccgcgccccgaaacctgccccctccctaggtctgggaggaccgagcgcatctccaacagctgcgtcctcaccgtcgaggcgggggaaggcccgagggaccgttttggggggcctcgaggtctcttcgatgacaaactccacaggtcgggggacgtaccccaagtgccccgcgtgaccgcctcatcacatatgtgtttgcctagcgccttccagcctcagtttgcgttttcatcttcggagccccacaagtgtgccccccgagtcactccccttctgagaggcaggcttcccgcctcagtcctgaactttcttccccccggctgcagagaggccccctcccgcttgcggctggttcggagatttggcccgcgtttgtggaatgaatgcggatgggaaggcgccaggagccggggttcaccttggccgggctgttggcaagtttatcgtctcctctcccctcccctctcctctttgtctttcccagcaaagcgtcccaggccttttctttcggtcttgcaggctgccccaccccattcccatgctcttcggagttccttccattcctcttctctgaacctgctgcagctttccgcagctcctctgcaaagaatattctaggacagacaccccgtggccttggtccaacggagaataatgtgtttttgcagctccccatccaaaggatgccctcaatttgggtggcattttggacctcagcaacggctctagccttccacccttcaccttaagtgtactaggcacccactgcgtggcagatacaaagctcagtagttcataacaccctgcgccagtgtcaggaaatctgtcctcttctctcttgtcagggtgaccctccatctcggagtctgtttgtatcactttgtaagggtgatagaggattgtggaaggagcatcgactttggggaaggcagaccttttttctttccttttttttttttgagacggagtctcgctgtgtcgcccaggctggagtgcagtgacgcgatcttggctcaatgcaaactccgcctcccaggttcacaccattctcctgcctcagcctcccgagtagctgggactacaggctcccgccactacgcctggctaattttttttttgtatttttagtagagacggggtttcaccgtgttagccaggatggtctcgatctcctgacctcatgatccgcccgtctcggcctcccaaagtgctgggattacaggcgtgagccaccgcgccggccaaggcagaccttttttcaaacgctggctctgcagtttgccatttgggtgaacgtgggcatgtgacctgtcctgtcatctgtggaatgggggtaataatgtgtacctcacatgagacaatgcatataaagcatgcatcttttttttggagacagagtcttgctctgtctcccaggctggagtacagtggtgcgatctcagctgactgcaatctctgcctcccgggttcaagcaattctcattcctcagcctcccaagcagctggaattacaggcatgctccaccacacccggctaatatttgtatttttagtagagacagggtttcaccatgttggtcaggctgttcttgaactcctgagctcaggcagtctatccgccttggcctctcaaagtactaggattataggtgtgagccgctgcactggcccatgcctcttgataaatggaatgattatcgtcagattaatcggcagatctctttagacagtgattgggtctcttttgtcttcatttgtctcacagagcctcaccttgtctcatttgtctcacggagcctagcctactactttgcacatagtaggggtacatgttttattaaaataagaagcagccggtcagatttggcttccttccttgggcagagtccactgcctgtggatgtgggttatattttactgtggggctcacagggaaacactgctgtccagcccatcctttggagagcttcctgagatttgtcttcatagcctcacatttcatgacccagaatagctcagtgccatccacattcttagggatttcatggttcatcctcctccccaggttgttcattagaatcttagagcaggagaaggggctccaatatgaaccttatccatggacagaaatgcccatttatgcccatacatctggccttgcctggctgtgtaagtgtaagcactgtgtgttgggggagggacccttagaatgggtctggaggccacagcaggctctgttcagggctcagctttgccccagttcaggcaagacaaaacccatcctcctttgccttcagatttttggtttggtgcacgtagaggttcattgttacaacagaaaggcttgcggcacccaaacacagcttttctcttcagcatctcagggcccaaaaagttagagtctgaactttggattagacttccctgaggtttcctgtttggttttgcatttgcatttatattttgcgattatattgtgtttacatatagtttgatgctgcaattttttcccccagttctgggcttgactaacccacccccaggcttgtagctctatttgactgaatcaaaatgcaactgattcttaagtcaagtcttccagttctgactggtttcctgggagtaactagggaccctgtcctgggactcgcagcccttttgtacagtcctgctgggaaggaccctgggcagatcacaggaaactagaatgtcagggctgagggacccttttaagatagagaccagctagaaactctctcagataagatggagtaactgatgtccagagaggccaagagacttggccaagctcctgcggctggatagtgggaaagttagcatttctacccacgtgttctacccccggtcctgttctctttccttttaaagtccatctgtctgtcctccctacgtaacttctctgaaccttgttattttatccttaaaatggatctcttaatcactccctgcttaccttactgggttgttaaagttttttgtgttcaattatgaagcaccatgcaaatgtgagggagtatattaagatagtcattacgtcaaccagcctcttcctgtcttgggcccctttatgcccatcatctcattgatattcacaacaacaggtgaaaccgggcctagggcagtggaggcagctgccctgtgtcacacagtgggtctctctgactctgctgtgctctgcctgggctctgtccagctctctgtgccatctctatggacataaaggacactaaggacataaagatgctactttgatttgctgactgactagggagaagtagcctgttacagggagatcagtaagaaccccaggagtttgtcctgagtccccagagaaaggtacagtcaatgccataagaggcaagtggagcaggagagggagagagcagtaaggactggtgcaatgagggagaagttcctggaggaggtgacacttccaggtggaaggatagatgaaccccatttatcggagaggacaagggagtgaattcagagactggtgggaagagagcatattgggaaccaagtaagccattttgaccagagctaagaattcatactatattgtgtgcctcaaactgctagtggacacaccccctccagtaggtctcagatgaagcagtctgccacaaataggagatcttcaaaggcttgttttgtatatatttttgaaattttaaaagaaagttttaattggacaagtggcataatttattattattttattttttgagacagggtctcactctgtcacccaggctagagtacagtggcacaatcatggctcaccacagcctcaacctcctgggctcaggtgattttcccacctcagcctcctgagtagctaggattactggcgccggcttaatttttgtattttttgtagggttggggtttcactatgttgcccggctggtcttgaactcctgggctcaagtgatctgcccacctcagcctccaaaaatgttaggattacaggcgtgagccactatgctcggccagggcataatttgtaataagtaatttaaaacataacagaaaaggcctatgaacaactatctcaatccctgtattctccccagaggtaattgctatggaaatgtacatgcttcccaatgtatctcctcatggaaaatatattatcagtgggggaatgggagtggctgggggaatgtttacctaaattggtatcaggtcttataatgcacagtttaaattgttttggagttacatttttcttttcctttgtgacttttgcttttttgaatcttgttttagaaaggatttccttcttaatttttaatattcttgtgaattttacagtttgctttgtaaaatgtattttagtgtaaaaattgtgtaatcttagagattgtttgcaagaaacataaaccctgtcaagcttgtttctgttggagggaaatttgtttgtttgttttttgatcgtcagagaagaatattgagggaaattggctttaaagaattagaggtgcctcatgagactgaagagccggaggtaaaagtacacctctccagggcctggaactggaggctgggaagttgtcaggaactaaggcagctgcttcgtcattcttgttctctcctgcctctgcttccctctgcacatctgatcagtgctttcgctcattcatcatcacataggccccaaagcacagcccccatgctcacatgacctcactgggccagtgtctaaaggtaaccggacactagattgagccagtctcatgtcccacttccaagttcctggcagaggttgacagcccggcccagtttctggattgggtccagtggctgggtctccacccctggtttcatcagcagaggtcatggagggaaagtgaccggcagggtaaacatggccattgagacctatggtgtgggagggggcgcttctcagagaagaggggcagggcctggaaaatcccctcagaagtatctatggcgattcctctttatttcacacagtccaggttccagggagaggtgctgtgtccatcctgttctgtacctccctggtttagatcatttatgcatactctcaggtatagaagaacccctttagaaaactcaggtataggagttttttcattttttattttttattttttttttgagacagagtctcactctgtcatgcaggctggagtgcagtggcacgatctcagctcactgtgacctccacctcccaggttcacgccattcttctgcctcaacttcccgagtagctgggactacaggtgcccaccaccacgcccggataattttttgtatttctagtagagacagggtttcaccgtgttagccaggatggtcttgttctcctgacctcgtgatccacccgcctcgtcctctcaaagtgctggcattacaggcatgagccactgcacctggctggagtttttttttaagatagagtttcactcttgtcacccaggctggagtgcaacggcacgatctgggctcactgcaacctccacttcccaggttcaagcgattctcctgcctcagcctcccgagtagctgggattacaggcgcccgccaccatgcctggctaatttttgtattttcagtagagatggggttttgccatgttggccaggcttgtctcaaactcctgacctcaggtgatccacccacctcggcttcccaaagtgctgggattacaggcgtgagccactgtgcccagcagtttaaaagatttaaaagatgagattagaatgctaagggggtgcagcaagacttggagggttttgaatgccaattgagcattctgactttttgttgggcggtgtggaccagtggacccaatcatgttgctcaaggaatggatggggttggccctgccagcatagtgcctgggggactgctccatgccaggccctgtatgaggcactgggcagatgcatcgctcagttagagatgcagtccctgccctgtggaccttacagtcttctggcaaagcccaacagtaagcaggtaaacaaataagtcacagccgggtgcagtggcttatgcctgaatgccagcactttgggaggccgaggtgagaggatcacttgagcccaggagattgaggctgcagtgaactccgatggtgccactgcatgctagcctaggtgatagagcaagaccctgtctccaaaacaaaacaaaacaaacagaaagaacaaataagtcagaagttgctcattgtactaagtggcacgaagactcatcctcctcgtcaaggccttctttgaggtttgttctgggtcctcatctcttcagggaatcttgtccacacgtgtggccttagttacctcccatctccaggtgactcacacatttgtacctgtagcctagatcctcatgtcccagtgcatacttgaccacactcctaacttccctcaggctcccttccagagctgttttcacaatgagtggtgcgacctctcacctccacgtgtgcccctcatcaccaaggaacatcttcttttttttttttttttttttttgagatggagtctcactctgttgctcaggctggagtgcagtggcgtgatctcggctcactgcaacctctgtctcctgggttcaagtgattctcctgcctcagcctccccaaggcagatggatcactggaggtcaggagttcgagaccagcctggccaacgtggcgaaaccctgtctctcctaaaaatacaaaaattagctgggtatggtggcacgtgcctgtaatcccagctacttgggaggctgaggcacgagaattgcttgaacccgggaggtggaggttgcagtgagcccaggtcacgccattgtactccagcctgggcgacagagcaagactctgtcccccgacaaaatattattttattaagatctaatttgtcaatagattttgacttctatgagaatagaaactaatctcactgttgtgtccctagtatttaccatagaaccatagtgtgttttcagaaaatgttggttgaataacaaataaatgaaagaaaaaaaaaaactaaaaaggagcattcatagagaataatggtatgggggtgctccagatggaggggacctcttaggcaaaggtcctgaggcagtaaagaagctgaaatatatgtgaccctgaaagggggcccaaggggcaaaagcactgagatgggcaaagggaagagtggcacctgctgagtttgggtggtggtggcaaggccatattcaagtttgatggccctggtagtgagtttaagttttatttagtacacaggcaagcagcataatccagtttgtattttagaaagatcatatcagttgctgtatggaaactagattggaagggccaggagaggacccaaggaggccattctgttatttagggaagagatgatggtggtgtggatcgggttgtggttggtggaggaggagagaagtgcacagattgtagaagtgttttataagcagtcaagatttgtcgatggagtacatgtgggcagtgctcaagattgtgtcccacatttctttttttcttttttttttttgtttgattgggatggagtctcactgtattgcccaggctggagttcagtggcaccatctcggcttactgcaacctccacctcccgggttcaagcgattctcctgcctcagcctcccaagtacctggggctacaggcgcccgctaccacacccagctaatttttgtatttttaatagacatgaggtttcaccatgttggccaggctgttctcaaactcctgacctcaaatgatctgcccgcctcagcctcccaaagtgctgagattacaagtgtgagccactgtgcccggccttaaatttctgatggaagggtgccatataccgagaaggggaaatctggcaggggaacaggtttggggagaaatcaagaattctatttttttttttaattttttgttttttagagacagggtctccttcttttgcccaggctggaatgcagtggtgcagtcatagctcaccacagccttgaattcctgggcttaagcaatcctcgtgcttccacaggcacatgccaccacatccatgctaatttgtttcttctcttggtaaagatgaggtctcgctgtgttgcctaggctggtttcaaactcttgggcttaagtgatcctcttgccttggcctcccaaaatgttagggttacaagcatgagccacttgtgcctggccaagaattctatctgtatatctttataggtcttgagacatccaagtggagatgtcaagaaggcagtatgtgagtttggaattcaaaggagcgggctggagatacacatttgagagctgttagcatcgagaccgtgggtttcaaacctgcatctgtgtcagaatcacttggcgtcattcccagagagtatgattcagtggtggtatcttaggctttttatggcaagcaagagaaaccatcctgagctgatttaagcagaaaagggctgcactgaaagggaatgttcagtagttcacagaatttctgggaagttggaaaactggggctgggcagcaggcaggatctcagccaaaatcatgccaccgagccagtttggcaggacactgctgccacacactaaatgccatcgctgtgtcactgttccctgaacactagacaccattgctgtggttgccaccagcattggaatggatcttccactgtgctcctgattcaaagtctgtagtgagggcttctgattggttgagcttaggtgtaagggaggctggaaaagcaagaatttgttgttttcagctttcacaggaggtgaactctgccaagacctgtgcagtgaggaagtccccagacataggaaggaggtcagatgccagactggcacacaatgacagatgtacttgacagcaagtttgccagcttgtgggattgtctgggaatctgcatttaaaccagcaccctggaaattcccatgcaggtgctgcctgaaccacatttgcatccattgcttgaactggtacttaaagctgtgggggctgggcgcggtggcccacacccgtaatcccagcactttgggaggctgaggcagggggaccacttgaggtcaggagtttgagaccagcctggccaacatggcgaaaccccgtctcactaaaaatgcaaaaaattagccgggcgtggtggcacgcacctgtagtcccagctattcggaggctgaggcaggagaatcgcttgaacccgggaggtggaggttgcagtgagccgagattgcgccactgcactccagcctgggtgaaagggcaagactatgtctcaaaaaaataaaaataaataaataaataaagctgtggaatggacaagatcacctagagagaggaacgaagaaggcccagacccaagccctggggaccctcggtatcaagagattgggataggaagaggaattaataaaggagaccaagaacgggctgtcagtggggaaggaaggaaataagacagtgttgtgcctcagaagccaggagagaagtgttccgaggagaaggggtgctcggctctgttagatgctgcccagatgcccagaggtaaaataagacaatgacagagacacagcctctggctttggcaacacggaggtcattgggaaccttaagagcagatttatggctcacgcctgtaatcccagcagtttgggggactaaggcgggtggatcacctgaggtcaggagttcgagaccagcctggccaacatggcaaaaccccatctctactaaaaatacaaaaattagccagccatggtggcaggcacctgtaatcccagctactcaggaggctgaggcaggagaattgcttgaacccgggaggtggatgtttcagtgagccgagattgtgccactgcagacacagcaaggctccatctcaaaaaaaaaaaaaaaaaaaaaaaagagcagatttaatgccattttcgcctccacaccatcctggactgatttgaggagggggcagatgagaagttctccctagaaggggagcagagacatagggtgtggctagggccctgggatcagcagggttttctaggatggactggggacccaactccactgaaccagcctcctccctaccaacagcctctgcacagggggccgagggtcttcccagagttgtcaaccttgagcctgtctctcaaagtctccttctctccccaaatttgtctttttttgtgctcacttccttgcctagtgttcagctgtttctggccactgaggtacaaggagacagatgactcaggcagatttggaggcagaaactgtaactttaggtcagagcagaaggaacatgctttccctgaaggcaatttgatcatatcattctcagacaagatgctgctagaaggtcccttcgatgggcctagaacttgggcccagggcagatgagggagtgagacccacaggggaacagtgagtggcttctgtgactctaggtcagggccctggaaaaactgattccacctcaccaacgtcacaggaggtgctttggagggcatgggaggctgagctgggaacagctgctgaaggttctctaacttgactggttttagaccttgaaagagcttttaagaatctcagctgctgcgggctacacccagacccactgaatcagaatctcccaggggcgaggcctgggcaagtgtgcagttcagaagttcccaggtaactgatgagcagttggggtgaaaactattgtggtaagctattgcatgcccactgaaggttagtaatccattaagccatatttactgaatgcctgtggtgtacaaaggcaggctctgagggcacggagagaactagacaaggtctccttctgggtgggaggactctgccagtgaaaagttgattgacaacctgtagcatacagggatgtggctgaggtctgtggcgagagtccagtaactaaagtcagacagacttgggtttgaattcctattggctgtgtgactttgggcaaatgacttaacctttctgaatctcagttttctgatctgtgaattagggatgaagataattgtcttatgggtttgtttgaggggataacacatagaaaatctagcaagcatgaacctagcacgtaacaggtacttagtaattttttaaaattccctcttactgtaaacacaagtacacctgcacatagggtagttaaaaagatcaggaaacatacagagaaaagaggaaagtaattgcaatagggatgaggtaattaccatgagtgagtgttgagattatctgtgcggtcctggcaccagagcaaaaagagaaaccttatgtaccttggaggttttggggaatgaacagctaagcctgattttggacaaggcagggtcttccctcagctctgccctttgctctctgcctcctgttcatttctttgtcaaacatttgctgaggccagtgtggtggctcatacccgtaatcccagcactgtgggacgccaaggtgggaggatcacttgaagccaggagtttgagaccaccctggtctcaaacaacaaagcaagaccctgtctctacgaaaacaaaacaaaacatttgctgagaggctacctagcagttctcagtcctggctgcaccctacaatcccttaggttgcttttaggtagatttcctctcattcaggtaaaattcacataacataaaactcaccattttaaaatgtacaattcagtggccttaagtatattcacagtgttgtgtagtcatcaccactatgtaattccagaacatttccatcatcccaaaaagaaaccctgtattgattagtagttactctccactccttttccccggcccccgacaactttccatctctatggctttacctattctggacagttcatgtgaatgaaatcctactatatgtggccttttttgtctgatctctttcagttgcacagtgttttcaaggttcatccgtgttgtctgggttgtgttaaaaagcaataaaaataggaaaaacaaacacaccaggcagtgttgtaagcacttttcagatattagcacatcataacacagggcctgtccagttatttggatacagagaaggtgtctgctgggcaggaatagctaccatgaagccctttctgtgtgtattatgctgggccacgtgcttaaatgcctgactgagttcagtctgattagatagatgctgttattatgccatttgacagatggggaacatctatcagagaagctgtgtcacttgcctcaggtcacacagctaagaggactggaaccagaatttggactttaggacagtatgacttgaaagccggagtccttaacccttgctgtcttttctatattgccactgggccttgctagtatgtattcatacatttaatcattcattcattccacacatgcttattaacacccacatcctgagttttgtgttgagtgctgcagatacaaaggtaaatgagccattccctgcctttctggagttttcagccccgtagagatcagacatgtatggcaaataagggccaggatactctaatgaaagcctgtagtgggcataggatggaataaaggtaggcaggatcagttctgttgtggtggggagggggtgacctgtaagttgagtcgggaaagatgaagtgtttactagacagaatggggcaagggccctccaggcagagggagcagcatgagcaaaggtctgatggctggaaacagtttggcatatttaggaaattgccaagagttcaatagggatggttttaagggaccagtgatggatagcaagcccaagtggggggcagggagggattcatcctggccaacaagggaacccagaaggtgggaagtactgtttgctgctctgtccaagagggcaggccaggttcttccccaggattgggtggaattcagggcttgaggccaggggtcgggtaggaggaaccttccgcggttagtccagcaaagttcttgttctcttagctcatcaccgccaagcaatctcctgaggaaaatcccagccaggaaacttggggtttgcagaggcctcagcatacatcgagggtgtggctcccttcttgcaacccctcttcctccctgcttcccaccaccccacaagggacagccggtaaggctgagctggtgaggctggacaagtgcccaggctgggaagacgtctgcagaggcctgaccaaggggcgcacggccagtcacaggccccagcagtgcaggaaggaaaacagcaagaggccaggggatcctgaaataataaatgtcagagcatacaggagccttccctgtcaccacccaaacccttcattccagaagaggagtcagaggctcagggtgggaaggagactggccaggtcacaccgcgagacaggggcagggctggggctggccctgggtcctggctcccaggccttgcagtgtagccaccgtaggggctgtggggtggcaagcagggccaagggccaccttggtatggatgaggcagaggggtagctgggaagagcactgccctcctctggcacccccttctgccccagcctggactctcaggtgctgggggtgggggctgatccagaggaaaaccatttggagtctttggctcactcttgctggtggctgaggttggagcagccttgtagggtatgactaacctcaactgtgtcctagcgctttggcctggaaggggatttagagctcgtgtctgttagctcaaaattggacagatgaggaaactgaggcatagaaggaggaaggaactcgctcagaggcacactgagggcttaatggcagagacagccctaaaattcagcactttccagttcagggctcttggtctcatggccttgttctatatgcagtagaaggccattctctcagaatgtttctgcagcacctctgaagatgcctggcttccaccattagaaaaaacattacctcaatttcttttcacagcaatccttacagagataactggggctcagagagagaagatttagctcgtagtttgctttagtgtgatagcaagaaagggctctggaggcagaggtctctgcgtttcttagaacttcctacatgaccttgagcaaactgcctaacctaccccagcctcagtttcttcatctgtaagatggggaggataataactacctcacagagttgttgggaggaataggccaggtaacaaacataaaatgcctgccccaaagtgagcagtcagttagtggggcgataggtagttgaattcatgctaataatagactcaagctgggagcttggaatgggagtccttcctgttgggtgatctgctccgggccagggcctggctgtgttcctatcaccctgtcatgcctgggggacaaggctgaaccctctttgtcccgcttgaacatggatctgcagcccagccctggagttaaactttctatgttgagaattaccaagtaactgccctgttcagaacccttcaggagcaccccatcacttatagaataaaacctagaggtttggttaaaagcatggactctggagcccaactgcctgggtttgagtttattttatttattattattgttattattatttttgagatagggtctcgctctgttgctcaggctggagtgcagtggtgcaatcagagctcactgcagccttggactcctgggctcaagtgataccctaccttagcttcccaagtggctgggactacaggtgtgtgccaccatgcctggaaaattgttttgtattttttgtagagacagggtttcgccatgttgcccaggctggtctcaaacttctgggctcaagcaatccacccacttgggcctcccaaagtgctgggattacaggcaggagccacaacacctgacctgcattttctgtaaattggtaattggatctagaagtgagaagccctgggttttttttgtttttttttttgtactttatcattttgttaaatattttaagtgtaacttggtttgctcattcaggtattgtactttttttttttttttttttttgagatggagtctcactctgtcacccaggctggagtgcagtggtgtgatctcggctcactacaacccccacctcctggattcaagtgattcgcctcagcctcccaagtagctgggactacaaaaattagccaccacacccggctaatttttgtatttttagtagagatagggtttcaccctatctcaactaaaggatggtctcaaactcctgacctcgtgatcctcccacctcagcctcccaaagtgctgggattacaggcgtgagccaccgcaccctgccaaacgttgtatttttagcatcatgtttaatatgtagtacatataatttaatcatctttgtggacactggcgtcagagaccaaagagccaggattcagccatcccacaggaaaactcctttttagcgttggagtttcattgatcttcccacatcacgtatactgttagtattgattgattgaaaaatatgggaaagaacaaatgaattcaagaatgcttttaaagggttctgtgtcttattgatcatagagttgcacatatttggaatgtggtcagactaatttgtgaaacatttttatactcgtcagtagtgctcatgatgagtgtggcttcacagtgtcctgctagtaacaccatggaccttcagggtctgggtccattgcctggaaatgaacaagggagttagagtcttaacggtttagttcccaggtccacattttggctgtgtgagctcaggcaatgatcttcactgttctgtgcctcgctgactcatcagccagatgggaacaaaaatgatgactgccccattaagatgctgtgtgtctgaaatggtgggtgtcaaactcccttacaaactgtaaagctctatacaagttttaggttgtattttttttttctttttctttttttttttttttttgagacggagtctcactctgtcacccaggctagagtgcagtggcgtgatctcggctcactgcaacctctgcctcccgggttcaagcagttctctgcctcagcctcctgagtagccgggactacaggcacctgccaccacacccagctaattttttttgtatttttagtagagacggagtttcaccctcttgaccagggtggtcttgaactcctgacctcgtgatccacctccctctgcctcccaaagtgctgggattacaggcgtgagccaccacgccgacctagtttgtatttgtttcttagtttgtttgcatttccagtgaaacctggggcaagaaactcacctgagcctttattttgcagtctgtaaaatgaggaggtaatgttagataatctctaatattctgtgacttcgtctcttaaggaacaacaccatagtccaaagcaaagatagaaaatgtttttcatctcctctgccaactctagtttaattggtagaggctaccatcatatcttaacagaatgatgaaccaaatccacagtcagtggggaaaacactgtgatcgattaataatggctataatgggccaggcgtggtggctcacgcctgtagtcccagctacttgggaggctgaggcaggagaatggcatgaacccaggaggtggagcttgcagtgagccgagatcacgccactgcacttcagcacttcagcctaggcaacagagcaagactccatttcaaaaatagtaataataataataataataataataataatggctgtaatgggccgggtgaggtggctcacgcctgtagtcctagcactttgggaggctgaggcgggcggattacctgaggtcaggagttcaagaccagcctggccaacatggtgaaacccctgtctctactacagaaaattagccaggtgcagtggcgcatgcctgtaatcccagctactctggaggctgaggcaggataattgcttgaacctgggaggcggaggttgcggtgaactgagatcacaccactgcactccagcctgggctacagagcgagatttcatctcaaaataataataataataataatggctgtaatggtcatgggatgacacagaagtgataactatgtactatattataatggtccaaaggaatgaatgtctaatggtgaaatgtaatctgtatctcccaaggccttagctctagcagctctgcccccttggcttgagttgccttggtaaccacagctggctctgagaaaccatgggaatgaagaatgggtcctattgatgaatcctgacccagaagggggcatgcagaaggcccttctaggcagggcagctgggcatggcctagtgctgccatctgtggtcttttgcctgcagagaacacaaaccagagagccagagcatggtgtgtgtgtatgttgggatcagggtaggggacacaaagggcagtgccagcagctggaatttaggccttgtttagggccagccagggtaggctgcccaaaggactccagtgggctttccaagctcagacgtgtctcttacactaagatgtgtttcagccacctttgcccagtgcctgccaggctcttgcatggatccattgactcttagctttgaatgaaatctaaatagctgtccattctaatccaaaatccagtgtctgaatcactctctagcacctaaagtatttgaatacttcaagtgacagggagctcactgccttcaggggtggcctgttcttccttagaaatgtcccctgtttgagctgaagtctgtttctgcctccctaacttccacctctcagtcctgggaatcctctctgaggccagcctgaacaaatccgttttcttttcagtaggacatcctttacagtgtttgtattcggggcctcaccattgctgtcaaccttgttttccttggacagatctccctctgtgccctgccttctccctttcctaagcctgaggggatggtgagggaatatggtagaggtggtagaattgggatttaggtttggaggcagatccagtcccaagatcaaataagctgtgccccctaactttgtggggcagcttagagatggggaaagaacattggccctggatttggctagtcctggatttaaattgtaactctgggccaggtgcagtggctcatgtctgtaatcccagcactttgggaggccgaggtgggcagatcatctgaggtcgggagttcgagaccagcctggtcaagatggcgaaaccctgtctctactaaaaatacaaaaattagctgggcatggtggcacacgcctgtaaacccagctactcaggaggctgaggcaggaggatcgcttgaacccaggaggcagaggtggcagtgagctgagattgtgtgtctgcactctagcctgggcgagagtgagagtctatcccccccccaaaaaaaaagaaagaaaaaaaagaaaaaaagttacagctctgccactgttcatcactgtgtgacttggacatgttcctcctcctgacagcttcatctttaaaatgggaatggcaatgccttcctcaaagagtggccaggatagtgacaagtaatgaggctgcacagagcaggcacttgggacatgctgcttgcactctccctgcccggcggcagaggtctgctgtggtccctctccacctgtgcttccccacagcttgctgacgaggatcaacatggagttgggggtgtggggagatatgtttaattaattcaatgaaagttgagaaattcctaaaccaaattcaatttaattttgaagtagataacatttttagttatcaaatagtggacagtattctaagcactttacctatagaatttacttaatctccccagtaaccttatgtggtacgcaatattatcatcttcattttatgaatggggaaattgagggactgagagatcacatcaggtacctggtggagctggaattcaaatccaggtagtttggggacagccccatacttttagcaatgatgatgtactgcatctctgaagagaattagaacagtaattcccaaactttagcatgcattagaatcacctggagggcttgttaaaccacagattgctggacctcacccccagattttctgattcagctggagaatttgcttttctaacaagttcctggatgatgcctgctgctggttgagggcccccaccttgagaatctctgactatcagggattaaatgggcccacctgaacccagaagctgatttttttttttttttttttttttttttttttttttaagacagtgtctcattctgtcactcaggctggagtgcagtggcatgattatagcttactgcaacctcgaactcctgggctcaagggctcctctcatcccagcctcccaaatagctgggactacaggtgtgtgtcacagcacttggctaacttttttaaaaaattttttgtaatggtcgggtgcagtgcctcatgcctgtaatcccagcactttgggaggccaagacaggaggatcagttgaggtcaggagtttgaaaccagcttggccaacatggcgaaaccccatctctactaaaaatacaaaaattagccgggcatggtggcgggcacctgtagtcccaactacttaggagcctgaggcaggagaatcgattgaacctgggaagtggaggttgcagtgagccgagatcacaccactgcactccaacctgggcaacagagagagactgtgtctcaaaaaaaaaaattttttttttttttggtatagatcggggtgggggtctcactttgttgccgaggctggtcttgaactcctgggctcaagcgatcctctcaccttggcctcccaaagtgctgggatgataggagggagccgccacacctggcttttccttcatctatccagtttcatgggaaacgagggctgatctcacacagaggcagaaaacaaaccacagtaagaaccatactcatgttttccaaatgcctcaagccttgccatgtttgtgatctcattaagcctcacagtaattctgtgagttaagcagagaatggatttttctgcctgtaatcccagcactttgggaggccgaggcaggcggatcacgaggtcaggagtttgagaccagcctggccaacatggtgaaaccccgtctctactaaagataaaaattagccaggcatggtggcgggcacctgtaatcctagctactcgggaggctgaggcaggagaatcatttgaacctgggagacggaggttgcagtgagccgagattgtgccattgcactccaggctgggcaacagggcgagattccatctcaaaaataaaaaaataaaaaaataaaaatctattttaaaggagaggaagtttagaaaactagctgggctagtatcacccaaggagataattttggagatgctggggctagaatcttagttactgactcatcatagcactctggaaacctctgcctttcctcaaaataccttcctttccccaggctactatcagaatcgtctccttaaaactaaatttttttatgagtgtgtggatgagtggattaaaaaaaaaaacctgcatttctttagcttaaatctttgagccctattataccacaggataggtgttatcaaccagtgtaaatgattttcagatattttcttgagaaaggagtaattagaacttttcccttttcatgctccctatgggcacttgcatgttcttaagtctgtggttctcttgaaggaaggggccatgtcttatgtgtccccaccatctggcaccatgcctggctgaaacagtcaccaagaaatgcttgttgaaatgaatgaatgaatggaggaactatgttcctgtccttgtccattcttcccagagcacgcctcccttcctggcagtcctaccattttttaccaagcattccctcccctctacctcatagtgtagtctctttagtctcttttctgcctgtccaggggccagagttaagcaacacagcttaagggacgccttccccattccttcaaagcagacatggctctgttttccctggactcccaggaaccttccatcatagccctcatcacattgcatgataagtgtctgcttataatggctttttcttcccttcaatgatgatgtccttgagagctgagattgtgtcttttttgtttgttttttgagacggagtctcacactgccctcctggctggggtgcaatggcgtgatctcagctcactgcagcctccgcctcccaggttcaagcgattctcctgcctccgcctccctagtagctgggactacaggcacatgccaccatgcccggctaattttttgtatttttagtagagacgtgttagccaggatggtctcgatcttgacttcgtgatctgccagcctcagcctcccaaagtgctgggattacaggtgtgagccactgtgcccggctgagattgtgtcttttttacacagggtgtagtgggcactcaataactaattgaatgaataaacagccatgtgaacttggctgccaagagcagtagggacgggaatggtatctggctgggaagctgtttcctgatagatgtctgacaagggcatcgaaaaacagtttgtggccgggcgcggtggctcacgcctgtaatcccagcactttgggaggccgaggcaggcggatcatgaggtcaggagatcgagaccatcctggctaacacggtgaaaccccgtctctactaaaaaatacaaaaaattagccgggcgtggtggcgggcgcctatagtcccagctactcgggaggctgagtcaggagaatggcgtgaacccgggaggcagagcttgcagtgagccgagattgtgccactgcactccagcctgggctacaaagcgagactccatctcaaaaaaaaaaaaagaaaagaaaaacagtctgtgagtgattcgggtgacttgtctccctttaccagttagagctagtttcagccacaagtggcagaatacccagtataacagtggctcaaataagagatttctctttcatattaaagaattccacagataagtagactggggctgctagggtagtttcctaatcactagggacaaggctgatatcttgttgctccgccatccataacaaatggcttctacttcatggtccaggattgctgcctgagctctagacatcgccagcacattgtagccagaagaaaggggtgacagagggtacccttgcattccccttttttcttttgttttttttttttgtgggggggtgcgtttgagacagggtcttgctctgttgcccaggctggagtgcagtggcacgatcacagctcactatagcctcaactccctggggtcaaacagtcctcccacctcagcctcctgagtagctggaattataggcccatgccccatgcctggtttttaattttttgtagagacagactctcactatgttgcccaggctggcctcgaactaggctcaagcaatcctcccgccccagcttcccaaagtgtgagattacagccgtgagccaccccaccccaggccctttttttctaaattaaaaaaaatcgactttattttttagagcagttttaggttcacagcaaaattgggcaggaagtacatagagttaccatatacacacagcctccccctctgtcaacagctcttaccagagtggtacatttgtttcaatgaccatacattgacacatcatcaccaaaagtccatagtttacattagggttcactcttagtgttgtacattctgtgggattggacaagtgtataattccatgtatccaccattatagcatcatacagaaatgtttccctgccctaaaaaccctctgtgcttcacctgttcctcctcactacccccatccctggccaccactgatctttttactgtctccatagttttgccttttccagaatatcgtatagttgaaatcatgtagtagccttttcaaattggcttctttcacttagtgatgtgcatgtaactttcctctgcatcttttcatggtttgatagctcatttcttttcagtgatgaataatatttcactctctggatgcatgacaatttctttatccattcacctactgaaggacatcttggttgtttccaaattttggtaattatgaataaagctgatgtaaacatccgtgtgcaggtatgtatacgttttcaactcattgagaaaatatgaaggagtatgattgctgactcatttggcaagagtacgtttagttaagaaactgtcaaactgtcttccgaagtggctgtaccattttgcattcccaccaacaatgggagtttctgttgctccacatctttgtcagtatttgtgttttggggttatttatttatttatttgtgtgtgtgtgtgtttttgtttggttttttttttttttttttttgagatggagtctcactctgtcacctgggctggagtgcagtggcactgtctcagctcactgcaacctccgcctcctaggttcaaatgattctcctgccttagcctcccgagtagctgggactacagcggtgtgccaccacgcctggctaatttttgtatttttagtagagacagggtttcaccatgtttgccaggctggtcttgaactcctggcctcaagtgatccaccagcctcagcctcccaaagtgctgggattataggcgtgaaccaccgtgcccggcctccctttgccagtatttggtgttgtcagtgttttggattttggccattctaacaggtgtgtagtccctcccttcctttttatttttcaattttttaaagccactttattgaggtaggattgacatgtaaaaagctatacatagtcagtgtatacaacttgatgagtttgggggttatctcccttctttgtaagatactttttggaagttaacaattaaaatattatattccatggccaggacttagtcccatgaccacagttagctgcaaggtaggaaatgtagtctttattctaggtcgccaagtggccatctgaaaagtcaggtttcttgtgaaggaagaagagagaatggacactgggagccacccagtgatctctgccacactgcagggaagggaaatcttctcaaacttgcttaaaggaacttcgttgggtggattcaggggtatttcatggaatttcaccaaagacataatgtgtggaggttgcctctgaagaggtagcatctggaaagttgccagaaaccagcaccactcttcctcttctgccttgctgtggcggtgtggggcttgttcatgtctttctacacatctgctctgttcttttctctctgcatgtggcaggaaggacatcccagctttagcatttcagtcagtcaactagctttccagagcccaattccaaagtccttggagagagaatctgattggtccagcttgggtcaggtgggagagagaatctgattggtttagcttgaaccaggtgtctgtcgactctggctagaacaaacaaggctgcaggggcccacctccagaggaagggagggcagttttcagaaaatgggtgtcatgggatgggaagactcctcagaatgtatctagagcatgaacatactcctctcaggtccatgtcccaggactttgcaaaccatcattcatttaggtaaacatttattgggcaccttctgtgtgctaggtacatggatctgccctctagggattttggaaatttttttggaaattgttcatatcttttttttttttttttttttttgagatggagtctcgctcccattgtgcaggctggagtgcagtggtaccatctcagctcactgcaacctccacctctcgggttcaagagattctccttcctcagcctcctgagtagctgggattacaggtgtgcaccaccacgcccagctaatttttgtatttttagtagagacagtgtttcgccatgttggtcaggctggtcttgaactcctgacctcaggtgatccactgccttggcctcccagagtgctaggattacaggcgtgagccactgtgctggcccagttgttcatatctttaacctgaattgtcttttagagcgaaatcatagctccttaaattactcaccttttagctttccaggtttcaagatggggatcaagggatttggtaaacacatgcttctgtttccccatctggattttggggaaccatagaagtggccatgttcttgcctctttttttttttctttttctgttggccagtttagaaagaaacgttctcccctccacctctttgtctctttagtaagaaacattttggttgttttttgtttgtttgctttgctttttgagacagggctctctctgtcacccatgctggagtgcagtggcgcaatcagggctcactgcagttttgacctccccaggctcaggtgatcctcccacctcagcctcccaagtagctgggactataggtgcatgccaccacatggagatggggtttcgccaagctgtccaggctggtcttgaactccttggctcaagtgatcctcctgctttggcctccccaagtgctggaattacaggtgcaccccaccacacccagctaatttatttattttttcttttcggtagagacaaggtctcactatattgcctaggctggtcttgaactcctggcctcaagtgatcctcctgtttctgcctcccaaagtgctgggattataggcatgagccaccatgcccagcctcatgttttaaccaactcaaatatgatgccgtctccttaatcttcctgattcttttgttttctttcttcagccctgggatgggcctccacggatctcaaatatgaaagtgtctcaagttcacacccgaggaggagaatgttagatttctagcccctgtaggaaaagcacctggaacttggcagaccttcctagcatcagcagcagctgatgataacgatcacaggtgctgttcattttgaacatactccatgcctagcaccaagctaaatcctgtatttgcatcctctcatacatatagccctcataccaaccctgagaggtaggcatcgatttccccattttacacatggctaatcaggaagctcagaaagaataggcaacttgtgcccgggcacggtggctcatgcctgtaatcgcagcaccttgggaggccgaagcgggtggatcacttgaggtcaggagtttgagaccaacctggccaacacaatgaaaccccgtctctactaaaaatacaaaaaattagccaggtggtgggcacctgtaatcccagctagtcagaaggctgaggcaggagaattgcttgaacctggcaggcagaggttgcagtgagccaagattgtgcaactgcactccagcctgagcaacaagagcaaaacttggtctcaaaaaaaataggcaacttgttcaaggtcacatagcccccgagtagtggagctgagcttcgtaactagaccccccttcctccagaggcttcccacatgccaccggcctctgagaacactccacattgcctctgagttctgccctatgcatgttctcctgtgggtatcattttgaatctttggcagtaccatttccaatgtgtttactaactcttgtcatgtaactctggaaatcagactctgatcccattttatttttgtcactgggaagaacagctgggctggggtcagggtggggctgtggtacatggatggaacactgttctgttgcacccgggaagtccagctctgtggcttccccaccatgtgtctctcggtaagggcctcccatctcttggcttcagttttctcatctgtgggccccttccagctcgacattctgtgttttccaagttaactgtgcatttcgcaaggatttcatgaggttgtcaacttccatgccccactgaaagggggagtgtttcccatctaggctgagcctgcttggggcatgtgagacttgcttcttgccatcacatctctggcctttcccacattctgatgtttgttctgcagcctctgggctttggggttatctggtgttgtctctccagttctccccagtggtgatggagtgtgctcccgccaccctctgccatctccccagactcaggtaactgaatgcctccaacccctctctgctcacccatagcatcctggcctcttcctccttgtcctgacataactgtttattgagcctggggtttggtgaacaagtgtaccctgctttgtatcttaagggaagatagagatgtgtgtgttctcccctctggccttttgctcagcattttgtacatatttacaaatcattcatcttctcagcaactccacaagtcccctagtatcatccccattttgtagacaaggcactcaaggctcagagaagttaacagatttgtctaacggacacaccagctactgccagaggcaagattcaaacccaggcctggcacaccctgtcatgccacgtacctttgactcactacatttacgctgcattggattcagggagaaaagtctgtggtcttcttggagtggtgtgactggtctgtggtttctgtgtggttttttgtttggtggggtaaacaggaagaccctagggataagttccagaggacagcaaaactcaatgtatttgtttggagggcggttggggggtggaaatcatagatacagcgttcctgaaggaagcaccctattccagcttggcatccctgaacctctgtccacatttgcttccagatcttggaaggagaccaagccatcctgcagagaataaagaaggctgtgcgggcaatccatagctccggccttggtaagtgagcctcctgggtgccccgcctggtcaggaagcccctctcccagccccagcctggagctaactccaagctcccgtctgtacctccacaggccatgtggagaatgaagagcagtaccgagaggccgtggaatccttaggcaacagccacctgtcccagaacagccatgagctgtccacaggcttcctaaacttggccgtgttcacccgcgaggttgctgcgctcttcaagaacctggtgaggcccctgtctcttccttgcccagactcagggtaaatctagtggtcttaagaacctgactgggaaagggtccgtttccttccttctcccaatttgcccttgatctctgacctgagttcagacctgaggtccctttccagccctgacccttcttttggataatcctcctttctctctggcttcttacccaactaactcttctctctgttctcctccttctcttcacccaggagcagagggggtctcacagcagggaagagccccgtgcaagggagggttccctggaggagctttgggataaaggagagacaggctcgggggttcctacctttataccactactgctgccactgccaccaccaccgctgccaccgcctcctcctctcctcactccctctttgtcctctgctttcccaatccacatctgcttcgtacttaaatcccaggacctgtccctgcctccacaagcgtctcagcccctgtacatggcccagtggcctcgggttgcttcccgatggcctccttggtgactgcctcctctctggtccttcaagtcctttcctcaaggccaccctgtgacagcagctcttcccatgtgcaggcacagttctcactagttcatgtgttcactcattcgatccggatgcacagctctgtggggctggtgtgactgttgtctccaccttacaggctaggaaactaggacctcaaggttaagcagcttgcccgaggtcacacggttcggtttgaacccaggttgtctggctccagagtccaagcataagcctggctacactgcctcccaggaaagcctctcatctccctccaggctccatggcactggaccagctcttgtggctccagtcctacccagcatcctccctggttggcaggggccacatcatccttgagaggcagtgtgctcagtggttaagcacccaaccttggacctagactccagcttggaatcttcactctgctgcttactaggtcaagtcactcagtctgcccaagccccaggtctctcatctgtgaaactgggataataatgctgcctacctcacagagcggtaatgaggattaagcaagttagtgcctactttatggtaagcgctcagtaaatgttggctaatattatattaatggcaaaacagcaattacttttgcaccaacctaataaaatctatcattgttatagctcttggcatagctgtgcctcgtacactgtcctgcatgtaaaaagcctttaacagtgtttgaggctgggtgcaacatttcaaaccttaatcccagtggtttaggagcctgaggtgtgtggatcgcttgagcccagaagctctagaccagcctgggcaatgtagtgagaccctgactctacaaaagtatgaaaattgccgggtgcggtggctcacgcctgtaatcccagcactttgggaggccaaggtgggcggatcacttgaggtcagagattcgagaccagcctggccaacatggtgaaactgtctttgcgaaaaaatacaaaaattagttgggtgtggtatcaggtgcctgtaatcccagctactcaggaggctgaggcaggagaatcacttgaacccgggaggcggaggtggcagtgagctgagatcatgccactgcactccagcctgggtgacagagcgagattccatctcaaaaaaaaaaaaaaaaaaatgccaggtgtgggggcgtatgcctgtggtcccagctactcgggatgctgaagtaggaagatcagtttagcctgggggaagttgaggctgtagtgagtgtgatcacaccactgtgctccagcctgggtgacaaagcaagaccctgtctcaaaaaaaaaaatagtgtttgagttcaattgaattagtgtccttctttgtcttcacctcttctctccctgtttcagtcaaactagtgtttcctgggggtctgctgtctagtggacattgtaccaggggttggtgacacaggaaagtgtcagactgcctcagagagccacagtctagtgggggagagaaaaactagggtgtggactagtgtcaagaaataccagcagcatggcacaaactcaaggacccagcagctggtgtcagaggcctagtgctgccatggttcagaaaaggggagatcagcatagaccaggcgggaggagtagccaggagagacttcctggaggaggagagacccaagctgtaccttggaagctggttgaaatattaggcctctttaggttgcgaaatcacagaaacccaactcaaactaggttaaatttttaaaagggaattcattagcccctgtaatgagaagtccaggggcgcagctggcttaggctctatcctttcctcttaaggtagtttctctgtctctgctcagtggacaggatagcccagcaggcccagatgcccatcttaccaaaataaagatggtctttctcccacaacttaggcagaaaaatcccagcgaggattgtgattggctggcttgggtgcgtgcctgttccctatccagtccctctatcctggggctggggtgccctgctcagatctgacttctgcgtttaccccatctgaccacagaggaggagttccccacaggaaagggggttctatgaccattaataggggaggctctgaagcgttagccagcccagaacaacagacgtgcactacaggtcaacttgagagagtcagagaggagaagggaggctgctcctggcgaggaacaggggagagattgactgtgggatgctgctggagcagtgcagcgatgaggctggagccatcagggaaggggctcactctgacacacctcggcctcccctcctgccccctttcacacaggaagcctggcgggcagcaggtcagccatcctaagcagaccccagagctggatcctctagtccccccccgcaggctcagcactcctgccatgacggtcccccttacttggctgtcatctctttgataacatcttttcctctcccctacttcccttccccgctgctctctttgccaagtgatgcttcactgtacaccgaatccctaggggctggatgccggtcacctgaggcgggaatgagcgtctctgttttttccagattcagaacttgaacaacattgtctctttccccctggacagtctgatgaaggggcagctgagggacggtcgacaggtgagtctccatgctgggagtggtggtgggacagagtaaaagaggggtgggcaggagactgttggggggcagggctggactgagggtggaggccaggtgaaggggctgtcttagcgggagtgatgagcctggggaggtctggaggacctggctcgggtcagcctaggatggctgacctgctgtctgccaggccccttgtgtgaaacatgtcatgtaaatcttacaaccatcctatgaggtaggctttgtgggtacactcatccccattttgcagttgaaattcgaggccaagggagttaggtaacctgctgatggtttacataactaggaagtagagagcccatgtgggaatccagggatcctgaatcccatactcgagctgctttctctgtgcctggcagcccttggctggatgcagagtggagctcaaagaaggtgacagaataatctctctgggcaatctgccccagacggcccaggggaggagccgtgctcccccaagagggttccctccctgccctaggctgccagcgtggcaccagcctgctaaccacacaaaccagacaggcagctttttcaccttgggagtctcggggttgttcagaagggtgtgagcagcctggctggatgaggcttaggcaagctaggcagggggtagtcaggtctccctggtttgctgtatggcctggggtagacttctcaacctctctgtgcatgttccttgacctgtacccttgctctaagaggatgatctagcaccaggcaggagaaaatgctgggctaaagttaggcagggggaatttggccttcatcctcccatcctcatggtcatgactgatctctcttctgagcaagaggactcagggtagagcccaaagatctcttcacaccccaagccatggcccaccaaacctgactgattcttggcatctctggggaggagaaggtctgctgggaggagggccttagctctgagaaatggggtcagctgagcctgtttggtgggggcaggtttgcagcaggactgtgggggcaggggctggttagagaagggctctgagcagctcaggggagcacactagcaggtcctcctacaggcagcagagcatactgtttattccagtgctccagcttccctctgggcaaattgtccttttttaacccacaggattccaaaaaacagctggagaaggcatggaaggactatgaagccaaaatgtaagtggccacagccagggtcgtttgtctgggagagtagcacttaggctggatagggaagaacctaaatgctgccgagacatgtcatccagaattgggtgacatctggctctgtagaggcatttacagcagattgtttatacccagacctgactggattctggggactgggccacgagaccaccaaaggagctattgtgaagggacctcaggatgctgctctcagagtcccatctgctcagtggtgccagacatgggcagggatgggaaggagctagcactgaccaaacacctccgcgtgctggccatttaatcttcacagtcaccctgtcatgtgtgagagaggtattagtatcacaattaccacaggaggactcagagaggttaagtcacttgcccaaggccccacagcttggcagaggcagaactggggtttatgccccttgctcctcgttcctcagtgtcagttggtatatctagagaaggaaatggctttctgtgtcctgtgcacaccacacgatactccagatctctcaccagctactgggacatcatggggaaagaaggagcctcagtcaaccagtggccaattcctcctgggcagagactccttgggctctgtcttatgaggagtctgtccagatcccagcctttgccctctgcccagccaggcccatactgtagagcattgtttgtgcttttttgtaaaattttgttttctcttgcattttgccaaagcaatttatgcttattatgaataattttgaaaatatggagaagtaaaagaagaaaaaaaattaatcatccttagcagaggcttagggttatggcaggcggataatactctctgttgtttgaatttttttttttacaaggtctgggtaacattgcagttttcatcattaaaaaaaaaaggttggatggggagaaactacccaaaaataggagaaaaattcttaattttcaagcctaaaatattaacattttaacatttatttttctatgtatgaagaaatgtttttataaaaatgagatcataacaacatactgttttgtaatctgcttttttcattcaaaaaatacattgtggccatctttgtacaccattacatattcttccacatcaatcaaacgggtgtgccaaaacctgcataagccattatgtatttaatctgttcctgtcattggagaagcatccttggatttaaatatttgtccctactcataattatttttgcaggatcaatttcaagaagtagatcctggagctttttattgttccctcagctcccagagccatggcaccgctccaagtctgaggcaaggtcacatcttgtccctgcacaagcatctccagccccagctgtgggcatagatcctgtgatgaagggtgtagacactgtgtggccatccctgtggggccctatccctgcctgtgatggggcacggccatctgctctcactggaggcccagggacgggtagtgagggcacaggctgaccttgtcttcatgatttgctgtggggccacatggccctcttcttcctgagttaccttaactaagccgttagactttcggggatcgtctaccaaatagaaataataagctctactctgctgaccttcccaaagcaggtctgcttttcctaggtttctatattgagccttcctgtagcatttcatttacaggccagactccatttagttgatgggaaagggggcttggctgaggttattcggtgagttatcgataggacctggactagaacccagggcttctgagtctagtgctatttctgccatgtggtctcctggctcccaccatggagccacatagtttgagctaatgtcttggcacgggtgactgtacactccttttcatacgggctccaggtgtagccagatatgcgtgagccgtaagttcctatgtaatttcaccacattcctaccaaacaagtctgagccccagctggaagggcccagggccctgatagcatctgtcaaataccactgggagcttcacccctggctgttcatataggaggaggattacctctccacgtggggctgctgagaaaggcatcccgggccctgtacagaggccaaatttatctaggcagttccatgtacaggtctgtttcctcatctgtacaatagggacagtaatacctttcagggtcaatgcggcgatgaataagcacggtgcatataaagcactcagcacttcagttcagcaagtatttattgaccacctatatgagccagaactaggaccagaataacacaggaagagattgacaggcagaaacccacacatctgctggtagcatttaccctagccagcttttaatcttgtgcaagccattttccttctctggatctcagcttcatcatctgtaaaatggtccctgttctgagagagactgttatctctcagaaaataaacagtgtgactgtcagcagctcgcaggaatgaggcagggaaggaggaatggaacaaacctgagtcacagtgttggttgcttgggctgcccctaaggcttaggcaccagccagtcctgggttcaactcctggccccaccacttaacagctgtgtgacttggacaaatgacttatctcagccataggctcctcttctataaaatgggataatgatcctgccttatggggctataattttaacatatgaagggcctagcagagtgcctgggcctaaaaattataactaggagcctgtaatcctagcactttgggaggccaagacaggaggatcacttgggctcaggagttcgaaaccagcctgggcaacatagtgagaccttgcctctatttaaaaaattgataataataatacatatataataaatataatacatatatttagaagccacacatggtggctaatgactgtaatctcagctacttgggaggctgaggcaggaggattgcttaaggccaggaaatttgagaccagcttgggagacagagctagaccttgtctctaaaaaagaataataataataattagtaataatagcagcttctactttagagtttcctttgtgccaggcagtggagtaaggtctttgcatctattaccagatttattctccctggcagggaaagctgctattgttattcccaatttataggtaagtagtgaggaatccctgccacctaagcgtggctcaaggtttcaaggttggtgggtgtgtggtatttaaatactttcctgcctgcaccaggagtacctgtacccatcccatgaataacactggactgttgctgtagtctccttctgcaatgatctcggtcttagtaactagcatttaagtactttcacccactatttcatttcattccttctattgcaattccactcataagacagaaaaatgtttctaacatttgaaatgttttagaaatgttttaaaaatgttggtgatcctttgaggatagggaaggaatgggacttgttattttataggggaagaaaagcactccccagctattaggtcatctcagaatgactatgtcagactttgtagggaaaatctctatgaattatcttagctgaggctgagggacagaactgtgataattgacaaagccattttgtcacagctgtgtacattttgtcaaagctgaagtacattgacaaagttgtgtacttcacggcttatctacaccttgagttaagtagcatcttttaatctctactagcattcaaaaaataaaagaaagaaagaagaaagtaccatatgctgaaaaaaattatctaaaagggatcaccagtatttactactctgtcatcattgccatcacttgaatcatcataatcctaccattcattgagggcttgccatatgccaggaactgtactgtttcctatgcattatattatccaaggactaggtgtcattacagtggttcccccttatccttgggggatacgttccgagacccccagtggatgcttgaaactgaagatgatactgaaccttacattaggttggtgcaaaagtaattccggcagtttttggcattaaaatgtaatctgtgctttttcctatatatacgtacctatgataaaaattaagcacagtaagagatgaacaataatagtaataaaacagaacatagtagcatcactactcttgcactctggggccattatgaagtaaactaagggttacttgaacacaagcactgcaatagtaaaacagctaatctgataaccaagaaggctactgaatgactaatggcaggtggtatagaccaggggtcctcaacccctgggccatggactggtacaggtccaaggcctgttaggaacctggactgaacagcaggaggtgagcgttggcaggcgagcgagattaccgcctgagttccgcctcctgtcagatcagcatggcattagattttcatagaagcacgaaccctattgtgagcttcacatgccagggatctaggttgcatgctccttatgagaatctaagcctgatgatctgagctggaacagttccatcccaaaaccaccctcccccaccctgctatccgtggaaatattgtcttccatgaaaccagtccctggtgccaagatgttggagactgctggatagacagtgtaaatacactgaacaaaaggatgattgatgttccaggcaggatggagcagaaggatgcaggatttcacatgccactcataatgatgcataatttaaaacttacaaattgggctgggcatggtggctcatgcctgtaattccagcactttgggaggccgaggcaggcagatcacctgaggtcaggagttcgagaccagcctgaaacacattgtgaaaccccggctctactaaaaatacgaaaattagctgggtgtggttgtgggcgcctgtaatcccagctacttgggaggctgaggcaggagaatcgcttgaacctgggaggcagaggttgcagtgagctgagatggcgccatggcactctagcctgggtgacaagcaaaactccatctcaaaaaaaaaaaaaaaaagacaaaaaaacttatgaattgtttatttctggaattttccatttaatatttttggacaggggttgaccatgaataactgaaaccacagaaagcaaaactacagagaaggggggactacagtattattctcattttccaaatggggaaacaagctcagaaagttttataaaggttaagtaagtgaaggagctgccattcaaatccagaatctacatttctaaccactgtactgtattgtggtttgctttttgtccatttactctggagcagatatatttccatgtcagtacagtcatccctcattatccatgggggattggttccaggacccccgcagataccaaaatctgaggatgctaaagccccttagtcagctgcctatatcctcaggctttacacccacagatatggagggccaatcacatgtacagatattccttcttcttttttttttttcttgagacagagtctactctgttgcccaggctggggtgcagtggtgcaatcatggctcactgcagccttgaactcctgggctcaagtgatcctcctacctcagcctcccatgtcgctgggacttacaggaccatgctaccatgcctggataatggtttaaaattttgttttaaagtagaaacggggtcttgctatgttgcctaggctggtcttgaactcctggcctcaaatgatcctcccacctcagcctcccaaagcacttggattacaggcatgagccactgcacctggccaatcttcattctaacagctgcatgatatttctatatatcgccatactattatttgtctaactacttcctactgatggacatttagcttattttccatttttgactattgaaagatatggtaacagtgtacactgggagacttcccctacgccagcccacctgatgtcacttggtctccctcattcctttttttttttggagagacagggtcttgctctgtcacccaggctggagtgcagtggcacaatcacagctcactgcagccttgacttcttgggctcaagggatcctcctacctcaaccttttgagtagctgggactataggcacacaccaccatgcctggatcatttttaaatttttctgtagagacagggtttcaccatgatgcccgagctggtttcgaacttctgggctcaagcaatcctctcaccttggcctcacaaagtgctgggattacaagcataagcttccacgcccagccctccctaattccatagcaagctgccaggcactgctgctgagatgctgcaggcccagccatcacctcccctctctgctgctttttttcagattcacaaagaagtctgtcctgaccctcaggcctggttcacaggatcagttcctaccctacttctaccactctttacaaactcttgcttggggtatcagaaagcttaaggaaataaaaaataaccccctctttaaaattaaaaaaaaaaaaaaaagcctacagagcctgcaatgtctggagacatttctggttgtcacagctggggggatgctactggcagctagtgggtggaggtcagggaggctgctaaacatacaaaccaccaggcagccccccataacaaagaatcatctggccaaaaatgttatcagttccatggttgagaaactgctctacaggtccccagggacagattctgtatatgaacactatcccagaggtcttacctactcaggagggcccagaactttagagtcagaagggacctgagaacttaccgtagaccattgcttcctccatttacagatgggaaaacagaggccttgaggggcctacagtaaaagctgccatgtgtcttctatgtgctgagtcttttccatgctgtgcctcatctgggtacagataagaatctccgttttccagatgaggagaccaaggctcagagaggggaataaatgcagccagcaagcagcagagtttgtattaatcccactctgtctttgtcttctctgctcagggctggcccccacttgagagcagaactattaagcaagccctttcctttacatgggatttggagtcacatgcacccagcctgagatgtggaaatactctcctggctgtgagtgggtagtctgctgggcgtgggatttccaggaaaccatttacacacagatccacccatccccaaagagggaaaacagccaacctctgagggggaaggccccagttactcttagctacaaggatgggaagcgctttctgtctccacttaaaaagagaagagcacggtggggcgtggtggctcatgcctgtaatttcagcactttcagaggctgaggtggacagatcacttgaggcccgagttcaaagaccagcctggccaacatggtgaaactccgtctctactaaaaatacaaaagttagctgggtgttggccaggcacggtggctcatgcctgtaatcccagcactttgggaggctgaggtgggtggatcacctgaggtcaggagatcaagaccatcctggctaacacggtgaaaccccatctctactaaaaatacaaaaaaattagccaggcatggtgacacccacctgtactcccacctactcgggaggctgaggcaggagaatcgcttgaacccaggaggccgaggttgcagtgagccaagatcatgccgttgcagtgagccaagatcgtaccactgcactccagcctgggcaacagagcgagactccgtctgaaaaaaaaaaaaaaagattagctgggcatggaggtgggcacctgtaatcccagctactcaggaggctgaggcatgagaatggcttgaacctgggaggtggaggttgcagtgagctgagatcgcaccactgcactaaaaaaaagaaaaagaaagaaaaagaaaataaaagaacaaaggttttctgagctttaagtatgaagctccatgggctcagaagaatgaaagcactttgaaataactcagaaacagaaagtcaaacactgcatgttctttctcccttataagtaggggggtaagcaatgggtacatgtggacagacagagcagaatagtagacattggagacttcaaaaggtgggaggataggtgagagatgaaaaattacctattgggtaccatgtacactattcgggtgatgggtactctaaaagcccaggcttcaccactgcacagtatatccacgaaacaaaactgcacttgtaccccctgaatctataaaattaatacaaataaaaaagattgaaggcacctgtgttcttaaatcctttccaggaaaatcagaactgtttgccccaaatctcacttggcccttgtttgagtccttcatccccctgaataaacaccttcaaatccttcccattactcttgggataaagaccaagaatatattaacatggtgtgaattagaccctgcatggtctggcacctccttaccttagctggcaccagccctctccatcttggcactcgctcctgccttggggccatcacatggtccatccctcttgcccagcagtagcttcctccaagcttctcaggcttcagatcccagctcagacatcacttcccaactagccccaacgaggttggatccccattttctctcccatagttctctgcgtggctgtgatttgattcatgtctttctcccccaccactctgtggattccctaaactgtcttgttcattgtacccagccccaccacacagctggcacaggagggcctcctgcaccatgtggcccctttgctcatgcatccttggcagaagaggatataggggctggtgagacttgttcaggcttctctttccttggggtctagggccaagctggagaaggagcgcgatcgggccagggtgacaggagggatccctggggaggtggcccaggacatgcagagagagcggcgcatcttccagctgcacatgtgtgaggtaaggggtgctctggatgagggagggggggcgtgggatgtgtcttcctgtctgcctctccaggggaccagtcacagcctcagctcaggtcctggccacatggccctgtgggatgtcaccaaggcccagtcgcagccaggaggattagcctgggatggggactgcagcccctcgttcccaggattctgcttcagctcacatcacgtatcttgccctgccctcctcctagtatctgctcaaagccggggagagccagatgaagcaaggtcctgacttccttcagagcctcatcaagttcttccacgcccagcacaagtaggtatcttcccgcgtccctgccactaacccttccagtgtcacagaacaaggcccctctcaaggtgtgatagacctgagagtctctttggaggcctgcatctttttggcagaactttcatagttcctcattgagtgctcaccgggtgtcaggcatgagtactttacaaacatcaattcgctcaattccccaacacttctgggagcaggtactctattatccccattttatagatgagaaaactgaggcttattttccaagattacatagctagtaagtgggatttgaacctagtcaagagagactcttgtctatggagtgtctgttcttgaccgtcagactacaattccctgaggtgccctgtgatccttacggcagcttctcccacacttctggcttcatctctcatttccatctttatctggacccttgtttggcctctgacacctcttagctttttccaagatggctggaaggctgcccagagcctgttccccttcatcgagaagctggcggcctcagtacatgcagtaagttgggtctcacccttgggcacgtgatcaagccccctgtccttccaggaaaatctgtgggtgtggaagagctggcttctgcccacagagtgaggctactgctctgctcttctgggtctgggctctgtgcctgacatatttgttggctggtgatgggatcccatcctctgtcccatagctccatcaggcccaggaggacgagctacagaagctgacccagctccgggactccctccgagggacactgcagcttgagagcagagaggtcagcccctgaactatcccaaaaggaatgccctcccccaaggcccaccgtggagggagggagagaaggaagacccacagggtcccctggagaagtctccctgagtgagcccccgcagaatggggctcttcccactgagatgccctgaggtctcctttgcatgtccgagggacaggaacacctgagccggaagaactcaggatgtggctatagcatccaccagcaccaaggcaacaagcagtttgggacggagaaagtgggctttctatacaagaaaagtgacgggtaagtgattcagagcttacataatttgcccaatgtcacactgcaagtaaatgacagggttggggaagctgcccaaaggaactgttctaatcatttgtgtagacaccgagggttgcaatgtaaaatcctcaattcctgggttgtccaggacacctgggcatgtgaacttctgctaaaggtgactggttattttaagttaaagaagaagaatagcagtagctaacacttttttttttttttttttttgagatagagtctcactctgtcgcccaggctggagtgcagtgccatgatctcggctcactgtaagctccgccttccgggtcatgtcattctcctgcctcagcctcccgagtagctgggactacaggcactcgccaccacactcggctaatttttttgtatttttagtagagacggggtttcactatgttagccaggatggtctcgatctcctgaccttgtgatccgcccgcctcagcctcccaaagtgctgggattacaggcatgagccaccgcgcccggctggcagtagctaacacttattgcaacacttactatgccctcattcttttttttttttttttttttttttttttttgagatggagtctccctccgtcacccaggctggagtgcagtgacgtgatctcagctcactgcaacctccgcctcctgggttcaagcgattctcctgcctcagcctcccgagtagctgggactacaggtgcccgccactacgcccagctaattttttgtatttttagtagagacggggtttcaccgtgttagccaggatggtctcaatcttctgaccttgtgatctgccagcctcagcctcccaaagtgctgggattacaggcgtgagccactgcgcccagcctatgccctaattaatctctgcaatatactgaatatgcctagaaatgaaagtattggctgtgccttgcttcctagtgtaaaaaaaaaaaaaaaaatcagtctgtgggccaggtgcagtggctcacacctgtaatcccagcactttgggaggccaaggcaggcagatcacttgaggccaggagttcaagaccagcccagccaacatagtgaaaccccatctctactaaaaatacaaaaaattagctgggtatggtggcgtgagcctgtagtcccagctgcttgggaggctgaggcatgagaattgcttgaacctgggaggcagggattgcaatgagccgagatcgtgccactgtattccagcctgggtgacagagaaagatcctgtctcaaaacaaaacaaaacaaaaaaacaaaactgctgtgaaatgcaaaggcccttgtgggatatattcatgtttctacctaccaatcagtttaatcggagaagaataactttgaagaagaaaccaatgaatatttacctgttacaggagaagtgttacggagttttggatcatggacttgctaattttattttggggatattaatattgatcttgcttagttgaaccacaatttatttgttgttgtcaagagcctgtgcctctcagactaggagctccctaatgatataagctatgtctcccccatcagactgggagctctcagagggccaaagtcacatcatccccttagaataaggattcccagggagtgaggctgtgtttctccatcagactggcatcttcctaagagcagaactgtgtctcctccatcagaagggagccccagagagtcaggggtcaggggtgggggtgtagggttaggagaagaaagaggtaaagggatgtggctagagatcatacaggtgggggcaaatttctgttctctgacacctgcgaactaggtgtgagccttgggtcactgtccttctatccctctgggctttagaattcgaagagtctggcagaaaaggaagtgtggagtcaagtatggctgcctgaccatctcacacagcacggtgaggcctagaggtggtgggagtctcagggcacgatggaccctcttcttctggtgttctgagcaaataatgtcaagccctccctctaagactggcccccaaacctaggtccagggagctggagacccgtttgggaggacagatgggacctgaaggccccaatctagtcttagtctacacttcacatccttgaggtgctgctgggtgaggagaaacacaaatggaacaggatgattatgcccatttaacagagtgggaaatggaggcctaaagaatgtggagggccagaggtaatgcatacatcctccgcccctaaattcccacagataaaccggcccccggtgaagctgaccctgctgacgtgccaagtgaggccaaaccctgaggagaaaaagtgcttcgacctggtgacccgtgagtggtccctgtgcctctcccccacccacagctgctcagggcttctctaagacacctgtcagctcccggggggcttcagtgaggggtctgtgtccagttccacacatggtgtcgaattgctgctactgcagacataagaatccttaggtctaggatacccacatcacattaaatgtcaaaatgcacccactttacataataaatgtggctatttatacagagcatatttgagtggatttgggtcatctgggttttgaaattatttctttttttaaaattttacctttttttcccaaatacccagacttgaaggagatgaaattattgtttctttacattttctacttttcgttcttcagagcctttggtgcaggctttgtgtgagagcagacacaggctgagaaagacctagatcttgtcctcaggaaactctctggcaggggtgtggggtgggtacccaggactgtaagatgagggggctgtccagaagatgggtgcagatatagccccatagaagattagggagcaggaaggcctgcactgctgtggggaatcaggaaaggctcctggaggagacagtatttgagtttagccttgaaggacatgtagaatgaagagtttgtggggtgggggcttttgaggagacaggattagcatgatgaaaggcatggaagcaggagagtgggtctggccggtttggccagagtggagggttcatgtagcagagtgagagatgaggcctggaaatccctcttaaaagtttggaccttatttcctggcaatagagagccatgggagatcttggggcagggcagtggtgtaattagagcagagccttgggcacaacagttgggagctggtacaggctaggggaaaggggaaatgggaagcagggagaccagacaggaggcctggtcgcccaggaggagaccaggaagggcccagtggggtggtgacagttggttcagaggatgccctgcctcagagctgggttctctggggttccaagccctttgagacctcgtctgagcctggaaccagggcttcacgcagagggagctttgttgggatcctacttcggaggccagttctgagaaactgcccctggtgctggccactgtcattccactcccttcccactcctagcttgagagtccgacttgtcagggacacatctccatgtggccccagcggctttggtgggggctccctgggctccgggaaggccagcagcatttctgtgggtcagaagcccccttctctcccgacagacaaccggacgtaccactttcaggcagaggacgagcacgagtgtgaggcgtgagtgccccctcggccagcccggccagccttgtgggtgggggccggcggccctatctcttcccacttgacatccccatcccaccccgttcaatctccgcaggtgggtgtcagtgttgcagaacagcaaggacgaagccctgagcagcgccttcctcggggagcccagcgctggcccggggtcctgggggtccgccggccatgatggggagccgcacgacctcacaaagctgctcatcgcggaggtgaagagcaggcctgggaatagccagtgctgcgactgcggggctgcaggtcggtccccggggccggggcaggagggaggcttaagtggaggggaggggctgcacctccaggctccagctgctttcctctgcagaccccacgtggctcagcaccaacctgggcgtgctcacctgcatccagtgctcgggcgtccaccgcgaactgggcgtgcgcttttcgcgcatgcagtcactcaccttggacctgctgggcccctccgagttgttggtgagggcggggcggggcctggaaggggccagaagcggagttaggggtgtagtttcatccgggggcggggcttgcaggttgtgggtgggacctggccgaggtgggctgggacaagccaggtagcgggtggtcaggggcggggcctgaaccgggagggcggccgaggggcgggactctgggggcttggagctccaccctatgcaggcttaaccgcccggtcttactccgccccacgtctattttcctacgactccagctggccttgaacatgggaaacacgagcttcaatgaggtcatggaggcccagctaccctcacacggcggccctaaaccctcagctgagagtgacatgtaaggggattctcagagagaggggcaccctgcctaggggattctgcctccgcagtgtccagggtcgtagaaaagtcttggatcagaagtctggggaggctgggcgcagtggctcacgcctgtaatcccagcactttgggaggccaaggcgggcggatcacttgaggtcaggaatttgagaccagcccggctaagatggcaaaaccccgcctgtactcaaaatacaagaattagctgggcgtggtggcacacgcctgtaattccagctactcaggaggttgaggcactagaattgcttgaaccctggaagcagaggttgtagtgaaacgagattgcgccactgcactccctcctgggcaatagagtgagactgtctaaaaaaaaagcctggggagaggggagcctcagatctagacgtcttcaggacatggttctggagaaaaagagagctgtatctcctgtgggagggccccagggatcagctgggcagacacggtccatgctctgagatcctgtggttgtttttggtaggggcacccgcagggactacattatggccaagtatgtggagcataggtttgcacgccggtgcacacctgagcctcagcgactctggacagccatttgcaacagggacctcctgtcggtactggaggcctttgccaatgggcaggactttggacagccgctgccagggcctgatgcacaggtgagaacccctccaagggccacttataacccacctgtctaacatattccccagttcttctccaggaccagctgttactcccctccaccccacctctgacatctgctcagatctcacccatcagagtggtaagtgggaaagagcacagcttcagtcaggcagacctgggtgggaatcctggctctgttttttcctagctgtgtgatctagggcaggttacttctctgagtctcatttcctcatctataaaaggggttaataatagcacccacggtgatgaagtgagaagtcatgtatataaagggcttagtgtacaatgggcatgcaataaacgttaatatctttttctttcacctaaatagccctgaaatataagggcatgtcagtttagagccaggaaggccacattgctttggctattccaagaacaaacacatgagcatggagaaaggatatcagagacatttgaaaaagtaaatcaacaggagttgctgactgattcgacatcaaaaattggatgttggctgggtgtggtggctcacgcctgtaatcccaacactttgggaggccaaagtgaaaggatcacttgagcccaggagttcagaatcagcttgggcaaaataaggaaacccccatctctacaacaacaactaaaattagctgggtatggtggcacacacctgtggtcccagctactcagaaggctgaggtgggagggtggcttgagcccaggaggttgaggctacagagagctgtgattgcgccactgctctccagcttgggtgacaaagcgagaccctgtctcagaaaaactaaaaacgggtatctttgaactgtctgtctgatatcttggtgggctatccaatgggcagtgcagcacttaggtgaggtaagaatttggaacagcctgcacatgtgtgatagttgaaaatgtgaggttgctgaggtcttggtggggaagtgcgatcagggagaggagccgagagctgagaaagaagtttgggaaacacttgttgggggcagaggaggaagagccgtgaatgggaacaatgggagaatggcccttcaccttcctcccagacatgaggctctgcccttgcagtctcatctctccagggttctggcagcttcctatggggggataaggggttagcaagagttcaagagggaaatactgggttggaggcaggtgcactggggggggaatctcagaggtgtggatgtgttttcaggcacctgaagaactcgtcttgcatttggctgtcaaagtcgccaaccaggcttccctgcctctggtggatttcatcatccagaacgggtgagagcctccctgcctgtctgtctggctcctcacactccctctcctttccttcctcttctcccattctcttccctcctttcccctcccactttttcccctgactttgatcccctcattgatctgttccccttcctttctccctgaaccctcctctccccagtggtcacctggatgccaaggctgctgacgggaacacggctctgcactacgcagcactctacaaccagcccgactgcctcaagctgctgctgaaggggagagctttggttggcacaggtggggcttgaatacctcctccgtcagactcctattcctgactaccccttatgtggacttccgatggtctcgggctctaatcctggcttgcttctgaccacctctgtgatcttaggggtttgtcattcagctcttgaatttcagcttcctcatctgtaaaatgggaataataccactgacctagcaggactgctaaagaaaaaagaaaataatatttctgggagtacttaggcaaataaatattagctagatctgaatgataatgattgtaatagctaatatgtattgtttaacatatgcctggcaatgggacaagtgctttttgtatgttaattaattgaatcctcacaaccacttcatcaggtagttccaagtattatactcatttcataaacaattttgtcccaaaaggttatataacttgcctatggtcacatagccagaaaatggcagagccaggattcaaacccatacattctgattccagaggcccgtcttaatctctaagctgtaatgtttctttgactatgaccatgaaccctgactttccccgctcacagtaaatgaagcaggcgagacagctctggacatagccaggaagaagcaccacaaggagtgtgaggagctggtgaggactcggggaggcaaggggcccctgactctttctctctccctgctgagcccccaaccctctgaaccaccaagcctttgtttttggcagctggagcaggcccaggcggggacctttgccttccctctacatgtggactactcctgggtaatttccacagagcctggctctgacagtgaggaggatgaggaagagaaggtgggtcccagccctgtccctcaggcctctggatggcagaaggaaagagccagattgggcctggtgtgtgttggcgggggcggtgaggcggggggacagggctacaccggaggaaccaggctgtcctcatcctcaatcttttgctctggcagcgctgcttgctgaagctcccggcccaggctcactgggccagtgggaggctggacatcagcaacaagacctatgagactgtcgccagcctgggagcagccacccctcagggcgagagtgaggactgtcccccgcccttgccagtcaaaaactcttctcggactttggtccaagggtgtgcaagacatgccagtggaggtacagttggatgcccagataaatgctcaccatgccattcacagaggacctgtatatgctggggcactgagctgagtgcatatgttagtccgtactatccttatgatgacctcccaggaaggggttctcatcttccccttacagataaaagaacagaggtgttaagtcacatgtttaagatcccacagctaataagtctctgatgtaggattcaaatctcagcccatcttattccaaattcctcaatgctccacttaacaagagagaaacgagtttattgagcatccccttcatcctgagtcctttgagggctaccaagacacagtctagtaggggagataaaaactggaatgcaattcattataatacaaggcacaatgtgatatagaatgtaaatcccaaaaggacaaggactttgagtgtttcattgaatactatttgtccagtgcctagcgcagagcctggctgttctcaagaactatttgtcgaatgaaggaacagacttgttgtgggaggttggggcagttggagagggagcatgtcctgctgggattgggggttggtttaagaaggcttcctggtgaggatagcatatgagtgaacctgagggatgagcaggagaatccaaactgggacagggtatgagcacaagcaaaaaagtgagtcagcatggccctggccaccgcgaacaaaggcttcatcagttgaaggagaatactggacaggtagatggggaatggactattggcagagaaccagaagagatcctaggccagatgtggtggctcgtgcctgtaatctctgcactttgggaggccgaagcaggcggatcaccccaggtaaggattttgagaccagcccagccaacatggtgaaaccccatctctactaaaaatgcaaaaattagccaggtgtggtggcatgcacctgtaatcccagctactctggaggctgaggcaggagaatctcttgaacctgggaggcggaggttgcaatgagccgagattgcaccactgcactccagcctgggtgacagagtgagactctgtctcaaaaaaaaaaaaaaaaaaaatcctagaggccagagactgctttgaggttgggcacagagcaagtgataaagaaaagctttatcatttctgatgtttctgattccagatcgttctgaagtctccagcctgagttcagaggcccctgagacccctgagagcctgggcagtccagcctcctcctccagtctgatgagccccttggaacctggggatcccagccaagccccacccaactctgaagagggcctccgagagcccccaggcacctccagacccagcctgacatccgggaccaccccttcggagatgtacctccccgtcagattcaggttggtgagggcccagctgtgcaaccagggcaaatcccctgacttctctgagcatccattgatttccacacctctaaatagtacctgcctaaagactgggtcacacgccatctctgggcccatcacttatgcagaaatgctgaaccctgggaccccttcccccttcacacacttgctcccaaatcctgcatggagagctgaggaggagccagggatcctccctgctgatgttggagtaaagtaggcttagccccctgtgtggcttattctagaggctctcagtggggtcttcactctgtccccacctccaacccaggatccagtcttctcccttccatacaaacccattcagtctggagtttggggagaagtagacctgcagatatccacagagtcttctggaggtcagttccagccttcttgggcctgtgatggacctggcctgggggccttgtggactctacccacccatcctaagcccccagactggctctgttcctgagccctttctccccactctgaggggctctctggacatgagggtcatgttggcctttccctgccttccagctccgagagcactcgctcctatcggcggggggcgcggagccctgaagatggtccctcagccaggcagcctctgcccagaaggaacgtgccggtaggaactctgggaccatggtttgaggggcggtggcagggtgcctgggaggcagagttagtcaagagtaggcgtattggggtgggagacctccccatggttggggtacagatgggcccaggcagccacagtttggacagtccctgtcctggtgcccaggtgggcacggtttggccagtccctgtcctggtgcccaggtggccacggtttggccagtccctgtcctggtgcccaggtggctgcagtttggccagtccctgtcctggtgctcctctttccatgctccagcccagggctgggtgaagctgaggagagcccaggccttgagggatggcagtgatcatgaggcccaagctctggcttctccccaggggaggatgaggaaagttgtgttagccaggccagtcgctcagagaaggcatcacttccctgcagaagaggcaggattaggtggccgtgtaccagcccttgtttgcctaactctccccttgttcatgagtctcctggaatccacagggactttcagatcccaggcatagagggatgtgacagggacagggcaagagctgtcatccttaatccagcttctccctgctgaatcaccaagtctccaacaatggcatatattagttgaacctaggagtgggcacagatcagagccagttgtgttgggaaagaagcctcttctgtcccttgttcctctgggaattcctcagaatggcattggttgtgttgggagtcaggatggcaggggcaaaagctggttctgtctggggaatcgtcatctttagtccaccagagttagtcagcagacacaaatctatgtccatattctggttccactattgccctgaaaaccaagtatccatcagatggcatttaattgatgcctgtgattgtggtgtgtatgatagcaagagcttgggctttagagtaaggagactttggataagtggcttcacttcctcaagcctcagtttctttgtctgtaaaatgagaataatttaatttatctacaataggacagatgtgaaactgagtgagatgaacacctggtatgttacaggtgctttgaaaatgtcagtttcatccttctttctgcaggttggcatcactgaaggagatggctcaaggactgggagtctcccagcaagttctgtgcaacttttgcaagactagctccttgctggcccccacatgccccatgctaggccccaatgttcagagctgggacttgagctcacaaaactggggagctgagacatttgttctcttggatctcactctctctgtcccttgtgcctctgtagctg

SEQ ID NO: 15460 - DNA, 42843 bp, Homo sapiens
cgcggagcagctcagtgccccccgcgccccgctccggcagctccacgctcgcgcccgccatgccggagcagttcagcgtcgccgagttcctggccgtcaccgcggaggacctcagctccccggctggggccgccgccttcgccgccaagatgccccggtaccgaggggcggcgctggcgcgggaggaggtgagggggccgaggcgggaggggtcgggggtcggcgccgggcctggccttgacctccacaggcgtgtcgcacccgagctgcgatggcccttcaccgcgccccgaaacctgccccctccctaggtctgggaggaccgagcgcatctccaacagctgcgtcctcaccgtcgaggcgggggaaggcccgagggaccgttttggggggcctcgaggtctcttcgatgacaaactccacaggtcgggggacgtaccccaagtgccccgcgtgaccgcctcatcacatatgtgtttgcctagcgccttccagcctcagtttgcgttttcatcttcggagccccacaagtgtgccccccgagtcactccccttctgagaggcaggcttcccgcctcagtcctgaactttcttccccccggctgcagagaggccccctcccgcttgcggctggttcggagatttggcccgcgtttgtggaatgaatgcggatgggaaggcgccaggagccggggttcaccttggccgggctgttggcaagtttatcgtctcctctcccctcccctctcctctttgtctttcccagcaaagcgtcccaggccttttctttcggtcttgcaggctgccccaccccattcccatgctcttcggagttccttccattcctcttctctgaacctgctgcagctttccgcagctcctctgcaaagaatattctaggacagacaccccgtggccttggtccaacggagaataatgtgtttttgcagctccccatccaaaggatgccctcaatttgggtggcattttggacctcagcaacggctctagccttccacccttcaccttaagtgtactaggcacccactgcgtggcagatacaaagctcagtagttcataacaccctgcgccagtgtcaggaaatctgtcctcttctctcttgtcagggtgaccctccatctcggagtctgtttgtatcactttgtaagggtgatagaggattgtggaaggagcatcgactttggggaaggcagaccttttttctttccttttttttttttgagacggagtctcgctgtgtcgcccaggctggagtgcagtgacgcgatcttggctcaatgcaaactccgcctcccaggttcacaccattctcctgcctcagcctcccgagtagctgggactacaggctcccgccactacgcctggctaattttttttttgtatttttagtagagacggggtttcaccgtgttagccaggatggtctcgatctcctgacctcatgatccgcccgtctcggcctcccaaagtgctgggattacaggcgtgagccaccgcgccggccaaggcagaccttttttcaaacgctggctctgcagtttgccatttgggtgaacgtgggcatgtgacctgtcctgtcatctgtggaatgggggtaataatgtgtacctcacatgagacaatgcatataaagcatgcatcttttttttggagacagagtcttgctctgtctcccaggctggagtacagtggtgcgatctcagctgactgcaatctctgcctcccgggttcaagcaattctcattcctcagcctcccaagcagctggaattacaggcatgctccaccacacccggctaatatttgtatttttagtagagacagggtttcaccatgttggtcaggctgttcttgaactcctgagctcaggcagtctatccgccttggcctctcaaagtactaggattataggtgtgagccgctgcactggcccatgcctcttgataaatggaatgattatcgtcagattaatcggcagatctctttagacagtgattgggtctcttttgtcttcatttgtctcacagagcctcaccttgtctcatttgtctcacggagcctagcctactactttgcacatagtaggggtacatgttttattaaaataagaagcagccggtcagatttggcttccttccttgggcagagtccactgcctgtggatgtgggttatattttactgtggggctcacagggaaacactgctgtccagcccatcctttggagagcttcctgagatttgtcttcatagcctcacatttcatgacccagaatagctcagtgccatccacattcttagggatttcatggttcatcctcctccccaggttgttcattagaatcttagagcaggagaaggggctccaatatgaaccttatccatggacagaaatgcccatttatgcccatacatctggccttgcctggctgtgtaagtgtaagcactgtgtgttgggggagggacccttagaatgggtctggaggccacagcaggctctgttcagggctcagctttgccccagttcaggcaagacaaaacccatcctcctttgccttcagatttttggtttggtgcacgtagaggttcattgttacaacagaaaggcttgcggcacccaaacacagcttttctcttcagcatctcagggcccaaaaagttagagtctgaactttggattagacttccctgaggtttcctgtttggttttgcatttgcatttatattttgcgattatattgtgtttacatatagtttgatgctgcaattttttcccccagttctgggcttgactaacccacccccaggcttgtagctctatttgactgaatcaaaatgcaactgattcttaagtcaagtcttccagttctgactggtttcctgggagtaactagggaccctgtcctgggactcgcagcccttttgtacagtcctgctgggaaggaccctgggcagatcacaggaaactagaatgtcagggctgagggacccttttaagatagagaccagctagaaactctctcagataagatggagtaactgatgtccagagaggccaagagacttggccaagctcctgcggctggatagtgggaaagttagcatttctacccacgtgttctacccccggtcctgttctctttccttttaaagtccatctgtctgtcctccctacgtaacttctctgaaccttgttattttatccttaaaatggatctcttaatcactccctgcttaccttactgggttgttaaagttttttgtgttcaattatgaagcaccatgcaaatgtgagggagtatattaagatagtcattacgtcaaccagcctcttcctgtcttgggcccctttatgcccatcatctcattgatattcacaacaacaggtgaaaccgggcctagggcagtggaggcagctgccctgtgtcacacagtgggtctctctgactctgctgtgctctgcctgggctctgtccagctctctgtgccatctctatggacataaaggacactaaggacataaagatgctactttgatttgctgactgactagggagaagtagcctgttacagggagatcagtaagaaccccaggagtttgtcctgagtccccagagaaaggtacagtcaatgccataagaggcaagtggagcaggagagggagagagcagtaaggactggtgcaatgagggagaagttcctggaggaggtgacacttccaggtggaaggatagatgaaccccatttatcggagaggacaagggagtgaattcagagactggtgggaagagagcatattgggaaccaagtaagccattttgaccagagctaagaattcatactatattgtgtgcctcaaactgctagtggacacaccccctccagtaggtctcagatgaagcagtctgccacaaataggagatcttcaaaggcttgttttgtatatatttttgaaattttaaaagaaagttttaattggacaagtggcataatttattattattttattttttgagacagggtctcactctgtcacccaggctagagtacagtggcacaatcatggctcaccacagcctcaacctcctgggctcaggtgattttcccacctcagcctcctgagtagctaggattactggcgccggcttaatttttgtattttttgtagggttggggtttcactatgttgcccggctggtcttgaactcctgggctcaagtgatctgcccacctcagcctccaaaaatgttaggattacaggcgtgagccactatgctcggccagggcataatttgtaataagtaatttaaaacataacagaaaaggcctatgaacaactatctcaatccctgtattctccccagaggtaattgctatggaaatgtacatgcttcccaatgtatctcctcatggaaaatatattatcagtgggggaatgggagtggctgggggaatgtttacctaaattggtatcaggtcttataatgcacagtttaaattgttttggagttacatttttcttttcctttgtgacttttgcttttttgaatcttgttttagaaaggatttccttcttaatttttaatattcttgtgaattttacagtttgctttgtaaaatgtattttagtgtaaaaattgtgtaatcttagagattgtttgcaagaaacataaaccctgtcaagcttgtttctgttggagggaaatttgtttgtttgttttttgatcgtcagagaagaatattgagggaaattggctttaaagaattagaggtgcctcatgagactgaagagccggaggtaaaagtacacctctccagggcctggaactggaggctgggaagttgtcaggaactaaggcagctgcttcgtcattcttgttctctcctgcctctgcttccctctgcacatctgatcagtgctttcgctcattcatcatcacataggccccaaagcacagcccccatgctcacatgacctcactgggccagtgtctaaaggtaaccggacactagattgagccagtctcatgtcccacttccaagttcctggcagaggttgacagcccggcccagtttctggattgggtccagtggctgggtctccacccctggtttcatcagcagaggtcatggagggaaagtgaccggcagggtaaacatggccattgagacctatggtgtgggagggggcgcttctcagagaagaggggcagggcctggaaaatcccctcagaagtatctatggcgattcctctttatttcacacagtccaggttccagggagaggtgctgtgtccatcctgttctgtacctccctggtttagatcatttatgcatactctcaggtatagaagaacccctttagaaaactcaggtataggagttttttcattttttattttttattttttttttgagacagagtctcactctgtcatgcaggctggagtgcagtggcacgatctcagctcactgtgacctccacctcccaggttcacgccattcttctgcctcaacttcccgagtagctgggactacaggtgcccaccaccacgcccggataattttttgtatttctagtagagacagggtttcaccgtgttagccaggatggtcttgttctcctgacctcgtgatccacccgcctcgtcctctcaaagtgctggcattacaggcatgagccactgcacctggctggagtttttttttaagatagagtttcactcttgtcacccaggctggagtgcaacggcacgatctgggctcactgcaacctccacttcccaggttcaagcgattctcctgcctcagcctcccgagtagctgggattacaggcgcccgccaccatgcctggctaatttttgtattttcagtagagatggggttttgccatgttggccaggcttgtctcaaactcctgacctcaggtgatccacccacctcggcttcccaaagtgctgggattacaggcgtgagccactgtgcccagcagtttaaaagatttaaaagatgagattagaatgctaagggggtgcagcaagacttggagggttttgaatgccaattgagcattctgactttttgttgggcggtgtggaccagtggacccaatcatgttgctcaaggaatggatggggttggccctgccagcatagtgcctgggggactgctccatgccaggccctgtatgaggcactgggcagatgcatcgctcagttagagatgcagtccctgccctgtggaccttacagtcttctggcaaagcccaacagtaagcaggtaaacaaataagtcacagccgggtgcagtggcttatgcctgaatgccagcactttgggaggccgaggtgagaggatcacttgagcccaggagattgaggctgcagtgaactccgatggtgccactgcatgctagcctaggtgatagagcaagaccctgtctccaaaacaaaacaaaacaaacagaaagaacaaataagtcagaagttgctcattgtactaagtggcacgaagactcatcctcctcgtcaaggccttctttgaggtttgttctgggtcctcatctcttcagggaatcttgtccacacgtgtggccttagttacctcccatctccaggtgactcacacatttgtacctgtagcctagatcctcatgtcccagtgcatacttgaccacactcctaacttccctcaggctcccttccagagctgttttcacaatgagtggtgcgacctctcacctccacgtgtgcccctcatcaccaaggaacatcttcttttttttttttttttttttttgagatggagtctcactctgttgctcaggctggagtgcagtggcgtgatctcggctcactgcaacctctgtctcctgggttcaagtgattctcctgcctcagcctccccaaggcagatggatcactggaggtcaggagttcgagaccagcctggccaacgtggcgaaaccctgtctctcctaaaaatacaaaaattagctgggtatggtggcacgtgcctgtaatcccagctacttgggaggctgaggcacgagaattgcttgaacccgggaggtggaggttgcagtgagcccaggtcacgccattgtactccagcctgggcgacagagcaagactctgtcccccgacaaaatattattttattaagatctaatttgtcaatagattttgacttctatgagaatagaaactaatctcactgttgtgtccctagtatttaccatagaaccatagtgtgttttcagaaaatgttggttgaataacaaataaatgaaagaaaaaaaaaaactaaaaaggagcattcatagagaataatggtatgggggtgctccagatggaggggacctcttaggcaaaggtcctgaggcagtaaagaagctgaaatatatgtgaccctgaaagggggcccaaggggcaaaagcactgagatgggcaaagggaagagtggcacctgctgagtttgggtggtggtggcaaggccatattcaagtttgatggccctggtagtgagtttaagttttatttagtacacaggcaagcagcataatccagtttgtattttagaaagatcatatcagttgctgtatggaaactagattggaagggccaggagaggacccaaggaggccattctgttatttagggaagagatgatggtggtgtggatcgggttgtggttggtggaggaggagagaagtgcacagattgtagaagtgttttataagcagtcaagatttgtcgatggagtacatgtgggcagtgctcaagattgtgtcccacatttctttttttcttttttttttttgtttgattgggatggagtctcactgtattgcccaggctggagttcagtggcaccatctcggcttactgcaacctccacctcccgggttcaagcgattctcctgcctcagcctcccaagtacctggggctacaggcgcccgctaccacacccagctaatttttgtatttttaatagacatgaggtttcaccatgttggccaggctgttctcaaactcctgacctcaaatgatctgcccgcctcagcctcccaaagtgctgagattacaagtgtgagccactgtgcccggccttaaatttctgatggaagggtgccatataccgagaaggggaaatctggcaggggaacaggtttggggagaaatcaagaattctatttttttttttaattttttgttttttagagacagggtctccttcttttgcccaggctggaatgcagtggtgcagtcatagctcaccacagccttgaattcctgggcttaagcaatcctcgtgcttccacaggcacatgccaccacatccatgctaatttgtttcttctcttggtaaagatgaggtctcgctgtgttgcctaggctggtttcaaactcttgggcttaagtgatcctcttgccttggcctcccaaaatgttagggttacaagcatgagccacttgtgcctggccaagaattctatctgtatatctttataggtcttgagacatccaagtggagatgtcaagaaggcagtatgtgagtttggaattcaaaggagcgggctggagatacacatttgagagctgttagcatcgagaccgtgggtttcaaacctgcatctgtgtcagaatcacttggcgtcattcccagagagtatgattcagtggtggtatcttaggctttttatggcaagcaagagaaaccatcctgagctgatttaagcagaaaagggctgcactgaaagggaatgttcagtagttcacagaatttctgggaagttggaaaactggggctgggcagcaggcaggatctcagccaaaatcatgccaccgagccagtttggcaggacactgctgccacacactaaatgccatcgctgtgtcactgttccctgaacactagacaccattgctgtggttgccaccagcattggaatggatcttccactgtgctcctgattcaaagtctgtagtgagggcttctgattggttgagcttaggtgtaagggaggctggaaaagcaagaatttgttgttttcagctttcacaggaggtgaactctgccaagacctgtgcagtgaggaagtccccagacataggaaggaggtcagatgccagactggcacacaatgacagatgtacttgacagcaagtttgccagcttgtgggattgtctgggaatctgcatttaaaccagcaccctggaaattcccatgcaggtgctgcctgaaccacatttgcatccattgcttgaactggtacttaaagctgtgggggctgggcgcggtggcccacacccgtaatcccagcactttgggaggctgaggcagggggaccacttgaggtcaggagtttgagaccagcctggccaacatggcgaaaccccgtctcactaaaaatgcaaaaaattagccgggcgtggtggcacgcacctgtagtcccagctattcggaggctgaggcaggagaatcgcttgaacccgggaggtggaggttgcagtgagccgagattgcgccactgcactccagcctgggtgaaagggcaagactatgtctcaaaaaaataaaaataaataaataaataaagctgtggaatggacaagatcacctagagagaggaacgaagaaggcccagacccaagccctggggaccctcggtatcaagagattgggataggaagaggaattaataaaggagaccaagaacgggctgtcagtggggaaggaaggaaataagacagtgttgtgcctcagaagccaggagagaagtgttccgaggagaaggggtgctcggctctgttagatgctgcccagatgcccagaggtaaaataagacaatgacagagacacagcctctggctttggcaacacggaggtcattgggaaccttaagagcagatttatggctcacgcctgtaatcccagcagtttgggggactaaggcgggtggatcacctgaggtcaggagttcgagaccagcctggccaacatggcaaaaccccatctctactaaaaatacaaaaattagccagccatggtggcaggcacctgtaatcccagctactcaggaggctgaggcaggagaattgcttgaacccgggaggtggatgtttcagtgagccgagattgtgccactgcagacacagcaaggctccatctcaaaaaaaaaaaaaaaaaaaaaaaagagcagatttaatgccattttcgcctccacaccatcctggactgatttgaggagggggcagatgagaagttctccctagaaggggagcagagacatagggtgtggctagggccctgggatcagcagggttttctaggatggactggggacccaactccactgaaccagcctcctccctaccaacagcctctgcacagggggccgagggtcttcccagagttgtcaaccttgagcctgtctctcaaagtctccttctctccccaaatttgtctttttttgtgctcacttccttgcctagtgttcagctgtttctggccactgaggtacaaggagacagatgactcaggcagatttggaggcagaaactgtaactttaggtcagagcagaaggaacatgctttccctgaaggcaatttgatcatatcattctcagacaagatgctgctagaaggtcccttcgatgggcctagaacttgggcccagggcagatgagggagtgagacccacaggggaacagtgagtggcttctgtgactctaggtcagggccctggaaaaactgattccacctcaccaacgtcacaggaggtgctttggagggcatgggaggctgagctgggaacagctgctgaaggttctctaacttgactggttttagaccttgaaagagcttttaagaatctcagctgctgcgggctacacccagacccactgaatcagaatctcccaggggcgaggcctgggcaagtgtgcagttcagaagttcccaggtaactgatgagcagttggggtgaaaactattgtggtaagctattgcatgcccactgaaggttagtaatccattaagccatatttactgaatgcctgtggtgtacaaaggcaggctctgagggcacggagagaactagacaaggtctccttctgggtgggaggactctgccagtgaaaagttgattgacaacctgtagcatacagggatgtggctgaggtctgtggcgagagtccagtaactaaagtcagacagacttgggtttgaattcctattggctgtgtgactttgggcaaatgacttaacctttctgaatctcagttttctgatctgtgaattagggatgaagataattgtcttatgggtttgtttgaggggataacacatagaaaatctagcaagcatgaacctagcacgtaacaggtacttagtaattttttaaaattccctcttactgtaaacacaagtacacctgcacatagggtagttaaaaagatcaggaaacatacagagaaaagaggaaagtaattgcaatagggatgaggtaattaccatgagtgagtgttgagattatctgtgcggtcctggcaccagagcaaaaagagaaaccttatgtaccttggaggttttggggaatgaacagctaagcctgattttggacaaggcagggtcttccctcagctctgccctttgctctctgcctcctgttcatttctttgtcaaacatttgctgaggccagtgtggtggctcatacccgtaatcccagcactgtgggacgccaaggtgggaggatcacttgaagccaggagtttgagaccaccctggtctcaaacaacaaagcaagaccctgtctctacgaaaacaaaacaaaacatttgctgagaggctacctagcagttctcagtcctggctgcaccctacaatcccttaggttgcttttaggtagatttcctctcattcaggtaaaattcacataacataaaactcaccattttaaaatgtacaattcagtggccttaagtatattcacagtgttgtgtagtcatcaccactatgtaattccagaacatttccatcatcccaaaaagaaaccctgtattgattagtagttactctccactccttttccccggcccccgacaactttccatctctatggctttacctattctggacagttcatgtgaatgaaatcctactatatgtggccttttttgtctgatctctttcagttgcacagtgttttcaaggttcatccgtgttgtctgggttgtgttaaaaagcaataaaaataggaaaaacaaacacaccaggcagtgttgtaagcacttttcagatattagcacatcataacacagggcctgtccagttatttggatacagagaaggtgtctgctgggcaggaatagctaccatgaagccctttctgtgtgtattatgctgggccacgtgcttaaatgcctgactgagttcagtctgattagatagatgctgttattatgccatttgacagatggggaacatctatcagagaagctgtgtcacttgcctcaggtcacacagctaagaggactggaaccagaatttggactttaggacagtatgacttgaaagccggagtccttaacccttgctgtcttttctatattgccactgggccttgctagtatgtattcatacatttaatcattcattcattccacacatgcttattaacacccacatcctgagttttgtgttgagtgctgcagatacaaaggtaaatgagccattccctgcctttctggagttttcagccccgtagagatcagacatgtatggcaaataagggccaggatactctaatgaaagcctgtagtgggcataggatggaataaaggtaggcaggatcagttctgttgtggtggggagggggtgacctgtaagttgagtcgggaaagatgaagtgtttactagacagaatggggcaagggccctccaggcagagggagcagcatgagcaaaggtctgatggctggaaacagtttggcatatttaggaaattgccaagagttcaatagggatggttttaagggaccagtgatggatagcaagcccaagtggggggcagggagggattcatcctggccaacaagggaacccagaaggtgggaagtactgtttgctgctctgtccaagagggcaggccaggttcttccccaggattgggtggaattcagggcttgaggccaggggtcgggtaggaggaaccttccgcggttagtccagcaaagttcttgttctcttagctcatcaccgccaagcaatctcctgaggaaaatcccagccaggaaacttggggtttgcagaggcctcagcatacatcgagggtgtggctcccttcttgcaacccctcttcctccctgcttcccaccaccccacaagggacagccggtaaggctgagctggtgaggctggacaagtgcccaggctgggaagacgtctgcagaggcctgaccaaggggcgcacggccagtcacaggccccagcagtgcaggaaggaaaacagcaagaggccaggggatcctgaaataataaatgtcagagcatacaggagccttccctgtcaccacccaaacccttcattccagaagaggagtcagaggctcagggtgggaaggagactggccaggtcacaccgcgagacaggggcagggctggggctggccctgggtcctggctcccaggccttgcagtgtagccaccgtaggggctgtggggtggcaagcagggccaagggccaccttggtatggatgaggcagaggggtagctgggaagagcactgccctcctctggcacccccttctgccccagcctggactctcaggtgctgggggtgggggctgatccagaggaaaaccatttggagtctttggctcactcttgctggtggctgaggttggagcagccttgtagggtatgactaacctcaactgtgtcctagcgctttggcctggaaggggatttagagctcgtgtctgttagctcaaaattggacagatgaggaaactgaggcatagaaggaggaaggaactcgctcagaggcacactgagggcttaatggcagagacagccctaaaattcagcactttccagttcagggctcttggtctcatggccttgttctatatgcagtagaaggccattctctcagaatgtttctgcagcacctctgaagatgcctggcttccaccattagaaaaaacattacctcaatttcttttcacagcaatccttacagagataactggggctcagagagagaagatttagctcgtagtttgctttagtgtgatagcaagaaagggctctggaggcagaggtctctgcgtttcttagaacttcctacatgaccttgagcaaactgcctaacctaccccagcctcagtttcttcatctgtaagatggggaggataataactacctcacagagttgttgggaggaataggccaggtaacaaacataaaatgcctgccccaaagtgagcagtcagttagtggggcgataggtagttgaattcatgctaataatagactcaagctgggagcttggaatgggagtccttcctgttgggtgatctgctccgggccagggcctggctgtgttcctatcaccctgtcatgcctgggggacaaggctgaaccctctttgtcccgcttgaacatggatctgcagcccagccctggagttaaactttctatgttgagaattaccaagtaactgccctgttcagaacccttcaggagcaccccatcacttatagaataaaacctagaggtttggttaaaagcatggactctggagcccaactgcctgggtttgagtttattttatttattattattgttattattatttttgagatagggtctcgctctgttgctcaggctggagtgcagtggtgcaatcagagctcactgcagccttggactcctgggctcaagtgataccctaccttagcttcccaagtggctgggactacaggtgtgtgccaccatgcctggaaaattgttttgtattttttgtagagacagggtttcgccatgttgcccaggctggtctcaaacttctgggctcaagcaatccacccacttgggcctcccaaagtgctgggattacaggcaggagccacaacacctgacctgcattttctgtaaattggtaattggatctagaagtgagaagccctgggttttttttgtttttttttttgtactttatcattttgttaaatattttaagtgtaacttggtttgctcattcaggtattgtactttttttttttttttttttttgagatggagtctcactctgtcacccaggctggagtgcagtggtgtgatctcggctcactacaacccccacctcctggattcaagtgattcgcctcagcctcccaagtagctgggactacaaaaattagccaccacacccggctaatttttgtatttttagtagagatagggtttcaccctatctcaactaaaggatggtctcaaactcctgacctcgtgatcctcccacctcagcctcccaaagtgctgggattacaggcgtgagccaccgcaccctgccaaacgttgtatttttagcatcatgtttaatatgtagtacatataatttaatcatctttgtggacactggcgtcagagaccaaagagccaggattcagccatcccacaggaaaactcctttttagcgttggagtttcattgatcttcccacatcacgtatactgttagtattgattgattgaaaaatatgggaaagaacaaatgaattcaagaatgcttttaaagggttctgtgtcttattgatcatagagttgcacatatttggaatgtggtcagactaatttgtgaaacatttttatactcgtcagtagtgctcatgatgagtgtggcttcacagtgtcctgctagtaacaccatggaccttcagggtctgggtccattgcctggaaatgaacaagggagttagagtcttaacggtttagttcccaggtccacattttggctgtgtgagctcaggcaatgatcttcactgttctgtgcctcgctgactcatcagccagatgggaacaaaaatgatgactgccccattaagatgctgtgtgtctgaaatggtgggtgtcaaactcccttacaaactgtaaagctctatacaagttttaggttgtattttttttttctttttctttttttttttttttttgagacggagtctcactctgtcacccaggctagagtgcagtggcgtgatctcggctcactgcaacctctgcctcccgggttcaagcagttctctgcctcagcctcctgagtagccgggactacaggcacctgccaccacacccagctaattttttttgtatttttagtagagacggagtttcaccctcttgaccagggtggtcttgaactcctgacctcgtgatccacctccctctgcctcccaaagtgctgggattacaggcgtgagccaccacgccgacctagtttgtatttgtttcttagtttgtttgcatttccagtgaaacctggggcaagaaactcacctgagcctttattttgcagtctgtaaaatgaggaggtaatgttagataatctctaatattctgtgacttcgtctcttaaggaacaacaccatagtccaaagcaaagatagaaaatgtttttcatctcctctgccaactctagtttaattggtagaggctaccatcatatcttaacagaatgatgaaccaaatccacagtcagtggggaaaacactgtgatcgattaataatggctataatgggccaggcgtggtggctcacgcctgtagtcccagctacttgggaggctgaggcaggagaatggcatgaacccaggaggtggagcttgcagtgagccgagatcacgccactgcacttcagcacttcagcctaggcaacagagcaagactccatttcaaaaatagtaataataataataataataataataataatggctgtaatgggccgggtgaggtggctcacgcctgtagtcctagcactttgggaggctgaggcgggcggattacctgaggtcaggagttcaagaccagcctggccaacatggtgaaacccctgtctctactacagaaaattagccaggtgcagtggcgcatgcctgtaatcccagctactctggaggctgaggcaggataattgcttgaacctgggaggcggaggttgcggtgaactgagatcacaccactgcactccagcctgggctacagagcgagatttcatctcaaaataataataataataataatggctgtaatggtcatgggatgacacagaagtgataactatgtactatattataatggtccaaaggaatgaatgtctaatggtgaaatgtaatctgtatctcccaaggccttagctctagcagctctgcccccttggcttgagttgccttggtaaccacagctggctctgagaaaccatgggaatgaagaatgggtcctattgatgaatcctgacccagaagggggcatgcagaaggcccttctaggcagggcagctgggcatggcctagtgctgccatctgtggtcttttgcctgcagagaacacaaaccagagagccagagcatggtgtgtgtgtatgttgggatcagggtaggggacacaaagggcagtgccagcagctggaatttaggccttgtttagggccagccagggtaggctgcccaaaggactccagtgggctttccaagctcagacgtgtctcttacactaagatgtgtttcagccacctttgcccagtgcctgccaggctcttgcatggatccattgactcttagctttgaatgaaatctaaatagctgtccattctaatccaaaatccagtgtctgaatcactctctagcacctaaagtatttgaatacttcaagtgacagggagctcactgccttcaggggtggcctgttcttccttagaaatgtcccctgtttgagctgaagtctgtttctgcctccctaacttccacctctcagtcctgggaatcctctctgaggccagcctgaacaaatccgttttcttttcagtaggacatcctttacagtgtttgtattcggggcctcaccattgctgtcaaccttgttttccttggacagatctccctctgtgccctgccttctccctttcctaagcctgaggggatggtgagggaatatggtagaggtggtagaattgggatttaggtttggaggcagatccagtcccaagatcaaataagctgtgccccctaactttgtggggcagcttagagatggggaaagaacattggccctggatttggctagtcctggatttaaattgtaactctgggccaggtgcagtggctcatgtctgtaatcccagcactttgggaggccgaggtgggcagatcatctgaggtcgggagttcgagaccagcctggtcaagatggcgaaaccctgtctctactaaaaatacaaaaattagctgggcatggtggcacacgcctgtaaacccagctactcaggaggctgaggcaggaggatcgcttgaacccaggaggcagaggtggcagtgagctgagattgtgtgtctgcactctagcctgggcgagagtgagagtctatcccccccccaaaaaaaaagaaagaaaaaaaagaaaaaaagttacagctctgccactgttcatcactgtgtgacttggacatgttcctcctcctgacagcttcatctttaaaatgggaatggcaatgccttcctcaaagagtggccaggatagtgacaagtaatgaggctgcacagagcaggcacttgggacatgctgcttgcactctccctgcccggcggcagaggtctgctgtggtccctctccacctgtgcttccccacagcttgctgacgaggatcaacatggagttgggggtgtggggagatatgtttaattaattcaatgaaagttgagaaattcctaaaccaaattcaatttaattttgaagtagataacatttttagttatcaaatagtggacagtattctaagcactttacctatagaatttacttaatctccccagtaaccttatgtggtacgcaatattatcatcttcattttatgaatggggaaattgagggactgagagatcacatcaggtacctggtggagctggaattcaaatccaggtagtttggggacagccccatacttttagcaatgatgatgtactgcatctctgaagagaattagaacagtaattcccaaactttagcatgcattagaatcacctggagggcttgttaaaccacagattgctggacctcacccccagattttctgattcagctggagaatttgcttttctaacaagttcctggatgatgcctgctgctggttgagggcccccaccttgagaatctctgactatcagggattaaatgggcccacctgaacccagaagctgatttttttttttttttttttttttttttttttttttaagacagtgtctcattctgtcactcaggctggagtgcagtggcatgattatagcttactgcaacctcgaactcctgggctcaagggctcctctcatcccagcctcccaaatagctgggactacaggtgtgtgtcacagcacttggctaacttttttaaaaaattttttgtaatggtcgggtgcagtgcctcatgcctgtaatcccagcactttgggaggccaagacaggaggatcagttgaggtcaggagtttgaaaccagcttggccaacatggcgaaaccccatctctactaaaaatacaaaaattagccgggcatggtggcgggcacctgtagtcccaactacttaggagcctgaggcaggagaatcgattgaacctgggaagtggaggttgcagtgagccgagatcacaccactgcactccaacctgggcaacagagagagactgtgtctcaaaaaaaaaaattttttttttttttggtatagatcggggtgggggtctcactttgttgccgaggctggtcttgaactcctgggctcaagcgatcctctcaccttggcctcccaaagtgctgggatgataggagggagccgccacacctggcttttccttcatctatccagtttcatgggaaacgagggctgatctcacacagaggcagaaaacaaaccacagtaagaaccatactcatgttttccaaatgcctcaagccttgccatgtttgtgatctcattaagcctcacagtaattctgtgagttaagcagagaatggatttttctgcctgtaatcccagcactttgggaggccgaggcaggcggatcacgaggtcaggagtttgagaccagcctggccaacatggtgaaaccccgtctctactaaagataaaaattagccaggcatggtggcgggcacctgtaatcctagctactcgggaggctgaggcaggagaatcatttgaacctgggagacggaggttgcagtgagccgagattgtgccattgcactccaggctgggcaacagggcgagattccatctcaaaaataaaaaaataaaaaaataaaaatctattttaaaggagaggaagtttagaaaactagctgggctagtatcacccaaggagataattttggagatgctggggctagaatcttagttactgactcatcatagcactctggaaacctctgcctttcctcaaaataccttcctttccccaggctactatcagaatcgtctccttaaaactaaatttttttatgagtgtgtggatgagtggattaaaaaaaaaaacctgcatttctttagcttaaatctttgagccctattataccacaggataggtgttatcaaccagtgtaaatgattttcagatattttcttgagaaaggagtaattagaacttttcccttttcatgctccctatgggcacttgcatgttcttaagtctgtggttctcttgaaggaaggggccatgtcttatgtgtccccaccatctggcaccatgcctggctgaaacagtcaccaagaaatgcttgttgaaatgaatgaatgaatggaggaactatgttcctgtccttgtccattcttcccagagcacgcctcccttcctggcagtcctaccattttttaccaagcattccctcccctctacctcatagtgtagtctctttagtctcttttctgcctgtccaggggccagagttaagcaacacagcttaagggacgccttccccattccttcaaagcagacatggctctgttttccctggactcccaggaaccttccatcatagccctcatcacattgcatgataagtgtctgcttataatggctttttcttcccttcaatgatgatgtccttgagagctgagattgtgtcttttttgtttgttttttgagacggagtctcacactgccctcctggctggggtgcaatggcgtgatctcagctcactgcagcctccgcctcccaggttcaagcgattctcctgcctccgcctccctagtagctgggactacaggcacatgccaccatgcccggctaattttttgtatttttagtagagacgtgttagccaggatggtctcgatcttgacttcgtgatctgccagcctcagcctcccaaagtgctgggattacaggtgtgagccactgtgcccggctgagattgtgtcttttttacacagggtgtagtgggcactcaataactaattgaatgaataaacagccatgtgaacttggctgccaagagcagtagggacgggaatggtatctggctgggaagctgtttcctgatagatgtctgacaagggcatcgaaaaacagtttgtggccgggcgcggtggctcacgcctgtaatcccagcactttgggaggccgaggcaggcggatcatgaggtcaggagatcgagaccatcctggctaacacggtgaaaccccgtctctactaaaaaatacaaaaaattagccgggcgtggtggcgggcgcctatagtcccagctactcgggaggctgagtcaggagaatggcgtgaacccgggaggcagagcttgcagtgagccgagattgtgccactgcactccagcctgggctacaaagcgagactccatctcaaaaaaaaaaaaagaaaagaaaaacagtctgtgagtgattcgggtgacttgtctccctttaccagttagagctagtttcagccacaagtggcagaatacccagtataacagtggctcaaataagagatttctctttcatattaaagaattccacagataagtagactggggctgctagggtagtttcctaatcactagggacaaggctgatatcttgttgctccgccatccataacaaatggcttctacttcatggtccaggattgctgcctgagctctagacatcgccagcacattgtagccagaagaaaggggtgacagagggtacccttgcattccccttttttcttttgttttttttttttgtgggggggtgcgtttgagacagggtcttgctctgttgcccaggctggagtgcagtggcacgatcacagctcactatagcctcaactccctggggtcaaacagtcctcccacctcagcctcctgagtagctggaattataggcccatgccccatgcctggtttttaattttttgtagagacagactctcactatgttgcccaggctggcctcgaactaggctcaagcaatcctcccgccccagcttcccaaagtgtgagattacagccgtgagccaccccaccccaggccctttttttctaaattaaaaaaaatcgactttattttttagagcagttttaggttcacagcaaaattgggcaggaagtacatagagttaccatatacacacagcctccccctctgtcaacagctcttaccagagtggtacatttgtttcaatgaccatacattgacacatcatcaccaaaagtccatagtttacattagggttcactcttagtgttgtacattctgtgggattggacaagtgtataattccatgtatccaccattatagcatcatacagaaatgtttccctgccctaaaaaccctctgtgcttcacctgttcctcctcactacccccatccctggccaccactgatctttttactgtctccatagttttgccttttccagaatatcgtatagttgaaatcatgtagtagccttttcaaattggcttctttcacttagtgatgtgcatgtaactttcctctgcatcttttcatggtttgatagctcatttcttttcagtgatgaataatatttcactctctggatgcatgacaatttctttatccattcacctactgaaggacatcttggttgtttccaaattttggtaattatgaataaagctgatgtaaacatccgtgtgcaggtatgtatacgttttcaactcattgagaaaatatgaaggagtatgattgctgactcatttggcaagagtacgtttagttaagaaactgtcaaactgtcttccgaagtggctgtaccattttgcattcccaccaacaatgggagtttctgttgctccacatctttgtcagtatttgtgttttggggttatttatttatttatttgtgtgtgtgtgtgtttttgtttggttttttttttttttttttttgagatggagtctcactctgtcacctgggctggagtgcagtggcactgtctcagctcactgcaacctccgcctcctaggttcaaatgattctcctgccttagcctcccgagtagctgggactacagcggtgtgccaccacgcctggctaatttttgtatttttagtagagacagggtttcaccatgtttgccaggctggtcttgaactcctggcctcaagtgatccaccagcctcagcctcccaaagtgctgggattataggcgtgaaccaccgtgcccggcctccctttgccagtatttggtgttgtcagtgttttggattttggccattctaacaggtgtgtagtccctcccttcctttttatttttcaattttttaaagccactttattgaggtaggattgacatgtaaaaagctatacatagtcagtgtatacaacttgatgagtttgggggttatctcccttctttgtaagatactttttggaagttaacaattaaaatattatattccatggccaggacttagtcccatgaccacagttagctgcaaggtaggaaatgtagtctttattctaggtcgccaagtggccatctgaaaagtcaggtttcttgtgaaggaagaagagagaatggacactgggagccacccagtgatctctgccacactgcagggaagggaaatcttctcaaacttgcttaaaggaacttcgttgggtggattcaggggtatttcatggaatttcaccaaagacataatgtgtggaggttgcctctgaagaggtagcatctggaaagttgccagaaaccagcaccactcttcctcttctgccttgctgtggcggtgtggggcttgttcatgtctttctacacatctgctctgttcttttctctctgcatgtggcaggaaggacatcccagctttagcatttcagtcagtcaactagctttccagagcccaattccaaagtccttggagagagaatctgattggtccagcttgggtcaggtgggagagagaatctgattggtttagcttgaaccaggtgtctgtcgactctggctagaacaaacaaggctgcaggggcccacctccagaggaagggagggcagttttcagaaaatgggtgtcatgggatgggaagactcctcagaatgtatctagagcatgaacatactcctctcaggtccatgtcccaggactttgcaaaccatcattcatttaggtaaacatttattgggcaccttctgtgtgctaggtacatggatctgccctctagggattttggaaatttttttggaaattgttcatatcttttttttttttttttttttttgagatggagtctcgctcccattgtgcaggctggagtgcagtggtaccatctcagctcactgcaacctccacctctcgggttcaagagattctccttcctcagcctcctgagtagctgggattacaggtgtgcaccaccacgcccagctaatttttgtatttttagtagagacagtgtttcgccatgttggtcaggctggtcttgaactcctgacctcaggtgatccactgccttggcctcccagagtgctaggattacaggcgtgagccactgtgctggcccagttgttcatatctttaacctgaattgtcttttagagcgaaatcatagctccttaaattactcaccttttagctttccaggtttcaagatggggatcaagggatttggtaaacacatgcttctgtttccccatctggattttggggaaccatagaagtggccatgttcttgcctctttttttttttctttttctgttggccagtttagaaagaaacgttctcccctccacctctttgtctctttagtaagaaacattttggttgttttttgtttgtttgctttgctttttgagacagggctctctctgtcacccatgctggagtgcagtggcgcaatcagggctcactgcagttttgacctccccaggctcaggtgatcctcccacctcagcctcccaagtagctgggactataggtgcatgccaccacatggagatggggtttcgccaagctgtccaggctggtcttgaactccttggctcaagtgatcctcctgctttggcctccccaagtgctggaattacaggtgcaccccaccacacccagctaatttatttattttttcttttcggtagagacaaggtctcactatattgcctaggctggtcttgaactcctggcctcaagtgatcctcctgtttctgcctcccaaagtgctgggattataggcatgagccaccatgcccagcctcatgttttaaccaactcaaatatgatgccgtctccttaatcttcctgattcttttgttttctttcttcagccctgggatgggcctccacggatctcaaatatgaaagtgtctcaagttcacacccgaggaggagaatgttagatttctagcccctgtaggaaaagcacctggaacttggcagaccttcctagcatcagcagcagctgatgataacgatcacaggtgctgttcattttgaacatactccatgcctagcaccaagctaaatcctgtatttgcatcctctcatacatatagccctcataccaaccctgagaggtaggcatcgatttccccattttacacatggctaatcaggaagctcagaaagaataggcaacttgtgcccgggcacggtggctcatgcctgtaatcgcagcaccttgggaggccgaagcgggtggatcacttgaggtcaggagtttgagaccaacctggccaacacaatgaaaccccgtctctactaaaaatacaaaaaattagccaggtggtgggcacctgtaatcccagctagtcagaaggctgaggcaggagaattgcttgaacctggcaggcagaggttgcagtgagccaagattgtgcaactgcactccagcctgagcaacaagagcaaaacttggtctcaaaaaaaataggcaacttgttcaaggtcacatagcccccgagtagtggagctgagcttcgtaactagaccccccttcctccagaggcttcccacatgccaccggcctctgagaacactccacattgcctctgagttctgccctatgcatgttctcctgtgggtatcattttgaatctttggcagtaccatttccaatgtgtttactaactcttgtcatgtaactctggaaatcagactctgatcccattttatttttgtcactgggaagaacagctgggctggggtcagggtggggctgtggtacatggatggaacactgttctgttgcacccgggaagtccagctctgtggcttccccaccatgtgtctctcggtaagggcctcccatctcttggcttcagttttctcatctgtgggccccttccagctcgacattctgtgttttccaagttaactgtgcatttcgcaaggatttcatgaggttgtcaacttccatgccccactgaaagggggagtgtttcccatctaggctgagcctgcttggggcatgtgagacttgcttcttgccatcacatctctggcctttcccacattctgatgtttgttctgcagcctctgggctttggggttatctggtgttgtctctccagttctccccagtggtgatggagtgtgctcccgccaccctctgccatctccccagactcaggtaactgaatgcctccaacccctctctgctcacccatagcatcctggcctcttcctccttgtcctgacataactgtttattgagcctggggtttggtgaacaagtgtaccctgctttgtatcttaagggaagatagagatgtgtgtgttctcccctctggccttttgctcagcattttgtacatatttacaaatcattcatcttctcagcaactccacaagtcccctagtatcatccccattttgtagacaaggcactcaaggctcagagaagttaacagatttgtctaacggacacaccagctactgccagaggcaagattcaaacccaggcctggcacaccctgtcatgccacgtacctttgactcactacatttacgctgcattggattcagggagaaaagtctgtggtcttcttggagtggtgtgactggtctgtggtttctgtgtggttttttgtttggtggggtaaacaggaagaccctagggataagttccagaggacagcaaaactcaatgtatttgtttggagggcggttggggggtggaaatcatagatacagcgttcctgaaggaagcaccctattccagcttggcatccctgaacctctgtccacatttgcttccagatcttggaaggagaccaagccatcctgcagagaataaagaaggctgtgcgggcaatccatagctccggccttggtaagtgagcctcctgggtgccccgcctggtcaggaagcccctctcccagccccagcctggagctaactccaagctcccgtctgtacctccacaggccatgtggagaatgaagagcagtaccgagaggccgtggaatccttaggcaacagccacctgtcccagaacagccatgagctgtccacaggcttcctaaacttggccgtgttcacccgcgaggttgctgcgctcttcaagaacctggtgaggcccctgtctcttccttgcccagactcagggtaaatctagtggtcttaagaacctgactgggaaagggtccgtttccttccttctcccaatttgcccttgatctctgacctgagttcagacctgaggtccctttccagccctgacccttcttttggataatcctcctttctctctggcttcttacccaactaactcttctctctgttctcctccttctcttcacccaggagcagagggggtctcacagcagggaagagccccgtgcaagggagggttccctggaggagctttgggataaaggagagacaggctcgggggttcctacctttataccactactgctgccactgccaccaccaccgctgccaccgcctcctcctctcctcactccctctttgtcctctgctttcccaatccacatctgcttcgtacttaaatcccaggacctgtccctgcctccacaagcgtctcagcccctgtacatggcccagtggcctcgggttgcttcccgatggcctccttggtgactgcctcctctctggtccttcaagtcctttcctcaaggccaccctgtgacagcagctcttcccatgtgcaggcacagttctcactagttcatgtgttcactcattcgatccggatgcacagctctgtggggctggtgtgactgttgtctccaccttacaggctaggaaactaggacctcaaggttaagcagcttgcccgaggtcacacggttcggtttgaacccaggttgtctggctccagagtccaagcataagcctggctacactgcctcccaggaaagcctctcatctccctccaggctccatggcactggaccagctcttgtggctccagtcctacccagcatcctccctggttggcaggggccacatcatccttgagaggcagtgtgctcagtggttaagcacccaaccttggacctagactccagcttggaatcttcactctgctgcttactaggtcaagtcactcagtctgcccaagccccaggtctctcatctgtgaaactgggataataatgctgcctacctcacagagcggtaatgaggattaagcaagttagtgcctactttatggtaagcgctcagtaaatgttggctaatattatattaatggcaaaacagcaattacttttgcaccaacctaataaaatctatcattgttatagctcttggcatagctgtgcctcgtacactgtcctgcatgtaaaaagcctttaacagtgtttgaggctgggtgcaacatttcaaaccttaatcccagtggtttaggagcctgaggtgtgtggatcgcttgagcccagaagctctagaccagcctgggcaatgtagtgagaccctgactctacaaaagtatgaaaattgccgggtgcggtggctcacgcctgtaatcccagcactttgggaggccaaggtgggcggatcacttgaggtcagagattcgagaccagcctggccaacatggtgaaactgtctttgcgaaaaaatacaaaaattagttgggtgtggtatcaggtgcctgtaatcccagctactcaggaggctgaggcaggagaatcacttgaacccgggaggcggaggtggcagtgagctgagatcatgccactgcactccagcctgggtgacagagcgagattccatctcaaaaaaaaaaaaaaaaaaatgccaggtgtgggggcgtatgcctgtggtcccagctactcgggatgctgaagtaggaagatcagtttagcctgggggaagttgaggctgtagtgagtgtgatcacaccactgtgctccagcctgggtgacaaagcaagaccctgtctcaaaaaaaaaaatagtgtttgagttcaattgaattagtgtccttctttgtcttcacctcttctctccctgtttcagtcaaactagtgtttcctgggggtctgctgtctagtggacattgtaccaggggttggtgacacaggaaagtgtcagactgcctcagagagccacagtctagtgggggagagaaaaactagggtgtggactagtgtcaagaaataccagcagcatggcacaaactcaaggacccagcagctggtgtcagaggcctagtgctgccatggttcagaaaaggggagatcagcatagaccaggcgggaggagtagccaggagagacttcctggaggaggagagacccaagctgtaccttggaagctggttgaaatattaggcctctttaggttgcgaaatcacagaaacccaactcaaactaggttaaatttttaaaagggaattcattagcccctgtaatgagaagtccaggggcgcagctggcttaggctctatcctttcctcttaaggtagtttctctgtctctgctcagtggacaggatagcccagcaggcccagatgcccatcttaccaaaataaagatggtctttctcccacaacttaggcagaaaaatcccagcgaggattgtgattggctggcttgggtgcgtgcctgttccctatccagtccctctatcctggggctggggtgccctgctcagatctgacttctgcgtttaccccatctgaccacagaggaggagttccccacaggaaagggggttctatgaccattaataggggaggctctgaagcgttagccagcccagaacaacagacgtgcactacaggtcaacttgagagagtcagagaggagaagggaggctgctcctggcgaggaacaggggagagattgactgtgggatgctgctggagcagtgcagcgatgaggctggagccatcagggaaggggctcactctgacacacctcggcctcccctcctgccccctttcacacaggaagcctggcgggcagcaggtcagccatcctaagcagaccccagagctggatcctctagtccccccccgcaggctcagcactcctgccatgacggtcccccttacttggctgtcatctctttgataacatcttttcctctcccctacttcccttccccgctgctctctttgccaagtgatgcttcactgtacaccgaatccctaggggctggatgccggtcacctgaggcgggaatgagcgtctctgttttttccagattcagaacttgaacaacattgtctctttccccctggacagtctgatgaaggggcagctgagggacggtcgacaggtgagtctccatgctgggagtggtggtgggacagagtaaaagaggggtgggcaggagactgttggggggcagggctggactgagggtggaggccaggtgaaggggctgtcttagcgggagtgatgagcctggggaggtctggaggacctggctcgggtcagcctaggatggctgacctgctgtctgccaggccccttgtgtgaaacatgtcatgtaaatcttacaaccatcctatgaggtaggctttgtgggtacactcatccccattttgcagttgaaattcgaggccaagggagttaggtaacctgctgatggtttacataactaggaagtagagagcccatgtgggaatccagggatcctgaatcccatactcgagctgctttctctgtgcctggcagcccttggctggatgcagagtggagctcaaagaaggtgacagaataatctctctgggcaatctgccccagacggcccaggggaggagccgtgctcccccaagagggttccctccctgccctaggctgccagcgtggcaccagcctgctaaccacacaaaccagacaggcagctttttcaccttgggagtctcggggttgttcagaagggtgtgagcagcctggctggatgaggcttaggcaagctaggcagggggtagtcaggtctccctggtttgctgtatggcctggggtagacttctcaacctctctgtgcatgttccttgacctgtacccttgctctaagaggatgatctagcaccaggcaggagaaaatgctgggctaaagttaggcagggggaatttggccttcatcctcccatcctcatggtcatgactgatctctcttctgagcaagaggactcagggtagagcccaaagatctcttcacaccccaagccatggcccaccaaacctgactgattcttggcatctctggggaggagaaggtctgctgggaggagggccttagctctgagaaatggggtcagctgagcctgtttggtgggggcaggtttgcagcaggactgtgggggcaggggctggttagagaagggctctgagcagctcaggggagcacactagcaggtcctcctacaggcagcagagcatactgtttattccagtgctccagcttccctctgggcaaattgtccttttttaacccacaggattccaaaaaacagctggagaaggcatggaaggactatgaagccaaaatgtaagtggccacagccagggtcgtttgtctgggagagtagcacttaggctggatagggaagaacctaaatgctgccgagacatgtcatccagaattgggtgacatctggctctgtagaggcatttacagcagattgtttatacccagacctgactggattctggggactgggccacgagaccaccaaaggagctattgtgaagggacctcaggatgctgctctcagagtcccatctgctcagtggtgccagacatgggcagggatgggaaggagctagcactgaccaaacacctccgcgtgctggccatttaatcttcacagtcaccctgtcatgtgtgagagaggtattagtatcacaattaccacaggaggactcagagaggttaagtcacttgcccaaggccccacagcttggcagaggcagaactggggtttatgccccttgctcctcgttcctcagtgtcagttggtatatctagagaaggaaatggctttctgtgtcctgtgcacaccacacgatactccagatctctcaccagctactgggacatcatggggaaagaaggagcctcagtcaaccagtggccaattcctcctgggcagagactccttgggctctgtcttatgaggagtctgtccagatcccagcctttgccctctgcccagccaggcccatactgtagagcattgtttgtgcttttttgtaaaattttgttttctcttgcattttgccaaagcaatttatgcttattatgaataattttgaaaatatggagaagtaaaagaagaaaaaaaattaatcatccttagcagaggcttagggttatggcaggcggataatactctctgttgtttgaatttttttttttacaaggtctgggtaacattgcagttttcatcattaaaaaaaaaaggttggatggggagaaactacccaaaaataggagaaaaattcttaattttcaagcctaaaatattaacattttaacatttatttttctatgtatgaagaaatgtttttataaaaatgagatcataacaacatactgttttgtaatctgcttttttcattcaaaaaatacattgtggccatctttgtacaccattacatattcttccacatcaatcaaacgggtgtgccaaaacctgcataagccattatgtatttaatctgttcctgtcattggagaagcatccttggatttaaatatttgtccctactcataattatttttgcaggatcaatttcaagaagtagatcctggagctttttattgttccctcagctcccagagccatggcaccgctccaagtctgaggcaaggtcacatcttgtccctgcacaagcatctccagccccagctgtgggcatagatcctgtgatgaagggtgtagacactgtgtggccatccctgtggggccctatccctgcctgtgatggggcacggccatctgctctcactggaggcccagggacgggtagtgagggcacaggctgaccttgtcttcatgatttgctgtggggccacatggccctcttcttcctgagttaccttaactaagccgttagactttcggggatcgtctaccaaatagaaataataagctctactctgctgaccttcccaaagcaggtctgcttttcctaggtttctatattgagccttcctgtagcatttcatttacaggccagactccatttagttgatgggaaagggggcttggctgaggttattcggtgagttatcgataggacctggactagaacccagggcttctgagtctagtgctatttctgccatgtggtctcctggctcccaccatggagccacatagtttgagctaatgtcttggcacgggtgactgtacactccttttcatacgggctccaggtgtagccagatatgcgtgagccgtaagttcctatgtaatttcaccacattcctaccaaacaagtctgagccccagctggaagggcccagggccctgatagcatctgtcaaataccactgggagcttcacccctggctgttcatataggaggaggattacctctccacgtggggctgctgagaaaggcatcccgggccctgtacagaggccaaatttatctaggcagttccatgtacaggtctgtttcctcatctgtacaatagggacagtaatacctttcagggtcaatgcggcgatgaataagcacggtgcatataaagcactcagcacttcagttcagcaagtatttattgaccacctatatgagccagaactaggaccagaataacacaggaagagattgacaggcagaaacccacacatctgctggtagcatttaccctagccagcttttaatcttgtgcaagccattttccttctctggatctcagcttcatcatctgtaaaatggtccctgttctgagagagactgttatctctcagaaaataaacagtgtgactgtcagcagctcgcaggaatgaggcagggaaggaggaatggaacaaacctgagtcacagtgttggttgcttgggctgcccctaaggcttaggcaccagccagtcctgggttcaactcctggccccaccacttaacagctgtgtgacttggacaaatgacttatctcagccataggctcctcttctataaaatgggataatgatcctgccttatggggctataattttaacatatgaagggcctagcagagtgcctgggcctaaaaattataactaggagcctgtaatcctagcactttgggaggccaagacaggaggatcacttgggctcaggagttcgaaaccagcctgggcaacatagtgagaccttgcctctatttaaaaaattgataataataatacatatataataaatataatacatatatttagaagccacacatggtggctaatgactgtaatctcagctacttgggaggctgaggcaggaggattgcttaaggccaggaaatttgagaccagcttgggagacagagctagaccttgtctctaaaaaagaataataataataattagtaataatagcagcttctactttagagtttcctttgtgccaggcagtggagtaaggtctttgcatctattaccagatttattctccctggcagggaaagctgctattgttattcccaatttataggtaagtagtgaggaatccctgccacctaagcgtggctcaaggtttcaaggttggtgggtgtgtggtatttaaatactttcctgcctgcaccaggagtacctgtacccatcccatgaataacactggactgttgctgtagtctccttctgcaatgatctcggtcttagtaactagcatttaagtactttcacccactatttcatttcattccttctattgcaattccactcataagacagaaaaatgtttctaacatttgaaatgttttagaaatgttttaaaaatgttggtgatcctttgaggatagggaaggaatgggacttgttattttataggggaagaaaagcactccccagctattaggtcatctcagaatgactatgtcagactttgtagggaaaatctctatgaattatcttagctgaggctgagggacagaactgtgataattgacaaagccattttgtcacagctgtgtacattttgtcaaagctgaagtacattgacaaagttgtgtacttcacggcttatctacaccttgagttaagtagcatcttttaatctctactagcattcaaaaaataaaagaaagaaagaagaaagtaccatatgctgaaaaaaattatctaaaagggatcaccagtatttactactctgtcatcattgccatcacttgaatcatcataatcctaccattcattgagggcttgccatatgccaggaactgtactgtttcctatgcattatattatccaaggactaggtgtcattacagtggttcccccttatccttgggggatacgttccgagacccccagtggatgcttgaaactgaagatgatactgaaccttacattaggttggtgcaaaagtaattccggcagtttttggcattaaaatgtaatctgtgctttttcctatatatacgtacctatgataaaaattaagcacagtaagagatgaacaataatagtaataaaacagaacatagtagcatcactactcttgcactctggggccattatgaagtaaactaagggttacttgaacacaagcactgcaatagtaaaacagctaatctgataaccaagaaggctactgaatgactaatggcaggtggtatagaccaggggtcctcaacccctgggccatggactggtacaggtccaaggcctgttaggaacctggactgaacagcaggaggtgagcgttggcaggcgagcgagattaccgcctgagttccgcctcctgtcagatcagcatggcattagattttcatagaagcacgaaccctattgtgagcttcacatgccagggatctaggttgcatgctccttatgagaatctaagcctgatgatctgagctggaacagttccatcccaaaaccaccctcccccaccctgctatccgtggaaatattgtcttccatgaaaccagtccctggtgccaagatgttggagactgctggatagacagtgtaaatacactgaacaaaaggatgattgatgttccaggcaggatggagcagaaggatgcaggatttcacatgccactcataatgatgcataatttaaaacttacaaattgggctgggcatggtggctcatgcctgtaattccagcactttgggaggccgaggcaggcagatcacctgaggtcaggagttcgagaccagcctgaaacacattgtgaaaccccggctctactaaaaatacgaaaattagctgggtgtggttgtgggcgcctgtaatcccagctacttgggaggctgaggcaggagaatcgcttgaacctgggaggcagaggttgcagtgagctgagatggcgccatggcactctagcctgggtgacaagcaaaactccatctcaaaaaaaaaaaaaaaaagacaaaaaaacttatgaattgtttatttctggaattttccatttaatatttttggacaggggttgaccatgaataactgaaaccacagaaagcaaaactacagagaaggggggactacagtattattctcattttccaaatggggaaacaagctcagaaagttttataaaggttaagtaagtgaaggagctgccattcaaatccagaatctacatttctaaccactgtactgtattgtggtttgctttttgtccatttactctggagcagatatatttccatgtcagtacagtcatccctcattatccatgggggattggttccaggacccccgcagataccaaaatctgaggatgctaaagccccttagtcagctgcctatatcctcaggctttacacccacagatatggagggccaatcacatgtacagatattccttcttcttttttttttttcttgagacagagtctactctgttgcccaggctggggtgcagtggtgcaatcatggctcactgcagccttgaactcctgggctcaagtgatcctcctacctcagcctcccatgtcgctgggacttacaggaccatgctaccatgcctggataatggtttaaaattttgttttaaagtagaaacggggtcttgctatgttgcctaggctggtcttgaactcctggcctcaaatgatcctcccacctcagcctcccaaagcacttggattacaggcatgagccactgcacctggccaatcttcattctaacagctgcatgatatttctatatatcgccatactattatttgtctaactacttcctactgatggacatttagcttattttccatttttgactattgaaagatatggtaacagtgtacactgggagacttcccctacgccagcccacctgatgtcacttggtctccctcattcctttttttttttggagagacagggtcttgctctgtcacccaggctggagtgcagtggcacaatcacagctcactgcagccttgacttcttgggctcaagggatcctcctacctcaaccttttgagtagctgggactataggcacacaccaccatgcctggatcatttttaaatttttctgtagagacagggtttcaccatgatgcccgagctggtttcgaacttctgggctcaagcaatcctctcaccttggcctcacaaagtgctgggattacaagcataagcttccacgcccagccctccctaattccatagcaagctgccaggcactgctgctgagatgctgcaggcccagccatcacctcccctctctgctgctttttttcagattcacaaagaagtctgtcctgaccctcaggcctggttcacaggatcagttcctaccctacttctaccactctttacaaactcttgcttggggtatcagaaagcttaaggaaataaaaaataaccccctctttaaaattaaaaaaaaaaaaaaaagcctacagagcctgcaatgtctggagacatttctggttgtcacagctggggggatgctactggcagctagtgggtggaggtcagggaggctgctaaacatacaaaccaccaggcagccccccataacaaagaatcatctggccaaaaatgttatcagttccatggttgagaaactgctctacaggtccccagggacagattctgtatatgaacactatcccagaggtcttacctactcaggagggcccagaactttagagtcagaagggacctgagaacttaccgtagaccattgcttcctccatttacagatgggaaaacagaggccttgaggggcctacagtaaaagctgccatgtgtcttctatgtgctgagtcttttccatgctgtgcctcatctgggtacagataagaatctccgttttccagatgaggagaccaaggctcagagaggggaataaatgcagccagcaagcagcagagtttgtattaatcccactctgtctttgtcttctctgctcagggctggcccccacttgagagcagaactattaagcaagccctttcctttacatgggatttggagtcacatgcacccagcctgagatgtggaaatactctcctggctgtgagtgggtagtctgctgggcgtgggatttccaggaaaccatttacacacagatccacccatccccaaagagggaaaacagccaacctctgagggggaaggccccagttactcttagctacaaggatgggaagcgctttctgtctccacttaaaaagagaagagcacggtggggcgtggtggctcatgcctgtaatttcagcactttcagaggctgaggtggacagatcacttgaggcccgagttcaaagaccagcctggccaacatggtgaaactccgtctctactaaaaatacaaaagttagctgggtgttggccaggcacggtggctcatgcctgtaatcccagcactttgggaggctgaggtgggtggatcacctgaggtcaggagatcaagaccatcctggctaacacggtgaaaccccatctctactaaaaatacaaaaaaattagccaggcatggtgacacccacctgtactcccacctactcgggaggctgaggcaggagaatcgcttgaacccaggaggccgaggttgcagtgagccaagatcatgccgttgcagtgagccaagatcgtaccactgcactccagcctgggcaacagagcgagactccgtctgaaaaaaaaaaaaaaagattagctgggcatggaggtgggcacctgtaatcccagctactcaggaggctgaggcatgagaatggcttgaacctgggaggtggaggttgcagtgagctgagatcgcaccactgcactaaaaaaaagaaaaagaaagaaaaagaaaataaaagaacaaaggttttctgagctttaagtatgaagctccatgggctcagaagaatgaaagcactttgaaataactcagaaacagaaagtcaaacactgcatgttctttctcccttataagtaggggggtaagcaatgggtacatgtggacagacagagcagaatagtagacattggagacttcaaaaggtgggaggataggtgagagatgaaaaattacctattgggtaccatgtacactattcgggtgatgggtactctaaaagcccaggcttcaccactgcacagtatatccacgaaacaaaactgcacttgtaccccctgaatctataaaattaatacaaataaaaaagattgaaggcacctgtgttcttaaatcctttccaggaaaatcagaactgtttgccccaaatctcacttggcccttgtttgagtccttcatccccctgaataaacaccttcaaatccttcccattactcttgggataaagaccaagaatatattaacatggtgtgaattagaccctgcatggtctggcacctccttaccttagctggcaccagccctctccatcttggcactcgctcctgccttggggccatcacatggtccatccctcttgcccagcagtagcttcctccaagcttctcaggcttcagatcccagctcagacatcacttcccaactagccccaacgaggttggatccccattttctctcccatagttctctgcgtggctgtgatttgattcatgtctttctcccccaccactctgtggattccctaaactgtcttgttcattgtacccagccccaccacacagctggcacaggagggcctcctgcaccatgtggcccctttgctcatgcatccttggcagaagaggatataggggctggtgagacttgttcaggcttctctttccttggggtctagggccaagctggagaaggagcgcgatcgggccagggtgacaggagggatccctggggaggtggcccaggacatgcagagagagcggcgcatcttccagctgcacatgtgtgaggtaaggggtgctctggatgagggagggggggcgtgggatgtgtcttcctgtctgcctctccaggggaccagtcacagcctcagctcaggtcctggccacatggccctgtgggatgtcaccaaggcccagtcgcagccaggaggattagcctgggatggggactgcagcccctcgttcccaggattctgcttcagctcacatcacgtatcttgccctgccctcctcctagtatctgctcaaagccggggagagccagatgaagcaaggtcctgacttccttcagagcctcatcaagttcttccacgcccagcacaagtaggtatcttcccgcgtccctgccactaacccttccagtgtcacagaacaaggcccctctcaaggtgtgatagacctgagagtctctttggaggcctgcatctttttggcagaactttcatagttcctcattgagtgctcaccgggtgtcaggcatgagtactttacaaacatcaattcgctcaattccccaacacttctgggagcaggtactctattatccccattttatagatgagaaaactgaggcttattttccaagattacatagctagtaagtgggatttgaacctagtcaagagagactcttgtctatggagtgtctgttcttgaccgtcagactacaattccctgaggtgccctgtgatccttacggcagcttctcccacacttctggcttcatctctcatttccatctttatctggacccttgtttggcctctgacacctcttagctttttccaagatggctggaaggctgcccagagcctgttccccttcatcgagaagctggcggcctcagtacatgcagtaagttgggtctcacccttgggcacgtgatcaagccccctgtccttccaggaaaatctgtgggtgtggaagagctggcttctgcccacagagtgaggctactgctctgctcttctgggtctgggctctgtgcctgacatatttgttggctggtgatgggatcccatcctctgtcccatagctccatcaggcccaggaggacgagctacagaagctgacccagctccgggactccctccgagggacactgcagcttgagagcagagaggtcagcccctgaactatcccaaaaggaatgccctccc

SEQ ID NO: 15461 - DNA, 54558 bp, Homo sapiens
agctcagtgccccccgcgccccgctccggcagctccacgctcgcgcccgccatgccggagcagttcagcgtcgccgagttcctggccgtcaccgcggaggacctcagctccccggctggggccgccgccttcgccgccaagatgccccggtaccgaggggcggcgctggcgcgggaggaggtgagggggccgaggcgggaggggtcgggggtcggcgccgggcctggccttgacctccacaggcgtgtcgcacccgagctgcgatggcccttcaccgcgccccgaaacctgccccctccctaggtctgggaggaccgagcgcatctccaacagctgcgtcctcaccgtcgaggcgggggaaggcccgagggaccgttttggggggcctcgaggtctcttcgatgacaaactccacaggtcgggggacgtaccccaagtgccccgcgtgaccgcctcatcacatatgtgtttgcctagcgccttccagcctcagtttgcgttttcatcttcggagccccacaagtgtgccccccgagtcactccccttctgagaggcaggcttcccgcctcagtcctgaactttcttccccccggctgcagagaggccccctcccgcttgcggctggttcggagatttggcccgcgtttgtggaatgaatgcggatgggaaggcgccaggagccggggttcaccttggccgggctgttggcaagtttatcgtctcctctcccctcccctctcctctttgtctttcccagcaaagcgtcccaggccttttctttcggtcttgcaggctgccccaccccattcccatgctcttcggagttccttccattcctcttctctgaacctgctgcagctttccgcagctcctctgcaaagaatattctaggacagacaccccgtggccttggtccaacggagaataatgtgtttttgcagctccccatccaaaggatgccctcaatttgggtggcattttggacctcagcaacggctctagccttccacccttcaccttaagtgtactaggcacccactgcgtggcagatacaaagctcagtagttcataacaccctgcgccagtgtcaggaaatctgtcctcttctctcttgtcagggtgaccctccatctcggagtctgtttgtatcactttgtaagggtgatagaggattgtggaaggagcatcgactttggggaaggcagaccttttttctttccttttttttttttgagacggagtctcgctgtgtcgcccaggctggagtgcagtgacgcgatcttggctcaatgcaaactccgcctcccaggttcacaccattctcctgcctcagcctcccgagtagctgggactacaggctcccgccactacgcctggctaattttttttttgtatttttagtagagacggggtttcaccgtgttagccaggatggtctcgatctcctgacctcatgatccgcccgtctcggcctcccaaagtgctgggattacaggcgtgagccaccgcgccggccaaggcagaccttttttcaaacgctggctctgcagtttgccatttgggtgaacgtgggcatgtgacctgtcctgtcatctgtggaatgggggtaataatgtgtacctcacatgagacaatgcatataaagcatgcatcttttttttggagacagagtcttgctctgtctcccaggctggagtacagtggtgcgatctcagctgactgcaatctctgcctcccgggttcaagcaattctcattcctcagcctcccaagcagctggaattacaggcatgctccaccacacccggctaatatttgtatttttagtagagacagggtttcaccatgttggtcaggctgttcttgaactcctgagctcaggcagtctatccgccttggcctctcaaagtactaggattataggtgtgagccgctgcactggcccatgcctcttgataaatggaatgattatcgtcagattaatcggcagatctctttagacagtgattgggtctcttttgtcttcatttgtctcacagagcctcaccttgtctcatttgtctcacggagcctagcctactactttgcacatagtaggggtacatgttttattaaaataagaagcagccggtcagatttggcttccttccttgggcagagtccactgcctgtggatgtgggttatattttactgtggggctcacagggaaacactgctgtccagcccatcctttggagagcttcctgagatttgtcttcatagcctcacatttcatgacccagaatagctcagtgccatccacattcttagggatttcatggttcatcctcctccccaggttgttcattagaatcttagagcaggagaaggggctccaatatgaaccttatccatggacagaaatgcccatttatgcccatacatctggccttgcctggctgtgtaagtgtaagcactgtgtgttgggggagggacccttagaatgggtctggaggccacagcaggctctgttcagggctcagctttgccccagttcaggcaagacaaaacccatcctcctttgccttcagatttttggtttggtgcacgtagaggttcattgttacaacagaaaggcttgcggcacccaaacacagcttttctcttcagcatctcagggcccaaaaagttagagtctgaactttggattagacttccctgaggtttcctgtttggttttgcatttgcatttatattttgcgattatattgtgtttacatatagtttgatgctgcaattttttcccccagttctgggcttgactaacccacccccaggcttgtagctctatttgactgaatcaaaatgcaactgattcttaagtcaagtcttccagttctgactggtttcctgggagtaactagggaccctgtcctgggactcgcagcccttttgtacagtcctgctgggaaggaccctgggcagatcacaggaaactagaatgtcagggctgagggacccttttaagatagagaccagctagaaactctctcagataagatggagtaactgatgtccagagaggccaagagacttggccaagctcctgcggctggatagtgggaaagttagcatttctacccacgtgttctacccccggtcctgttctctttccttttaaagtccatctgtctgtcctccctacgtaacttctctgaaccttgttattttatccttaaaatggatctcttaatcactccctgcttaccttactgggttgttaaagttttttgtgttcaattatgaagcaccatgcaaatgtgagggagtatattaagatagtcattacgtcaaccagcctcttcctgtcttgggcccctttatgcccatcatctcattgatattcacaacaacaggtgaaaccgggcctagggcagtggaggcagctgccctgtgtcacacagtgggtctctctgactctgctgtgctctgcctgggctctgtccagctctctgtgccatctctatggacataaaggacactaaggacataaagatgctactttgatttgctgactgactagggagaagtagcctgttacagggagatcagtaagaaccccaggagtttgtcctgagtccccagagaaaggtacagtcaatgccataagaggcaagtggagcaggagagggagagagcagtaaggactggtgcaatgagggagaagttcctggaggaggtgacacttccaggtggaaggatagatgaaccccatttatcggagaggacaagggagtgaattcagagactggtgggaagagagcatattgggaaccaagtaagccattttgaccagagctaagaattcatactatattgtgtgcctcaaactgctagtggacacaccccctccagtaggtctcagatgaagcagtctgccacaaataggagatcttcaaaggcttgttttgtatatatttttgaaattttaaaagaaagttttaattggacaagtggcataatttattattattttattttttgagacagggtctcactctgtcacccaggctagagtacagtggcacaatcatggctcaccacagcctcaacctcctgggctcaggtgattttcccacctcagcctcctgagtagctaggattactggcgccggcttaatttttgtattttttgtagggttggggtttcactatgttgcccggctggtcttgaactcctgggctcaagtgatctgcccacctcagcctccaaaaatgttaggattacaggcgtgagccactatgctcggccagggcataatttgtaataagtaatttaaaacataacagaaaaggcctatgaacaactatctcaatccctgtattctccccagaggtaattgctatggaaatgtacatgcttcccaatgtatctcctcatggaaaatatattatcagtgggggaatgggagtggctgggggaatgtttacctaaattggtatcaggtcttataatgcacagtttaaattgttttggagttacatttttcttttcctttgtgacttttgcttttttgaatcttgttttagaaaggatttccttcttaatttttaatattcttgtgaattttacagtttgctttgtaaaatgtattttagtgtaaaaattgtgtaatcttagagattgtttgcaagaaacataaaccctgtcaagcttgtttctgttggagggaaatttgtttgtttgttttttgatcgtcagagaagaatattgagggaaattggctttaaagaattagaggtgcctcatgagactgaagagccggaggtaaaagtacacctctccagggcctggaactggaggctgggaagttgtcaggaactaaggcagctgcttcgtcattcttgttctctcctgcctctgcttccctctgcacatctgatcagtgctttcgctcattcatcatcacataggccccaaagcacagcccccatgctcacatgacctcactgggccagtgtctaaaggtaaccggacactagattgagccagtctcatgtcccacttccaagttcctggcagaggttgacagcccggcccagtttctggattgggtccagtggctgggtctccacccctggtttcatcagcagaggtcatggagggaaagtgaccggcagggtaaacatggccattgagacctatggtgtgggagggggcgcttctcagagaagaggggcagggcctggaaaatcccctcagaagtatctatggcgattcctctttatttcacacagtccaggttccagggagaggtgctgtgtccatcctgttctgtacctccctggtttagatcatttatgcatactctcaggtatagaagaacccctttagaaaactcaggtataggagttttttcattttttattttttattttttttttgagacagagtctcactctgtcatgcaggctggagtgcagtggcacgatctcagctcactgtgacctccacctcccaggttcacgccattcttctgcctcaacttcccgagtagctgggactacaggtgcccaccaccacgcccggataattttttgtatttctagtagagacagggtttcaccgtgttagccaggatggtcttgttctcctgacctcgtgatccacccgcctcgtcctctcaaagtgctggcattacaggcatgagccactgcacctggctggagtttttttttaagatagagtttcactcttgtcacccaggctggagtgcaacggcacgatctgggctcactgcaacctccacttcccaggttcaagcgattctcctgcctcagcctcccgagtagctgggattacaggcgcccgccaccatgcctggctaatttttgtattttcagtagagatggggttttgccatgttggccaggcttgtctcaaactcctgacctcaggtgatccacccacctcggcttcccaaagtgctgggattacaggcgtgagccactgtgcccagcagtttaaaagatttaaaagatgagattagaatgctaagggggtgcagcaagacttggagggttttgaatgccaattgagcattctgactttttgttgggcggtgtggaccagtggacccaatcatgttgctcaaggaatggatggggttggccctgccagcatagtgcctgggggactgctccatgccaggccctgtatgaggcactgggcagatgcatcgctcagttagagatgcagtccctgccctgtggaccttacagtcttctggcaaagcccaacagtaagcaggtaaacaaataagtcacagccgggtgcagtggcttatgcctgaatgccagcactttgggaggccgaggtgagaggatcacttgagcccaggagattgaggctgcagtgaactccgatggtgccactgcatgctagcctaggtgatagagcaagaccctgtctccaaaacaaaacaaaacaaacagaaagaacaaataagtcagaagttgctcattgtactaagtggcacgaagactcatcctcctcgtcaaggccttctttgaggtttgttctgggtcctcatctcttcagggaatcttgtccacacgtgtggccttagttacctcccatctccaggtgactcacacatttgtacctgtagcctagatcctcatgtcccagtgcatacttgaccacactcctaacttccctcaggctcccttccagagctgttttcacaatgagtggtgcgacctctcacctccacgtgtgcccctcatcaccaaggaacatcttcttttttttttttttttttttttgagatggagtctcactctgttgctcaggctggagtgcagtggcgtgatctcggctcactgcaacctctgtctcctgggttcaagtgattctcctgcctcagcctccccaaggcagatggatcactggaggtcaggagttcgagaccagcctggccaacgtggcgaaaccctgtctctcctaaaaatacaaaaattagctgggtatggtggcacgtgcctgtaatcccagctacttgggaggctgaggcacgagaattgcttgaacccgggaggtggaggttgcagtgagcccaggtcacgccattgtactccagcctgggcgacagagcaagactctgtcccccgacaaaatattattttattaagatctaatttgtcaatagattttgacttctatgagaatagaaactaatctcactgttgtgtccctagtatttaccatagaaccatagtgtgttttcagaaaatgttggttgaataacaaataaatgaaagaaaaaaaaaaactaaaaaggagcattcatagagaataatggtatgggggtgctccagatggaggggacctcttaggcaaaggtcctgaggcagtaaagaagctgaaatatatgtgaccctgaaagggggcccaaggggcaaaagcactgagatgggcaaagggaagagtggcacctgctgagtttgggtggtggtggcaaggccatattcaagtttgatggccctggtagtgagtttaagttttatttagtacacaggcaagcagcataatccagtttgtattttagaaagatcatatcagttgctgtatggaaactagattggaagggccaggagaggacccaaggaggccattctgttatttagggaagagatgatggtggtgtggatcgggttgtggttggtggaggaggagagaagtgcacagattgtagaagtgttttataagcagtcaagatttgtcgatggagtacatgtgggcagtgctcaagattgtgtcccacatttctttttttcttttttttttttgtttgattgggatggagtctcactgtattgcccaggctggagttcagtggcaccatctcggcttactgcaacctccacctcccgggttcaagcgattctcctgcctcagcctcccaagtacctggggctacaggcgcccgctaccacacccagctaatttttgtatttttaatagacatgaggtttcaccatgttggccaggctgttctcaaactcctgacctcaaatgatctgcccgcctcagcctcccaaagtgctgagattacaagtgtgagccactgtgcccggccttaaatttctgatggaagggtgccatataccgagaaggggaaatctggcaggggaacaggtttggggagaaatcaagaattctatttttttttttaattttttgttttttagagacagggtctccttcttttgcccaggctggaatgcagtggtgcagtcatagctcaccacagccttgaattcctgggcttaagcaatcctcgtgcttccacaggcacatgccaccacatccatgctaatttgtttcttctcttggtaaagatgaggtctcgctgtgttgcctaggctggtttcaaactcttgggcttaagtgatcctcttgccttggcctcccaaaatgttagggttacaagcatgagccacttgtgcctggccaagaattctatctgtatatctttataggtcttgagacatccaagtggagatgtcaagaaggcagtatgtgagtttggaattcaaaggagcgggctggagatacacatttgagagctgttagcatcgagaccgtgggtttcaaacctgcatctgtgtcagaatcacttggcgtcattcccagagagtatgattcagtggtggtatcttaggctttttatggcaagcaagagaaaccatcctgagctgatttaagcagaaaagggctgcactgaaagggaatgttcagtagttcacagaatttctgggaagttggaaaactggggctgggcagcaggcaggatctcagccaaaatcatgccaccgagccagtttggcaggacactgctgccacacactaaatgccatcgctgtgtcactgttccctgaacactagacaccattgctgtggttgccaccagcattggaatggatcttccactgtgctcctgattcaaagtctgtagtgagggcttctgattggttgagcttaggtgtaagggaggctggaaaagcaagaatttgttgttttcagctttcacaggaggtgaactctgccaagacctgtgcagtgaggaagtccccagacataggaaggaggtcagatgccagactggcacacaatgacagatgtacttgacagcaagtttgccagcttgtgggattgtctgggaatctgcatttaaaccagcaccctggaaattcccatgcaggtgctgcctgaaccacatttgcatccattgcttgaactggtacttaaagctgtgggggctgggcgcggtggcccacacccgtaatcccagcactttgggaggctgaggcagggggaccacttgaggtcaggagtttgagaccagcctggccaacatggcgaaaccccgtctcactaaaaatgcaaaaaattagccgggcgtggtggcacgcacctgtagtcccagctattcggaggctgaggcaggagaatcgcttgaacccgggaggtggaggttgcagtgagccgagattgcgccactgcactccagcctgggtgaaagggcaagactatgtctcaaaaaaataaaaataaataaataaataaagctgtggaatggacaagatcacctagagagaggaacgaagaaggcccagacccaagccctggggaccctcggtatcaagagattgggataggaagaggaattaataaaggagaccaagaacgggctgtcagtggggaaggaaggaaataagacagtgttgtgcctcagaagccaggagagaagtgttccgaggagaaggggtgctcggctctgttagatgctgcccagatgcccagaggtaaaataagacaatgacagagacacagcctctggctttggcaacacggaggtcattgggaaccttaagagcagatttatggctcacgcctgtaatcccagcagtttgggggactaaggcgggtggatcacctgaggtcaggagttcgagaccagcctggccaacatggcaaaaccccatctctactaaaaatacaaaaattagccagccatggtggcaggcacctgtaatcccagctactcaggaggctgaggcaggagaattgcttgaacccgggaggtggatgtttcagtgagccgagattgtgccactgcagacacagcaaggctccatctcaaaaaaaaaaaaaaaaaaaaaaaagagcagatttaatgccattttcgcctccacaccatcctggactgatttgaggagggggcagatgagaagttctccctagaaggggagcagagacatagggtgtggctagggccctgggatcagcagggttttctaggatggactggggacccaactccactgaaccagcctcctccctaccaacagcctctgcacagggggccgagggtcttcccagagttgtcaaccttgagcctgtctctcaaagtctccttctctccccaaatttgtctttttttgtgctcacttccttgcctagtgttcagctgtttctggccactgaggtacaaggagacagatgactcaggcagatttggaggcagaaactgtaactttaggtcagagcagaaggaacatgctttccctgaaggcaatttgatcatatcattctcagacaagatgctgctagaaggtcccttcgatgggcctagaacttgggcccagggcagatgagggagtgagacccacaggggaacagtgagtggcttctgtgactctaggtcagggccctggaaaaactgattccacctcaccaacgtcacaggaggtgctttggagggcatgggaggctgagctgggaacagctgctgaaggttctctaacttgactggttttagaccttgaaagagcttttaagaatctcagctgctgcgggctacacccagacccactgaatcagaatctcccaggggcgaggcctgggcaagtgtgcagttcagaagttcccaggtaactgatgagcagttggggtgaaaactattgtggtaagctattgcatgcccactgaaggttagtaatccattaagccatatttactgaatgcctgtggtgtacaaaggcaggctctgagggcacggagagaactagacaaggtctccttctgggtgggaggactctgccagtgaaaagttgattgacaacctgtagcatacagggatgtggctgaggtctgtggcgagagtccagtaactaaagtcagacagacttgggtttgaattcctattggctgtgtgactttgggcaaatgacttaacctttctgaatctcagttttctgatctgtgaattagggatgaagataattgtcttatgggtttgtttgaggggataacacatagaaaatctagcaagcatgaacctagcacgtaacaggtacttagtaattttttaaaattccctcttactgtaaacacaagtacacctgcacatagggtagttaaaaagatcaggaaacatacagagaaaagaggaaagtaattgcaatagggatgaggtaattaccatgagtgagtgttgagattatctgtgcggtcctggcaccagagcaaaaagagaaaccttatgtaccttggaggttttggggaatgaacagctaagcctgattttggacaaggcagggtcttccctcagctctgccctttgctctctgcctcctgttcatttctttgtcaaacatttgctgaggccagtgtggtggctcatacccgtaatcccagcactgtgggacgccaaggtgggaggatcacttgaagccaggagtttgagaccaccctggtctcaaacaacaaagcaagaccctgtctctacgaaaacaaaacaaaacatttgctgagaggctacctagcagttctcagtcctggctgcaccctacaatcccttaggttgcttttaggtagatttcctctcattcaggtaaaattcacataacataaaactcaccattttaaaatgtacaattcagtggccttaagtatattcacagtgttgtgtagtcatcaccactatgtaattccagaacatttccatcatcccaaaaagaaaccctgtattgattagtagttactctccactccttttccccggcccccgacaactttccatctctatggctttacctattctggacagttcatgtgaatgaaatcctactatatgtggccttttttgtctgatctctttcagttgcacagtgttttcaaggttcatccgtgttgtctgggttgtgttaaaaagcaataaaaataggaaaaacaaacacaccaggcagtgttgtaagcacttttcagatattagcacatcataacacagggcctgtccagttatttggatacagagaaggtgtctgctgggcaggaatagctaccatgaagccctttctgtgtgtattatgctgggccacgtgcttaaatgcctgactgagttcagtctgattagatagatgctgttattatgccatttgacagatggggaacatctatcagagaagctgtgtcacttgcctcaggtcacacagctaagaggactggaaccagaatttggactttaggacagtatgacttgaaagccggagtccttaacccttgctgtcttttctatattgccactgggccttgctagtatgtattcatacatttaatcattcattcattccacacatgcttattaacacccacatcctgagttttgtgttgagtgctgcagatacaaaggtaaatgagccattccctgcctttctggagttttcagccccgtagagatcagacatgtatggcaaataagggccaggatactctaatgaaagcctgtagtgggcataggatggaataaaggtaggcaggatcagttctgttgtggtggggagggggtgacctgtaagttgagtcgggaaagatgaagtgtttactagacagaatggggcaagggccctccaggcagagggagcagcatgagcaaaggtctgatggctggaaacagtttggcatatttaggaaattgccaagagttcaatagggatggttttaagggaccagtgatggatagcaagcccaagtggggggcagggagggattcatcctggccaacaagggaacccagaaggtgggaagtactgtttgctgctctgtccaagagggcaggccaggttcttccccaggattgggtggaattcagggcttgaggccaggggtcgggtaggaggaaccttccgcggttagtccagcaaagttcttgttctcttagctcatcaccgccaagcaatctcctgaggaaaatcccagccaggaaacttggggtttgcagaggcctcagcatacatcgagggtgtggctcccttcttgcaacccctcttcctccctgcttcccaccaccccacaagggacagccggtaaggctgagctggtgaggctggacaagtgcccaggctgggaagacgtctgcagaggcctgaccaaggggcgcacggccagtcacaggccccagcagtgcaggaaggaaaacagcaagaggccaggggatcctgaaataataaatgtcagagcatacaggagccttccctgtcaccacccaaacccttcattccagaagaggagtcagaggctcagggtgggaaggagactggccaggtcacaccgcgagacaggggcagggctggggctggccctgggtcctggctcccaggccttgcagtgtagccaccgtaggggctgtggggtggcaagcagggccaagggccaccttggtatggatgaggcagaggggtagctgggaagagcactgccctcctctggcacccccttctgccccagcctggactctcaggtgctgggggtgggggctgatccagaggaaaaccatttggagtctttggctcactcttgctggtggctgaggttggagcagccttgtagggtatgactaacctcaactgtgtcctagcgctttggcctggaaggggatttagagctcgtgtctgttagctcaaaattggacagatgaggaaactgaggcatagaaggaggaaggaactcgctcagaggcacactgagggcttaatggcagagacagccctaaaattcagcactttccagttcagggctcttggtctcatggccttgttctatatgcagtagaaggccattctctcagaatgtttctgcagcacctctgaagatgcctggcttccaccattagaaaaaacattacctcaatttcttttcacagcaatccttacagagataactggggctcagagagagaagatttagctcgtagtttgctttagtgtgatagcaagaaagggctctggaggcagaggtctctgcgtttcttagaacttcctacatgaccttgagcaaactgcctaacctaccccagcctcagtttcttcatctgtaagatggggaggataataactacctcacagagttgttgggaggaataggccaggtaacaaacataaaatgcctgccccaaagtgagcagtcagttagtggggcgataggtagttgaattcatgctaataatagactcaagctgggagcttggaatgggagtccttcctgttgggtgatctgctccgggccagggcctggctgtgttcctatcaccctgtcatgcctgggggacaaggctgaaccctctttgtcccgcttgaacatggatctgcagcccagccctggagttaaactttctatgttgagaattaccaagtaactgccctgttcagaacccttcaggagcaccccatcacttatagaataaaacctagaggtttggttaaaagcatggactctggagcccaactgcctgggtttgagtttattttatttattattattgttattattatttttgagatagggtctcgctctgttgctcaggctggagtgcagtggtgcaatcagagctcactgcagccttggactcctgggctcaagtgataccctaccttagcttcccaagtggctgggactacaggtgtgtgccaccatgcctggaaaattgttttgtattttttgtagagacagggtttcgccatgttgcccaggctggtctcaaacttctgggctcaagcaatccacccacttgggcctcccaaagtgctgggattacaggcaggagccacaacacctgacctgcattttctgtaaattggtaattggatctagaagtgagaagccctgggttttttttgtttttttttttgtactttatcattttgttaaatattttaagtgtaacttggtttgctcattcaggtattgtactttttttttttttttttttttgagatggagtctcactctgtcacccaggctggagtgcagtggtgtgatctcggctcactacaacccccacctcctggattcaagtgattcgcctcagcctcccaagtagctgggactacaaaaattagccaccacacccggctaatttttgtatttttagtagagatagggtttcaccctatctcaactaaaggatggtctcaaactcctgacctcgtgatcctcccacctcagcctcccaaagtgctgggattacaggcgtgagccaccgcaccctgccaaacgttgtatttttagcatcatgtttaatatgtagtacatataatttaatcatctttgtggacactggcgtcagagaccaaagagccaggattcagccatcccacaggaaaactcctttttagcgttggagtttcattgatcttcccacatcacgtatactgttagtattgattgattgaaaaatatgggaaagaacaaatgaattcaagaatgcttttaaagggttctgtgtcttattgatcatagagttgcacatatttggaatgtggtcagactaatttgtgaaacatttttatactcgtcagtagtgctcatgatgagtgtggcttcacagtgtcctgctagtaacaccatggaccttcagggtctgggtccattgcctggaaatgaacaagggagttagagtcttaacggtttagttcccaggtccacattttggctgtgtgagctcaggcaatgatcttcactgttctgtgcctcgctgactcatcagccagatgggaacaaaaatgatgactgccccattaagatgctgtgtgtctgaaatggtgggtgtcaaactcccttacaaactgtaaagctctatacaagttttaggttgtattttttttttctttttctttttttttttttttttgagacggagtctcactctgtcacccaggctagagtgcagtggcgtgatctcggctcactgcaacctctgcctcccgggttcaagcagttctctgcctcagcctcctgagtagccgggactacaggcacctgccaccacacccagctaattttttttgtatttttagtagagacggagtttcaccctcttgaccagggtggtcttgaactcctgacctcgtgatccacctccctctgcctcccaaagtgctgggattacaggcgtgagccaccacgccgacctagtttgtatttgtttcttagtttgtttgcatttccagtgaaacctggggcaagaaactcacctgagcctttattttgcagtctgtaaaatgaggaggtaatgttagataatctctaatattctgtgacttcgtctcttaaggaacaacaccatagtccaaagcaaagatagaaaatgtttttcatctcctctgccaactctagtttaattggtagaggctaccatcatatcttaacagaatgatgaaccaaatccacagtcagtggggaaaacactgtgatcgattaataatggctataatgggccaggcgtggtggctcacgcctgtagtcccagctacttgggaggctgaggcaggagaatggcatgaacccaggaggtggagcttgcagtgagccgagatcacgccactgcacttcagcacttcagcctaggcaacagagcaagactccatttcaaaaatagtaataataataataataataataataataatggctgtaatgggccgggtgaggtggctcacgcctgtagtcctagcactttgggaggctgaggcgggcggattacctgaggtcaggagttcaagaccagcctggccaacatggtgaaacccctgtctctactacagaaaattagccaggtgcagtggcgcatgcctgtaatcccagctactctggaggctgaggcaggataattgcttgaacctgggaggcggaggttgcggtgaactgagatcacaccactgcactccagcctgggctacagagcgagatttcatctcaaaataataataataataataatggctgtaatggtcatgggatgacacagaagtgataactatgtactatattataatggtccaaaggaatgaatgtctaatggtgaaatgtaatctgtatctcccaaggccttagctctagcagctctgcccccttggcttgagttgccttggtaaccacagctggctctgagaaaccatgggaatgaagaatgggtcctattgatgaatcctgacccagaagggggcatgcagaaggcccttctaggcagggcagctgggcatggcctagtgctgccatctgtggtcttttgcctgcagagaacacaaaccagagagccagagcatggtgtgtgtgtatgttgggatcagggtaggggacacaaagggcagtgccagcagctggaatttaggccttgtttagggccagccagggtaggctgcccaaaggactccagtgggctttccaagctcagacgtgtctcttacactaagatgtgtttcagccacctttgcccagtgcctgccaggctcttgcatggatccattgactcttagctttgaatgaaatctaaatagctgtccattctaatccaaaatccagtgtctgaatcactctctagcacctaaagtatttgaatacttcaagtgacagggagctcactgccttcaggggtggcctgttcttccttagaaatgtcccctgtttgagctgaagtctgtttctgcctccctaacttccacctctcagtcctgggaatcctctctgaggccagcctgaacaaatccgttttcttttcagtaggacatcctttacagtgtttgtattcggggcctcaccattgctgtcaaccttgttttccttggacagatctccctctgtgccctgccttctccctttcctaagcctgaggggatggtgagggaatatggtagaggtggtagaattgggatttaggtttggaggcagatccagtcccaagatcaaataagctgtgccccctaactttgtggggcagcttagagatggggaaagaacattggccctggatttggctagtcctggatttaaattgtaactctgggccaggtgcagtggctcatgtctgtaatcccagcactttgggaggccgaggtgggcagatcatctgaggtcgggagttcgagaccagcctggtcaagatggcgaaaccctgtctctactaaaaatacaaaaattagctgggcatggtggcacacgcctgtaaacccagctactcaggaggctgaggcaggaggatcgcttgaacccaggaggcagaggtggcagtgagctgagattgtgtgtctgcactctagcctgggcgagagtgagagtctatcccccccccaaaaaaaaagaaagaaaaaaaagaaaaaaagttacagctctgccactgttcatcactgtgtgacttggacatgttcctcctcctgacagcttcatctttaaaatgggaatggcaatgccttcctcaaagagtggccaggatagtgacaagtaatgaggctgcacagagcaggcacttgggacatgctgcttgcactctccctgcccggcggcagaggtctgctgtggtccctctccacctgtgcttccccacagcttgctgacgaggatcaacatggagttgggggtgtggggagatatgtttaattaattcaatgaaagttgagaaattcctaaaccaaattcaatttaattttgaagtagataacatttttagttatcaaatagtggacagtattctaagcactttacctatagaatttacttaatctccccagtaaccttatgtggtacgcaatattatcatcttcattttatgaatggggaaattgagggactgagagatcacatcaggtacctggtggagctggaattcaaatccaggtagtttggggacagccccatacttttagcaatgatgatgtactgcatctctgaagagaattagaacagtaattcccaaactttagcatgcattagaatcacctggagggcttgttaaaccacagattgctggacctcacccccagattttctgattcagctggagaatttgcttttctaacaagttcctggatgatgcctgctgctggttgagggcccccaccttgagaatctctgactatcagggattaaatgggcccacctgaacccagaagctgatttttttttttttttttttttttttttttttttttaagacagtgtctcattctgtcactcaggctggagtgcagtggcatgattatagcttactgcaacctcgaactcctgggctcaagggctcctctcatcccagcctcccaaatagctgggactacaggtgtgtgtcacagcacttggctaacttttttaaaaaattttttgtaatggtcgggtgcagtgcctcatgcctgtaatcccagcactttgggaggccaagacaggaggatcagttgaggtcaggagtttgaaaccagcttggccaacatggcgaaaccccatctctactaaaaatacaaaaattagccgggcatggtggcgggcacctgtagtcccaactacttaggagcctgaggcaggagaatcgattgaacctgggaagtggaggttgcagtgagccgagatcacaccactgcactccaacctgggcaacagagagagactgtgtctcaaaaaaaaaaattttttttttttttggtatagatcggggtgggggtctcactttgttgccgaggctggtcttgaactcctgggctcaagcgatcctctcaccttggcctcccaaagtgctgggatgataggagggagccgccacacctggcttttccttcatctatccagtttcatgggaaacgagggctgatctcacacagaggcagaaaacaaaccacagtaagaaccatactcatgttttccaaatgcctcaagccttgccatgtttgtgatctcattaagcctcacagtaattctgtgagttaagcagagaatggatttttctgcctgtaatcccagcactttgggaggccgaggcaggcggatcacgaggtcaggagtttgagaccagcctggccaacatggtgaaaccccgtctctactaaagataaaaattagccaggcatggtggcgggcacctgtaatcctagctactcgggaggctgaggcaggagaatcatttgaacctgggagacggaggttgcagtgagccgagattgtgccattgcactccaggctgggcaacagggcgagattccatctcaaaaataaaaaaataaaaaaataaaaatctattttaaaggagaggaagtttagaaaactagctgggctagtatcacccaaggagataattttggagatgctggggctagaatcttagttactgactcatcatagcactctggaaacctctgcctttcctcaaaataccttcctttccccaggctactatcagaatcgtctccttaaaactaaatttttttatgagtgtgtggatgagtggattaaaaaaaaaaacctgcatttctttagcttaaatctttgagccctattataccacaggataggtgttatcaaccagtgtaaatgattttcagatattttcttgagaaaggagtaattagaacttttcccttttcatgctccctatgggcacttgcatgttcttaagtctgtggttctcttgaaggaaggggccatgtcttatgtgtccccaccatctggcaccatgcctggctgaaacagtcaccaagaaatgcttgttgaaatgaatgaatgaatggaggaactatgttcctgtccttgtccattcttcccagagcacgcctcccttcctggcagtcctaccattttttaccaagcattccctcccctctacctcatagtgtagtctctttagtctcttttctgcctgtccaggggccagagttaagcaacacagcttaagggacgccttccccattccttcaaagcagacatggctctgttttccctggactcccaggaaccttccatcatagccctcatcacattgcatgataagtgtctgcttataatggctttttcttcccttcaatgatgatgtccttgagagctgagattgtgtcttttttgtttgttttttgagacggagtctcacactgccctcctggctggggtgcaatggcgtgatctcagctcactgcagcctccgcctcccaggttcaagcgattctcctgcctccgcctccctagtagctgggactacaggcacatgccaccatgcccggctaattttttgtatttttagtagagacgtgttagccaggatggtctcgatcttgacttcgtgatctgccagcctcagcctcccaaagtgctgggattacaggtgtgagccactgtgcccggctgagattgtgtcttttttacacagggtgtagtgggcactcaataactaattgaatgaataaacagccatgtgaacttggctgccaagagcagtagggacgggaatggtatctggctgggaagctgtttcctgatagatgtctgacaagggcatcgaaaaacagtttgtggccgggcgcggtggctcacgcctgtaatcccagcactttgggaggccgaggcaggcggatcatgaggtcaggagatcgagaccatcctggctaacacggtgaaaccccgtctctactaaaaaatacaaaaaattagccgggcgtggtggcgggcgcctatagtcccagctactcgggaggctgagtcaggagaatggcgtgaacccgggaggcagagcttgcagtgagccgagattgtgccactgcactccagcctgggctacaaagcgagactccatctcaaaaaaaaaaaaagaaaagaaaaacagtctgtgagtgattcgggtgacttgtctccctttaccagttagagctagtttcagccacaagtggcagaatacccagtataacagtggctcaaataagagatttctctttcatattaaagaattccacagataagtagactggggctgctagggtagtttcctaatcactagggacaaggctgatatcttgttgctccgccatccataacaaatggcttctacttcatggtccaggattgctgcctgagctctagacatcgccagcacattgtagccagaagaaaggggtgacagagggtacccttgcattccccttttttcttttgttttttttttttgtgggggggtgcgtttgagacagggtcttgctctgttgcccaggctggagtgcagtggcacgatcacagctcactatagcctcaactccctggggtcaaacagtcctcccacctcagcctcctgagtagctggaattataggcccatgccccatgcctggtttttaattttttgtagagacagactctcactatgttgcccaggctggcctcgaactaggctcaagcaatcctcccgccccagcttcccaaagtgtgagattacagccgtgagccaccccaccccaggccctttttttctaaattaaaaaaaatcgactttattttttagagcagttttaggttcacagcaaaattgggcaggaagtacatagagttaccatatacacacagcctccccctctgtcaacagctcttaccagagtggtacatttgtttcaatgaccatacattgacacatcatcaccaaaagtccatagtttacattagggttcactcttagtgttgtacattctgtgggattggacaagtgtataattccatgtatccaccattatagcatcatacagaaatgtttccctgccctaaaaaccctctgtgcttcacctgttcctcctcactacccccatccctggccaccactgatctttttactgtctccatagttttgccttttccagaatatcgtatagttgaaatcatgtagtagccttttcaaattggcttctttcacttagtgatgtgcatgtaactttcctctgcatcttttcatggtttgatagctcatttcttttcagtgatgaataatatttcactctctggatgcatgacaatttctttatccattcacctactgaaggacatcttggttgtttccaaattttggtaattatgaataaagctgatgtaaacatccgtgtgcaggtatgtatacgttttcaactcattgagaaaatatgaaggagtatgattgctgactcatttggcaagagtacgtttagttaagaaactgtcaaactgtcttccgaagtggctgtaccattttgcattcccaccaacaatgggagtttctgttgctccacatctttgtcagtatttgtgttttggggttatttatttatttatttgtgtgtgtgtgtgtttttgtttggttttttttttttttttttttgagatggagtctcactctgtcacctgggctggagtgcagtggcactgtctcagctcactgcaacctccgcctcctaggttcaaatgattctcctgccttagcctcccgagtagctgggactacagcggtgtgccaccacgcctggctaatttttgtatttttagtagagacagggtttcaccatgtttgccaggctggtcttgaactcctggcctcaagtgatccaccagcctcagcctcccaaagtgctgggattataggcgtgaaccaccgtgcccggcctccctttgccagtatttggtgttgtcagtgttttggattttggccattctaacaggtgtgtagtccctcccttcctttttatttttcaattttttaaagccactttattgaggtaggattgacatgtaaaaagctatacatagtcagtgtatacaacttgatgagtttgggggttatctcccttctttgtaagatactttttggaagttaacaattaaaatattatattccatggccaggacttagtcccatgaccacagttagctgcaaggtaggaaatgtagtctttattctaggtcgccaagtggccatctgaaaagtcaggtttcttgtgaaggaagaagagagaatggacactgggagccacccagtgatctctgccacactgcagggaagggaaatcttctcaaacttgcttaaaggaacttcgttgggtggattcaggggtatttcatggaatttcaccaaagacataatgtgtggaggttgcctctgaagaggtagcatctggaaagttgccagaaaccagcaccactcttcctcttctgccttgctgtggcggtgtggggcttgttcatgtctttctacacatctgctctgttcttttctctctgcatgtggcaggaaggacatcccagctttagcatttcagtcagtcaactagctttccagagcccaattccaaagtccttggagagagaatctgattggtccagcttgggtcaggtgggagagagaatctgattggtttagcttgaaccaggtgtctgtcgactctggctagaacaaacaaggctgcaggggcccacctccagaggaagggagggcagttttcagaaaatgggtgtcatgggatgggaagactcctcagaatgtatctagagcatgaacatactcctctcaggtccatgtcccaggactttgcaaaccatcattcatttaggtaaacatttattgggcaccttctgtgtgctaggtacatggatctgccctctagggattttggaaatttttttggaaattgttcatatcttttttttttttttttttttttgagatggagtctcgctcccattgtgcaggctggagtgcagtggtaccatctcagctcactgcaacctccacctctcgggttcaagagattctccttcctcagcctcctgagtagctgggattacaggtgtgcaccaccacgcccagctaatttttgtatttttagtagagacagtgtttcgccatgttggtcaggctggtcttgaactcctgacctcaggtgatccactgccttggcctcccagagtgctaggattacaggcgtgagccactgtgctggcccagttgttcatatctttaacctgaattgtcttttagagcgaaatcatagctccttaaattactcaccttttagctttccaggtttcaagatggggatcaagggatttggtaaacacatgcttctgtttccccatctggattttggggaaccatagaagtggccatgttcttgcctctttttttttttctttttctgttggccagtttagaaagaaacgttctcccctccacctctttgtctctttagtaagaaacattttggttgttttttgtttgtttgctttgctttttgagacagggctctctctgtcacccatgctggagtgcagtggcgcaatcagggctcactgcagttttgacctccccaggctcaggtgatcctcccacctcagcctcccaagtagctgggactataggtgcatgccaccacatggagatggggtttcgccaagctgtccaggctggtcttgaactccttggctcaagtgatcctcctgctttggcctccccaagtgctggaattacaggtgcaccccaccacacccagctaatttatttattttttcttttcggtagagacaaggtctcactatattgcctaggctggtcttgaactcctggcctcaagtgatcctcctgtttctgcctcccaaagtgctgggattataggcatgagccaccatgcccagcctcatgttttaaccaactcaaatatgatgccgtctccttaatcttcctgattcttttgttttctttcttcagccctgggatgggcctccacggatctcaaatatgaaagtgtctcaagttcacacccgaggaggagaatgttagatttctagcccctgtaggaaaagcacctggaacttggcagaccttcctagcatcagcagcagctgatgataacgatcacaggtgctgttcattttgaacatactccatgcctagcaccaagctaaatcctgtatttgcatcctctcatacatatagccctcataccaaccctgagaggtaggcatcgatttccccattttacacatggctaatcaggaagctcagaaagaataggcaacttgtgcccgggcacggtggctcatgcctgtaatcgcagcaccttgggaggccgaagcgggtggatcacttgaggtcaggagtttgagaccaacctggccaacacaatgaaaccccgtctctactaaaaatacaaaaaattagccaggtggtgggcacctgtaatcccagctagtcagaaggctgaggcaggagaattgcttgaacctggcaggcagaggttgcagtgagccaagattgtgcaactgcactccagcctgagcaacaagagcaaaacttggtctcaaaaaaaataggcaacttgttcaaggtcacatagcccccgagtagtggagctgagcttcgtaactagaccccccttcctccagaggcttcccacatgccaccggcctctgagaacactccacattgcctctgagttctgccctatgcatgttctcctgtgggtatcattttgaatctttggcagtaccatttccaatgtgtttactaactcttgtcatgtaactctggaaatcagactctgatcccattttatttttgtcactgggaagaacagctgggctggggtcagggtggggctgtggtacatggatggaacactgttctgttgcacccgggaagtccagctctgtggcttccccaccatgtgtctctcggtaagggcctcccatctcttggcttcagttttctcatctgtgggccccttccagctcgacattctgtgttttccaagttaactgtgcatttcgcaaggatttcatgaggttgtcaacttccatgccccactgaaagggggagtgtttcccatctaggctgagcctgcttggggcatgtgagacttgcttcttgccatcacatctctggcctttcccacattctgatgtttgttctgcagcctctgggctttggggttatctggtgttgtctctccagttctccccagtggtgatggagtgtgctcccgccaccctctgccatctccccagactcaggtaactgaatgcctccaacccctctctgctcacccatagcatcctggcctcttcctccttgtcctgacataactgtttattgagcctggggtttggtgaacaagtgtaccctgctttgtatcttaagggaagatagagatgtgtgtgttctcccctctggccttttgctcagcattttgtacatatttacaaatcattcatcttctcagcaactccacaagtcccctagtatcatccccattttgtagacaaggcactcaaggctcagagaagttaacagatttgtctaacggacacaccagctactgccagaggcaagattcaaacccaggcctggcacaccctgtcatgccacgtacctttgactcactacatttacgctgcattggattcagggagaaaagtctgtggtcttcttggagtggtgtgactggtctgtggtttctgtgtggttttttgtttggtggggtaaacaggaagaccctagggataagttccagaggacagcaaaactcaatgtatttgtttggagggcggttggggggtggaaatcatagatacagcgttcctgaaggaagcaccctattccagcttggcatccctgaacctctgtccacatttgcttccagatcttggaaggagaccaagccatcctgcagagaataaagaaggctgtgcgggcaatccatagctccggccttggtaagtgagcctcctgggtgccccgcctggtcaggaagcccctctcccagccccagcctggagctaactccaagctcccgtctgtacctccacaggccatgtggagaatgaagagcagtaccgagaggccgtggaatccttaggcaacagccacctgtcccagaacagccatgagctgtccacaggcttcctaaacttggccgtgttcacccgcgaggttgctgcgctcttcaagaacctggtgaggcccctgtctcttccttgcccagactcagggtaaatctagtggtcttaagaacctgactgggaaagggtccgtttccttccttctcccaatttgcccttgatctctgacctgagttcagacctgaggtccctttccagccctgacccttcttttggataatcctcctttctctctggcttcttacccaactaactcttctctctgttctcctccttctcttcacccaggagcagagggggtctcacagcagggaagagccccgtgcaagggagggttccctggaggagctttgggataaaggagagacaggctcgggggttcctacctttataccactactgctgccactgccaccaccaccgctgccaccgcctcctcctctcctcactccctctttgtcctctgctttcccaatccacatctgcttcgtacttaaatcccaggacctgtccctgcctccacaagcgtctcagcccctgtacatggcccagtggcctcgggttgcttcccgatggcctccttggtgactgcctcctctctggtccttcaagtcctttcctcaaggccaccctgtgacagcagctcttcccatgtgcaggcacagttctcactagttcatgtgttcactcattcgatccggatgcacagctctgtggggctggtgtgactgttgtctccaccttacaggctaggaaactaggacctcaaggttaagcagcttgcccgaggtcacacggttcggtttgaacccaggttgtctggctccagagtccaagcataagcctggctacactgcctcccaggaaagcctctcatctccctccaggctccatggcactggaccagctcttgtggctccagtcctacccagcatcctccctggttggcaggggccacatcatccttgagaggcagtgtgctcagtggttaagcacccaaccttggacctagactccagcttggaatcttcactctgctgcttactaggtcaagtcactcagtctgcccaagccccaggtctctcatctgtgaaactgggataataatgctgcctacctcacagagcggtaatgaggattaagcaagttagtgcctactttatggtaagcgctcagtaaatgttggctaatattatattaatggcaaaacagcaattacttttgcaccaacctaataaaatctatcattgttatagctcttggcatagctgtgcctcgtacactgtcctgcatgtaaaaagcctttaacagtgtttgaggctgggtgcaacatttcaaaccttaatcccagtggtttaggagcctgaggtgtgtggatcgcttgagcccagaagctctagaccagcctgggcaatgtagtgagaccctgactctacaaaagtatgaaaattgccgggtgcggtggctcacgcctgtaatcccagcactttgggaggccaaggtgggcggatcacttgaggtcagagattcgagaccagcctggccaacatggtgaaactgtctttgcgaaaaaatacaaaaattagttgggtgtggtatcaggtgcctgtaatcccagctactcaggaggctgaggcaggagaatcacttgaacccgggaggcggaggtggcagtgagctgagatcatgccactgcactccagcctgggtgacagagcgagattccatctcaaaaaaaaaaaaaaaaaaatgccaggtgtgggggcgtatgcctgtggtcccagctactcgggatgctgaagtaggaagatcagtttagcctgggggaagttgaggctgtagtgagtgtgatcacaccactgtgctccagcctgggtgacaaagcaagaccctgtctcaaaaaaaaaaatagtgtttgagttcaattgaattagtgtccttctttgtcttcacctcttctctccctgtttcagtcaaactagtgtttcctgggggtctgctgtctagtggacattgtaccaggggttggtgacacaggaaagtgtcagactgcctcagagagccacagtctagtgggggagagaaaaactagggtgtggactagtgtcaagaaataccagcagcatggcacaaactcaaggacccagcagctggtgtcagaggcctagtgctgccatggttcagaaaaggggagatcagcatagaccaggcgggaggagtagccaggagagacttcctggaggaggagagacccaagctgtaccttggaagctggttgaaatattaggcctctttaggttgcgaaatcacagaaacccaactcaaactaggttaaatttttaaaagggaattcattagcccctgtaatgagaagtccaggggcgcagctggcttaggctctatcctttcctcttaaggtagtttctctgtctctgctcagtggacaggatagcccagcaggcccagatgcccatcttaccaaaataaagatggtctttctcccacaacttaggcagaaaaatcccagcgaggattgtgattggctggcttgggtgcgtgcctgttccctatccagtccctctatcctggggctggggtgccctgctcagatctgacttctgcgtttaccccatctgaccacagaggaggagttccccacaggaaagggggttctatgaccattaataggggaggctctgaagcgttagccagcccagaacaacagacgtgcactacaggtcaacttgagagagtcagagaggagaagggaggctgctcctggcgaggaacaggggagagattgactgtgggatgctgctggagcagtgcagcgatgaggctggagccatcagggaaggggctcactctgacacacctcggcctcccctcctgccccctttcacacaggaagcctggcgggcagcaggtcagccatcctaagcagaccccagagctggatcctctagtccccccccgcaggctcagcactcctgccatgacggtcccccttacttggctgtcatctctttgataacatcttttcctctcccctacttcccttccccgctgctctctttgccaagtgatgcttcactgtacaccgaatccctaggggctggatgccggtcacctgaggcgggaatgagcgtctctgttttttccagattcagaacttgaacaacattgtctctttccccctggacagtctgatgaaggggcagctgagggacggtcgacaggtgagtctccatgctgggagtggtggtgggacagagtaaaagaggggtgggcaggagactgttggggggcagggctggactgagggtggaggccaggtgaaggggctgtcttagcgggagtgatgagcctggggaggtctggaggacctggctcgggtcagcctaggatggctgacctgctgtctgccaggccccttgtgtgaaacatgtcatgtaaatcttacaaccatcctatgaggtaggctttgtgggtacactcatccccattttgcagttgaaattcgaggccaagggagttaggtaacctgctgatggtttacataactaggaagtagagagcccatgtgggaatccagggatcctgaatcccatactcgagctgctttctctgtgcctggcagcccttggctggatgcagagtggagctcaaagaaggtgacagaataatctctctgggcaatctgccccagacggcccaggggaggagccgtgctcccccaagagggttccctccctgccctaggctgccagcgtggcaccagcctgctaaccacacaaaccagacaggcagctttttcaccttgggagtctcggggttgttcagaagggtgtgagcagcctggctggatgaggcttaggcaagctaggcagggggtagtcaggtctccctggtttgctgtatggcctggggtagacttctcaacctctctgtgcatgttccttgacctgtacccttgctctaagaggatgatctagcaccaggcaggagaaaatgctgggctaaagttaggcagggggaatttggccttcatcctcccatcctcatggtcatgactgatctctcttctgagcaagaggactcagggtagagcccaaagatctcttcacaccccaagccatggcccaccaaacctgactgattcttggcatctctggggaggagaaggtctgctgggaggagggccttagctctgagaaatggggtcagctgagcctgtttggtgggggcaggtttgcagcaggactgtgggggcaggggctggttagagaagggctctgagcagctcaggggagcacactagcaggtcctcctacaggcagcagagcatactgtttattccagtgctccagcttccctctgggcaaattgtccttttttaacccacaggattccaaaaaacagctggagaaggcatggaaggactatgaagccaaaatgtaagtggccacagccagggtcgtttgtctgggagagtagcacttaggctggatagggaagaacctaaatgctgccgagacatgtcatccagaattgggtgacatctggctctgtagaggcatttacagcagattgtttatacccagacctgactggattctggggactgggccacgagaccaccaaaggagctattgtgaagggacctcaggatgctgctctcagagtcccatctgctcagtggtgccagacatgggcagggatgggaaggagctagcactgaccaaacacctccgcgtgctggccatttaatcttcacagtcaccctgtcatgtgtgagagaggtattagtatcacaattaccacaggaggactcagagaggttaagtcacttgcccaaggccccacagcttggcagaggcagaactggggtttatgccccttgctcctcgttcctcagtgtcagttggtatatctagagaaggaaatggctttctgtgtcctgtgcacaccacacgatactccagatctctcaccagctactgggacatcatggggaaagaaggagcctcagtcaaccagtggccaattcctcctgggcagagactccttgggctctgtcttatgaggagtctgtccagatcccagcctttgccctctgcccagccaggcccatactgtagagcattgtttgtgcttttttgtaaaattttgttttctcttgcattttgccaaagcaatttatgcttattatgaataattttgaaaatatggagaagtaaaagaagaaaaaaaattaatcatccttagcagaggcttagggttatggcaggcggataatactctctgttgtttgaatttttttttttacaaggtctgggtaacattgcagttttcatcattaaaaaaaaaaggttggatggggagaaactacccaaaaataggagaaaaattcttaattttcaagcctaaaatattaacattttaacatttatttttctatgtatgaagaaatgtttttataaaaatgagatcataacaacatactgttttgtaatctgcttttttcattcaaaaaatacattgtggccatctttgtacaccattacatattcttccacatcaatcaaacgggtgtgccaaaacctgcataagccattatgtatttaatctgttcctgtcattggagaagcatccttggatttaaatatttgtccctactcataattatttttgcaggatcaatttcaagaagtagatcctggagctttttattgttccctcagctcccagagccatggcaccgctccaagtctgaggcaaggtcacatcttgtccctgcacaagcatctccagccccagctgtgggcatagatcctgtgatgaagggtgtagacactgtgtggccatccctgtggggccctatccctgcctgtgatggggcacggccatctgctctcactggaggcccagggacgggtagtgagggcacaggctgaccttgtcttcatgatttgctgtggggccacatggccctcttcttcctgagttaccttaactaagccgttagactttcggggatcgtctaccaaatagaaataataagctctactctgctgaccttcccaaagcaggtctgcttttcctaggtttctatattgagccttcctgtagcatttcatttacaggccagactccatttagttgatgggaaagggggcttggctgaggttattcggtgagttatcgataggacctggactagaacccagggcttctgagtctagtgctatttctgccatgtggtctcctggctcccaccatggagccacatagtttgagctaatgtcttggcacgggtgactgtacactccttttcatacgggctccaggtgtagccagatatgcgtgagccgtaagttcctatgtaatttcaccacattcctaccaaacaagtctgagccccagctggaagggcccagggccctgatagcatctgtcaaataccactgggagcttcacccctggctgttcatataggaggaggattacctctccacgtggggctgctgagaaaggcatcccgggccctgtacagaggccaaatttatctaggcagttccatgtacaggtctgtttcctcatctgtacaatagggacagtaatacctttcagggtcaatgcggcgatgaataagcacggtgcatataaagcactcagcacttcagttcagcaagtatttattgaccacctatatgagccagaactaggaccagaataacacaggaagagattgacaggcagaaacccacacatctgctggtagcatttaccctagccagcttttaatcttgtgcaagccattttccttctctggatctcagcttcatcatctgtaaaatggtccctgttctgagagagactgttatctctcagaaaataaacagtgtgactgtcagcagctcgcaggaatgaggcagggaaggaggaatggaacaaacctgagtcacagtgttggttgcttgggctgcccctaaggcttaggcaccagccagtcctgggttcaactcctggccccaccacttaacagctgtgtgacttggacaaatgacttatctcagccataggctcctcttctataaaatgggataatgatcctgccttatggggctataattttaacatatgaagggcctagcagagtgcctgggcctaaaaattataactaggagcctgtaatcctagcactttgggaggccaagacaggaggatcacttgggctcaggagttcgaaaccagcctgggcaacatagtgagaccttgcctctatttaaaaaattgataataataatacatatataataaatataatacatatatttagaagccacacatggtggctaatgactgtaatctcagctacttgggaggctgaggcaggaggattgcttaaggccaggaaatttgagaccagcttgggagacagagctagaccttgtctctaaaaaagaataataataataattagtaataatagcagcttctactttagagtttcctttgtgccaggcagtggagtaaggtctttgcatctattaccagatttattctccctggcagggaaagctgctattgttattcccaatttataggtaagtagtgaggaatccctgccacctaagcgtggctcaaggtttcaaggttggtgggtgtgtggtatttaaatactttcctgcctgcaccaggagtacctgtacccatcccatgaataacactggactgttgctgtagtctccttctgcaatgatctcggtcttagtaactagcatttaagtactttcacccactatttcatttcattccttctattgcaattccactcataagacagaaaaatgtttctaacatttgaaatgttttagaaatgttttaaaaatgttggtgatcctttgaggatagggaaggaatgggacttgttattttataggggaagaaaagcactccccagctattaggtcatctcagaatgactatgtcagactttgtagggaaaatctctatgaattatcttagctgaggctgagggacagaactgtgataattgacaaagccattttgtcacagctgtgtacattttgtcaaagctgaagtacattgacaaagttgtgtacttcacggcttatctacaccttgagttaagtagcatcttttaatctctactagcattcaaaaaataaaagaaagaaagaagaaagtaccatatgctgaaaaaaattatctaaaagggatcaccagtatttactactctgtcatcattgccatcacttgaatcatcataatcctaccattcattgagggcttgccatatgccaggaactgtactgtttcctatgcattatattatccaaggactaggtgtcattacagtggttcccccttatccttgggggatacgttccgagacccccagtggatgcttgaaactgaagatgatactgaaccttacattaggttggtgcaaaagtaattccggcagtttttggcattaaaatgtaatctgtgctttttcctatatatacgtacctatgataaaaattaagcacagtaagagatgaacaataatagtaataaaacagaacatagtagcatcactactcttgcactctggggccattatgaagtaaactaagggttacttgaacacaagcactgcaatagtaaaacagctaatctgataaccaagaaggctactgaatgactaatggcaggtggtatagaccaggggtcctcaacccctgggccatggactggtacaggtccaaggcctgttaggaacctggactgaacagcaggaggtgagcgttggcaggcgagcgagattaccgcctgagttccgcctcctgtcagatcagcatggcattagattttcatagaagcacgaaccctattgtgagcttcacatgccagggatctaggttgcatgctccttatgagaatctaagcctgatgatctgagctggaacagttccatcccaaaaccaccctcccccaccctgctatccgtggaaatattgtcttccatgaaaccagtccctggtgccaagatgttggagactgctggatagacagtgtaaatacactgaacaaaaggatgattgatgttccaggcaggatggagcagaaggatgcaggatttcacatgccactcataatgatgcataatttaaaacttacaaattgggctgggcatggtggctcatgcctgtaattccagcactttgggaggccgaggcaggcagatcacctgaggtcaggagttcgagaccagcctgaaacacattgtgaaaccccggctctactaaaaatacgaaaattagctgggtgtggttgtgggcgcctgtaatcccagctacttgggaggctgaggcaggagaatcgcttgaacctgggaggcagaggttgcagtgagctgagatggcgccatggcactctagcctgggtgacaagcaaaactccatctcaaaaaaaaaaaaaaaaagacaaaaaaacttatgaattgtttatttctggaattttccatttaatatttttggacaggggttgaccatgaataactgaaaccacagaaagcaaaactacagagaaggggggactacagtattattctcattttccaaatggggaaacaagctcagaaagttttataaaggttaagtaagtgaaggagctgccattcaaatccagaatctacatttctaaccactgtactgtattgtggtttgctttttgtccatttactctggagcagatatatttccatgtcagtacagtcatccctcattatccatgggggattggttccaggacccccgcagataccaaaatctgaggatgctaaagccccttagtcagctgcctatatcctcaggctttacacccacagatatggagggccaatcacatgtacagatattccttcttcttttttttttttcttgagacagagtctactctgttgcccaggctggggtgcagtggtgcaatcatggctcactgcagccttgaactcctgggctcaagtgatcctcctacctcagcctcccatgtcgctgggacttacaggaccatgctaccatgcctggataatggtttaaaattttgttttaaagtagaaacggggtcttgctatgttgcctaggctggtcttgaactcctggcctcaaatgatcctcccacctcagcctcccaaagcacttggattacaggcatgagccactgcacctggccaatcttcattctaacagctgcatgatatttctatatatcgccatactattatttgtctaactacttcctactgatggacatttagcttattttccatttttgactattgaaagatatggtaacagtgtacactgggagacttcccctacgccagcccacctgatgtcacttggtctccctcattcctttttttttttggagagacagggtcttgctctgtcacccaggctggagtgcagtggcacaatcacagctcactgcagccttgacttcttgggctcaagggatcctcctacctcaaccttttgagtagctgggactataggcacacaccaccatgcctggatcatttttaaatttttctgtagagacagggtttcaccatgatgcccgagctggtttcgaacttctgggctcaagcaatcctctcaccttggcctcacaaagtgctgggattacaagcataagcttccacgcccagccctccctaattccatagcaagctgccaggcactgctgctgagatgctgcaggcccagccatcacctcccctctctgctgctttttttcagattcacaaagaagtctgtcctgaccctcaggcctggttcacaggatcagttcctaccctacttctaccactctttacaaactcttgcttggggtatcagaaagcttaaggaaataaaaaataaccccctctttaaaattaaaaaaaaaaaaaaaagcctacagagcctgcaatgtctggagacatttctggttgtcacagctggggggatgctactggcagctagtgggtggaggtcagggaggctgctaaacatacaaaccaccaggcagccccccataacaaagaatcatctggccaaaaatgttatcagttccatggttgagaaactgctctacaggtccccagggacagattctgtatatgaacactatcccagaggtcttacctactcaggagggcccagaactttagagtcagaagggacctgagaacttaccgtagaccattgcttcctccatttacagatgggaaaacagaggccttgaggggcctacagtaaaagctgccatgtgtcttctatgtgctgagtcttttccatgctgtgcctcatctgggtacagataagaatctccgttttccagatgaggagaccaaggctcagagaggggaataaatgcagccagcaagcagcagagtttgtattaatcccactctgtctttgtcttctctgctcagggctggcccccacttgagagcagaactattaagcaagccctttcctttacatgggatttggagtcacatgcacccagcctgagatgtggaaatactctcctggctgtgagtgggtagtctgctgggcgtgggatttccaggaaaccatttacacacagatccacccatccccaaagagggaaaacagccaacctctgagggggaaggccccagttactcttagctacaaggatgggaagcgctttctgtctccacttaaaaagagaagagcacggtggggcgtggtggctcatgcctgtaatttcagcactttcagaggctgaggtggacagatcacttgaggcccgagttcaaagaccagcctggccaacatggtgaaactccgtctctactaaaaatacaaaagttagctgggtgttggccaggcacggtggctcatgcctgtaatcccagcactttgggaggctgaggtgggtggatcacctgaggtcaggagatcaagaccatcctggctaacacggtgaaaccccatctctactaaaaatacaaaaaaattagccaggcatggtgacacccacctgtactcccacctactcgggaggctgaggcaggagaatcgcttgaacccaggaggccgaggttgcagtgagccaagatcatgccgttgcagtgagccaagatcgtaccactgcactccagcctgggcaacagagcgagactccgtctgaaaaaaaaaaaaaaagattagctgggcatggaggtgggcacctgtaatcccagctactcaggaggctgaggcatgagaatggcttgaacctgggaggtggaggttgcagtgagctgagatcgcaccactgcactaaaaaaaagaaaaagaaagaaaaagaaaataaaagaacaaaggttttctgagctttaagtatgaagctccatgggctcagaagaatgaaagcactttgaaataactcagaaacagaaagtcaaacactgcatgttctttctcccttataagtaggggggtaagcaatgggtacatgtggacagacagagcagaatagtagacattggagacttcaaaaggtgggaggataggtgagagatgaaaaattacctattgggtaccatgtacactattcgggtgatgggtactctaaaagcccaggcttcaccactgcacagtatatccacgaaacaaaactgcacttgtaccccctgaatctataaaattaatacaaataaaaaagattgaaggcacctgtgttcttaaatcctttccaggaaaatcagaactgtttgccccaaatctcacttggcccttgtttgagtccttcatccccctgaataaacaccttcaaatccttcccattactcttgggataaagaccaagaatatattaacatggtgtgaattagaccctgcatggtctggcacctccttaccttagctggcaccagccctctccatcttggcactcgctcctgccttggggccatcacatggtccatccctcttgcccagcagtagcttcctccaagcttctcaggcttcagatcccagctcagacatcacttcccaactagccccaacgaggttggatccccattttctctcccatagttctctgcgtggctgtgatttgattcatgtctttctcccccaccactctgtggattccctaaactgtcttgttcattgtacccagccccaccacacagctggcacaggagggcctcctgcaccatgtggcccctttgctcatgcatccttggcagaagaggatataggggctggtgagacttgttcaggcttctctttccttggggtctagggccaagctggagaaggagcgcgatcgggccagggtgacaggagggatccctggggaggtggcccaggacatgcagagagagcggcgcatcttccagctgcacatgtgtgaggtaaggggtgctctggatgagggagggggggcgtgggatgtgtcttcctgtctgcctctccaggggaccagtcacagcctcagctcaggtcctggccacatggccctgtgggatgtcaccaaggcccagtcgcagccaggaggattagcctgggatggggactgcagcccctcgttcccaggattctgcttcagctcacatcacgtatcttgccctgccctcctcctagtatctgctcaaagccggggagagccagatgaagcaaggtcctgacttccttcagagcctcatcaagttcttccacgcccagcacaagtaggtatcttcccgcgtccctgccactaacccttccagtgtcacagaacaaggcccctctcaaggtgtgatagacctgagagtctctttggaggcctgcatctttttggcagaactttcatagttcctcattgagtgctcaccgggtgtcaggcatgagtactttacaaacatcaattcgctcaattccccaacacttctgggagcaggtactctattatccccattttatagatgagaaaactgaggcttattttccaagattacatagctagtaagtgggatttgaacctagtcaagagagactcttgtctatggagtgtctgttcttgaccgtcagactacaattccctgaggtgccctgtgatccttacggcagcttctcccacacttctggcttcatctctcatttccatctttatctggacccttgtttggcctctgacacctcttagctttttccaagatggctggaaggctgcccagagcctgttccccttcatcgagaagctggcggcctcagtacatgcagtaagttgggtctcacccttgggcacgtgatcaagccccctgtccttccaggaaaatctgtgggtgtggaagagctggcttctgcccacagagtgaggctactgctctgctcttctgggtctgggctctgtgcctgacatatttgttggctggtgatgggatcccatcctctgtcccatagctccatcaggcccaggaggacgagctacagaagctgacccagctccgggactccctccgagggacactgcagcttgagagcagagaggtcagcccctgaactatcccaaaaggaatgccctcccccaaggcccaccgtggagggagggagagaaggaagacccacagggtcccctggagaagtctccctgagtgagcccccgcagaatggggctcttcccactgagatgccctgaggtctcctttgcatgtccgagggacaggaacacctgagccggaagaactcaggatgtggctatagcatccaccagcaccaaggcaacaagcagtttgggacggagaaagtgggctttctatacaagaaaagtgacgggtaagtgattcagagcttacataatttgcccaatgtcacactgcaagtaaatgacagggttggggaagctgcccaaaggaactgttctaatcatttgtgtagacaccgagggttgcaatgtaaaatcctcaattcctgggttgtccaggacacctgggcatgtgaacttctgctaaaggtgactggttattttaagttaaagaagaagaatagcagtagctaacacttttttttttttttttttttgagatagagtctcactctgtcgcccaggctggagtgcagtgccatgatctcggctcactgtaagctccgccttccgggtcatgtcattctcctgcctcagcctcccgagtagctgggactacaggcactcgccaccacactcggctaatttttttgtatttttagtagagacggggtttcactatgttagccaggatggtctcgatctcctgaccttgtgatccgcccgcctcagcctcccaaagtgctgggattacaggcatgagccaccgcgcccggctggcagtagctaacacttattgcaacacttactatgccctcattcttttttttttttttttttttttttttttttgagatggagtctccctccgtcacccaggctggagtgcagtgacgtgatctcagctcactgcaacctccgcctcctgggttcaagcgattctcctgcctcagcctcccgagtagctgggactacaggtgcccgccactacgcccagctaattttttgtatttttagtagagacggggtttcaccgtgttagccaggatggtctcaatcttctgaccttgtgatctgccagcctcagcctcccaaagtgctgggattacaggcgtgagccactgcgcccagcctatgccctaattaatctctgcaatatactgaatatgcctagaaatgaaagtattggctgtgccttgcttcctagtgtaaaaaaaaaaaaaaaaatcagtctgtgggccaggtgcagtggctcacacctgtaatcccagcactttgggaggccaaggcaggcagatcacttgaggccaggagttcaagaccagcccagccaacatagtgaaaccccatctctactaaaaatacaaaaaattagctgggtatggtggcgtgagcctgtagtcccagctgcttgggaggctgaggcatgagaattgcttgaacctgggaggcagggattgcaatgagccgagatcgtgccactgtattccagcctgggtgacagagaaagatcctgtctcaaaacaaaacaaaacaaaaaaacaaaactgctgtgaaatgcaaaggcccttgtgggatatattcatgtttctacctaccaatcagtttaatcggagaagaataactttgaagaagaaaccaatgaatatttacctgttacaggagaagtgttacggagttttggatcatggacttgctaattttattttggggatattaatattgatcttgcttagttgaaccacaatttatttgttgttgtcaagagcctgtgcctctcagactaggagctccctaatgatataagctatgtctcccccatcagactgggagctctcagagggccaaagtcacatcatccccttagaataaggattcccagggagtgaggctgtgtttctccatcagactggcatcttcctaagagcagaactgtgtctcctccatcagaagggagccccagagagtcaggggtcaggggtgggggtgtagggttaggagaagaaagaggtaaagggatgtggctagagatcatacaggtgggggcaaatttctgttctctgacacctgcgaactaggtgtgagccttgggtcactgtccttctatccctctgggctttagaattcgaagagtctggcagaaaaggaagtgtggagtcaagtatggctgcctgaccatctcacacagcacggtgaggcctagaggtggtgggagtctcagggcacgatggaccctcttcttctggtgttctgagcaaataatgtcaagccctccctctaagactggcccccaaacctaggtccagggagctggagacccgtttgggaggacagatgggacctgaaggccccaatctagtcttagtctacacttcacatccttgaggtgctgctgggtgaggagaaacacaaatggaacaggatgattatgcccatttaacagagtgggaaatggaggcctaaagaatgtggagggccagaggtaatgcatacatcctccgcccctaaattcccacagataaaccggcccccggtgaagctgaccctgctgacgtgccaagtgaggccaaaccctgaggagaaaaagtgcttcgacctggtgacccgtgagtggtccctgtgcctctcccccacccacagctgctcagggcttctctaagacacctgtcagctcccggggggcttcagtgaggggtctgtgtccagttccacacatggtgtcgaattgctgctactgcagacataagaatccttaggtctaggatacccacatcacattaaatgtcaaaatgcacccactttacataataaatgtggctatttatacagagcatatttgagtggatttgggtcatctgggttttgaaattatttctttttttaaaattttacctttttttcccaaatacccagacttgaaggagatgaaattattgtttctttacattttctacttttcgttcttcagagcctttggtgcaggctttgtgtgagagcagacacaggctgagaaagacctagatcttgtcctcaggaaactctctggcaggggtgtggggtgggtacccaggactgtaagatgagggggctgtccagaagatgggtgcagatatagccccatagaagattagggagcaggaaggcctgcactgctgtggggaatcaggaaaggctcctggaggagacagtatttgagtttagccttgaaggacatgtagaatgaagagtttgtggggtgggggcttttgaggagacaggattagcatgatgaaaggcatggaagcaggagagtgggtctggccggtttggccagagtggagggttcatgtagcagagtgagagatgaggcctggaaatccctcttaaaagtttggaccttatttcctggcaatagagagccatgggagatcttggggcagggcagtggtgtaattagagcagagccttgggcacaacagttgggagctggtacaggctaggggaaaggggaaatgggaagcagggagaccagacaggaggcctggtcgcccaggaggagaccaggaagggcccagtggggtggtgacagttggttcagaggatgccctgcctcagagctgggttctctggggttccaagccctttgagacctcgtctgagcctggaaccagggcttcacgcagagggagctttgttgggatcctacttcggaggccagttctgagaaactgcccctggtgctggccactgtcattccactcccttcccactcctagcttgagagtccgacttgtcagggacacatctccatgtggccccagcggctttggtgggggctccctgggctccgggaaggccagcagcatttctgtgggtcagaagcccccttctctcccgacagacaaccggacgtaccactttcaggcagaggacgagcacgagtgtgaggcgtgagtgccccctcggccagcccggccagccttgtgggtgggggccggcggccctatctcttcccacttgacatccccatcccaccccgttcaatctccgcaggtgggtgtcagtgttgcagaacagcaaggacgaagccctgagcagcgccttcctcggggagcccagcgctggcccggggtcctgggggtccgccggccatgatggggagccgcacgacctcacaaagctgctcatcgcggaggtgaagagcaggcctgggaatagccagtgctgcgactgcggggctgcaggtcggtccccggggccggggcaggagggaggcttaagtggaggggaggggctgcacctccaggctccagctgctttcctctgcagaccccacgtggctcagcaccaacctgggcgtgctcacctgcatccagtgctcgggcgtccaccgcgaactgggcgtgcgcttttcgcgcatgcagtcactcaccttggacctgctgggcccctccgagttgttggtgagggcggggcggggcctggaaggggccagaagcggagttaggggtgtagtttcatccgggggcggggcttgcaggttgtgggtgggacctggccgaggtgggctgggacaagccaggtagcgggtggtcaggggcggggcctgaaccgggagggcggccgaggggcgggactctgggggcttggagctccaccctatgcaggcttaaccgcccggtcttactccgccccacgtctattttcctacgactccagctggccttgaacatgggaaacacgagcttcaatgaggtcatggaggcccagctaccctcacacggcggccctaaaccctcagctgagagtgacatgtaaggggattctcagagagaggggcaccctgcctaggggattctgcctccgcagtgtccagggtcgtagaaaagtcttggatcagaagtctggggaggctgggcgcagtggctcacgcctgtaatcccagcactttgggaggccaaggcgggcggatcacttgaggtcaggaatttgagaccagcccggctaagatggcaaaaccccgcctgtactcaaaatacaagaattagctgggcgtggtggcacacgcctgtaattccagctactcaggaggttgaggcactagaattgcttgaaccctggaagcagaggttgtagtgaaacgagattgcgccactgcactccctcctgggcaatagagtgagactgtctaaaaaaaaagcctggggagaggggagcctcagatctagacgtcttcaggacatggttctggagaaaaagagagctgtatctcctgtgggagggccccagggatcagctgggcagacacggtccatgctctgagatcctgtggttgtttttggtaggggcacccgcagggactacattatggccaagtatgtggagcataggtttgcacgccggtgcacacctgagcctcagcgactctggacagccatttgcaacagggacctcctgtcggtactggaggcctttgccaatgggcaggactttggacagccgctgccagggcctgatgcacaggtgagaacccctccaagggccacttataacccacctgtctaacatattccccagttcttctccaggaccagctgttactcccctccaccccacctctgacatctgctcagatctcacccatcagagtggtaagtgggaaagagcacagcttcagtcaggcagacctgggtgggaatcctggctctgttttttcctagctgtgtgatctagggcaggttacttctctgagtctcatttcctcatctataaaaggggttaataatagcacccacggtgatgaagtgagaagtcatgtatataaagggcttagtgtacaatgggcatgcaataaacgttaatatctttttctttcacctaaatagccctgaaatataagggcatgtcagtttagagccaggaaggccacattgctttggctattccaagaacaaacacatgagcatggagaaaggatatcagagacatttgaaaaagtaaatcaacaggagttgctgactgattcgacatcaaaaattggatgttggctgggtgtggtggctcacgcctgtaatcccaacactttgggaggccaaagtgaaaggatcacttgagcccaggagttcagaatcagcttgggcaaaataaggaaacccccatctctacaacaacaactaaaattagctgggtatggtggcacacacctgtggtcccagctactcagaaggctgaggtgggagggtggcttgagcccaggaggttgaggctacagagagctgtgattgcgccactgctctccagcttgggtgacaaagcgagaccctgtctcagaaaaactaaaaacgggtatctttgaactgtctgtctgatatcttggtgggctatccaatgggcagtgcagcacttaggtgaggtaagaatttggaacagcctgcacatgtgtgatagttgaaaatgtgaggttgctgaggtcttggtggggaagtgcgatcagggagaggagccgagagctgagaaagaagtttgggaaacacttgttgggggcagaggaggaagagccgtgaatgggaacaatgggagaatggcccttcaccttcctcccagacatgaggctctgcccttgcagtctcatctctccagggttctggcagcttcctatggggggataaggggttagcaagagttcaagagggaaatactgggttggaggcaggtgcactggggggggaatctcagaggtgtggatgtgttttcaggcacctgaagaactcgtcttgcatttggctgtcaaagtcgccaaccaggcttccctgcctctggtggatttcatcatccagaacgggtgagagcctccctgcctgtctgtctggctcctcacactccctctcctttccttcctcttctcccattctcttccctcctttcccctcccactttttcccctgactttgatcccctcattgatctgttccccttcctttctccctgaaccctcctctccccagtggtcacctggatgccaaggctgctgacgggaacacggctctgcactacgcagcactctacaaccagcccgactgcctcaagctgctgctgaaggggagagctttggttggcacaggtggggcttgaatacctcctccgtcagactcctattcctgactaccccttatgtggacttccgatggtctcgggctctaatcctggcttgcttctgaccacctctgtgatcttaggggtttgtcattcagctcttgaatttcagcttcctcatctgtaaaatgggaataataccactgacctagcaggactgctaaagaaaaaagaaaataatatttctgggagtacttaggcaaataaatattagctagatctgaatgataatgattgtaatagctaatatgtattgtttaacatatgcctggcaatgggacaagtgctttttgtatgttaattaattgaatcctcacaaccacttcatcaggtagttccaagtattatactcatttcataaacaattttgtcccaaaaggttatataacttgcctatggtcacatagccagaaaatggcagagccaggattcaaacccatacattctgattccagaggcccgtcttaatctctaagctgtaatgtttctttgactatgaccatgaaccctgactttccccgctcacagtaaatgaagcaggcgagacagctctggacatagccaggaagaagcaccacaaggagtgtgaggagctggtgaggactcggggaggcaaggggcccctgactctttctctctccctgctgagcccccaaccctctgaaccaccaagcctttgtttttggcagctggagcaggcccaggcggggacctttgccttccctctacatgtggactactcctgggtaatttccacagagcctggctctgacagtgaggaggatgaggaagagaaggtgggtcccagccctgtccctcaggcctctggatggcagaaggaaagagccagattgggcctggtgtgtgttggcgggggcggtgaggcggggggacagggctacaccggaggaaccaggctgtcctcatcctcaatcttttgctctggcagcgctgcttgctgaagctcccggcccaggctcactgggccagtgggaggctggacatcagcaacaagacctatgagactgtcgccagcctgggagcagccacccctcagggcgagagtgaggactgtcccccgcccttgccagtcaaaaactcttctcggactttggtccaagggtgtgcaagacatgccagtggaggtacagttggatgcccagataaatgctcaccatgccattcacagaggacctgtatatgctggggcactgagctgagtgcatatgttagtccgtactatccttatgatgacctcccaggaaggggttctcatcttccccttacagataaaagaacagaggtgttaagtcacatgtttaagatcccacagctaataagtctctgatgtaggattcaaatctcagcccatcttattccaaattcctcaatgctccacttaacaagagagaaacgagtttattgagcatccccttcatcctgagtcctttgagggctaccaagacacagtctagtaggggagataaaaactggaatgcaattcattataatacaaggcacaatgtgatatagaatgtaaatcccaaaaggacaaggactttgagtgtttcattgaatactatttgtccagtgcctagcgcagagcctggctgttctcaagaactatttgtcgaatgaaggaacagacttgttgtgggaggttggggcagttggagagggagcatgtcctgctgggattgggggttggtttaagaaggcttcctggtgaggatagcatatgagtgaacctgagggatgagcaggagaatccaaactgggacagggtatgagcacaagcaaaaaagtgagtcagcatggccctggccaccgcgaacaaaggcttcatcagttgaaggagaatactggacaggtagatggggaatggactattggcagagaaccagaagagatcctaggccagatgtggtggctcgtgcctgtaatctctgcactttgggaggccgaagcaggcggatcaccccaggtaaggattttgagaccagcccagccaacatggtgaaaccccatctctactaaaaatgcaaaaattagccaggtgtggtggcatgcacctgtaatcccagctactctggaggctgaggcaggagaatctcttgaacctgggaggcggaggttgcaatgagccgagattgcaccactgcactccagcctgggtgacagagtgagactctgtctcaaaaaaaaaaaaaaaaaaaatcctagaggccagagactgctttgaggttgggcacagagcaagtgataaagaaaagctttatcatttctgatgtttctgattccagatcgttctgaagtctccagcctgagttcagaggcccctgagacccctgagagcctgggcagtccagcctcctcctccagtctgatgagccccttggaacctggggatcccagccaagccccacccaactctgaagagggcctccgagagcccccaggcacctccagacccagcctgacatccgggaccaccccttcggagatgtacctccccgtcagattcaggttggtgagggcccagctgtgcaaccagggcaaatcccctgacttctctgagcatccattgatttccacacctctaaatagtacctgcctaaagactgggtcacacgccatctctgggcccatcacttatgcagaaatgctgaaccctgggaccccttcccccttcacacacttgctcccaaatcctgcatggagagctgaggaggagccagggatcctccctgctgatgttggagtaaagtaggcttagccccctgtgtggcttattctagaggctctcagtggggtcttcactctgtccccacctccaacccaggatccagtcttctcccttccatacaaacccattcagtctggagtttggggagaagtagacctgcagatatccacagagtcttctggaggtcagttccagccttcttgggcctgtgatggacctggcctgggggccttgtggactctacccacccatcctaagcccccagactggctctgttcctgagccctttctccccactctgaggggctctctggacatgagggtcatgttggcctttccctgccttccagctccgagagcactcgctcctatcggcggggggcgcggagccctgaagatggtccctcagccaggcagcctctgcccagaaggaacgtgccggtaggaactctgggaccatggtttgaggggcggtggcagggtgcctgggaggcagagttagtcaagagtaggcgtattggggtgggagacctccccatggttggggtacagatgggcccaggcagccacagtttggacagtccctgtcctggtgcccaggtgggcacggtttggccagtccctgtcctggtgcccaggtggccacggtttggccagtccctgtcctggtgcccaggtggctgcagtttggccagtccctgtcctggtgctcctctttccatgctccagcccagggctgggtgaagctgaggagagcccaggccttgagggatggcagtgatcatgaggcccaagctctggcttctccccaggggaggatgaggaaagttgtgttagccaggccagtcgctcagagaaggcatcacttccctgcagaagaggcaggattaggtggccgtgtaccagcccttgtttgcctaactctccccttgttcatgagtctcctggaatccacagggactttcagatcccaggcatagagggatgtgacagggacagggcaagagctgtcatccttaatccagcttctccctgctgaatcaccaagtctccaacaatggcatatattagttgaacctaggagtgggcacagatcagagccagttgtgttgggaaagaagcctcttctgtcccttgttcctctgggaattcctcagaatggcattggttgtgttgggagtcaggatggcaggggcaaaagctggttctgtctggggaatcgtcatctttagtccaccagagttagtcagcagacacaaatctatgtccatattctggttccactattgccctgaaaaccaagtatccatcagatggcatttaattgatgcctgtgattgtggtgtgtatgatagcaagagcttgggctttagagtaaggagactttggataagtggcttcacttcctcaagcctcagtttctttgtctgtaaaatgagaataatttaatttatctacaataggacagatgtgaaactgagtgagatgaacacctggtatgttacaggtgctttgaaaatgtcagtttcatccttctttctgcaggttggcatcactgaaggagatggctcaaggactgggagtctcccagcaagttctgtgcaacttttgcaagactagctccttgctggcccccacatgccccatgctaggccccaatgttcagagctgggacttgagctcacaaaactggggagctgagacatttgttctcttggatctcactctctctgtcccttgtgcctctgtagctggccttcttcctgccacaggccatgcctctaccaaggacacatggcctttccctgttaggactgatggcggttctttcctatctcattacccgcta

SEQ ID NO: 15462 - DNA, 33090 bp, Homo sapiens
gaggaggatttggaagacccagagcgggatgaaacgggacagagccctgaaggggcagggatgggggaaggcggaggagtttctactgaggccaggggtggggcatcgcgccagggggcggggtctgaggcggtgaggggctgggggcgtggcctagggggccggcgaggggccggggaagcggcctgacgcggtgcggggccgggaccggggccggagcctggaccttggcggtggaggaaggcgaggagccgggggcggggccgtcccagctgaggagcggagagcggctggagggtcgggggcggggcgtgcggaggggcggggcgtgtggaggccgggacggcgcccccggccggcggtgaggccggctcagcgcggagcagctcagtgccccccgcgccccgctccggcagctccacgctcgcgcccgccatgccggagcagttcagcgtcgccgagttcctggccgtcaccgcggaggacctcagctccccggctggggccgccgccttcgccgccaagatgccccggtaccgaggggcggcgctggcgcgggaggaggtgagggggccgaggcgggaggggtcgggggtcggcgccgggcctggccttgacctccacaggcgtgtcgcacccgagctgcgatggcccttcaccgcgccccgaaacctgccccctccctaggtctgggaggaccgagcgcatctccaacagctgcgtcctcaccgtcgaggcgggggaaggcccgagggaccgttttggggggcctcgaggtctcttcgatgacaaactccacaggtcgggggacgtaccccaagtgccccgcgtgaccgcctcatcacatatgtgtttgcctagcgccttccagcctcagtttgcgttttcatcttcggagccccacaagtgtgccccccgagtcactccccttctgagaggcaggcttcccgcctcagtcctgaactttcttccccccggctgcagagaggccccctcccgcttgcggctggttcggagatttggcccgcgtttgtggaatgaatgcggatgggaaggcgccaggagccggggttcaccttggccgggctgttggcaagtttatcgtctcctctcccctcccctctcctctttgtctttcccagcaaagcgtcccaggccttttctttcggtcttgcaggctgccccaccccattcccatgctcttcggagttccttccattcctcttctctgaacctgctgcagctttccgcagctcctctgcaaagaatattctaggacagacaccccgtggccttggtccaacggagaataatgtgtttttgcagctccccatccaaaggatgccctcaatttgggtggcattttggacctcagcaacggctctagccttccacccttcaccttaagtgtactaggcacccactgcgtggcagatacaaagctcagtagttcataacaccctgcgccagtgtcaggaaatctgtcctcttctctcttgtcagggtgaccctccatctcggagtctgtttgtatcactttgtaagggtgatagaggattgtggaaggagcatcgactttggggaaggcagaccttttttctttccttttttttttttgagacggagtctcgctgtgtcgcccaggctggagtgcagtgacgcgatcttggctcaatgcaaactccgcctcccaggttcacaccattctcctgcctcagcctcccgagtagctgggactacaggctcccgccactacgcctggctaattttttttttgtatttttagtagagacggggtttcaccgtgttagccaggatggtctcgatctcctgacctcatgatccgcccgtctcggcctcccaaagtgctgggattacaggcgtgagccaccgcgccggccaaggcagaccttttttcaaacgctggctctgcagtttgccatttgggtgaacgtgggcatgtgacctgtcctgtcatctgtggaatgggggtaataatgtgtacctcacatgagacaatgcatataaagcatgcatcttttttttggagacagagtcttgctctgtctcccaggctggagtacagtggtgcgatctcagctgactgcaatctctgcctcccgggttcaagcaattctcattcctcagcctcccaagcagctggaattacaggcatgctccaccacacccggctaatatttgtatttttagtagagacagggtttcaccatgttggtcaggctgttcttgaactcctgagctcaggcagtctatccgccttggcctctcaaagtactaggattataggtgtgagccgctgcactggcccatgcctcttgataaatggaatgattatcgtcagattaatcggcagatctctttagacagtgattgggtctcttttgtcttcatttgtctcacagagcctcaccttgtctcatttgtctcacggagcctagcctactactttgcacatagtaggggtacatgttttattaaaataagaagcagccggtcagatttggcttccttccttgggcagagtccactgcctgtggatgtgggttatattttactgtggggctcacagggaaacactgctgtccagcccatcctttggagagcttcctgagatttgtcttcatagcctcacatttcatgacccagaatagctcagtgccatccacattcttagggatttcatggttcatcctcctccccaggttgttcattagaatcttagagcaggagaaggggctccaatatgaaccttatccatggacagaaatgcccatttatgcccatacatctggccttgcctggctgtgtaagtgtaagcactgtgtgttgggggagggacccttagaatgggtctggaggccacagcaggctctgttcagggctcagctttgccccagttcaggcaagacaaaacccatcctcctttgccttcagatttttggtttggtgcacgtagaggttcattgttacaacagaaaggcttgcggcacccaaacacagcttttctcttcagcatctcagggcccaaaaagttagagtctgaactttggattagacttccctgaggtttcctgtttggttttgcatttgcatttatattttgcgattatattgtgtttacatatagtttgatgctgcaattttttcccccagttctgggcttgactaacccacccccaggcttgtagctctatttgactgaatcaaaatgcaactgattcttaagtcaagtcttccagttctgactggtttcctgggagtaactagggaccctgtcctgggactcgcagcccttttgtacagtcctgctgggaaggaccctgggcagatcacaggaaactagaatgtcagggctgagggacccttttaagatagagaccagctagaaactctctcagataagatggagtaactgatgtccagagaggccaagagacttggccaagctcctgcggctggatagtgggaaagttagcatttctacccacgtgttctacccccggtcctgttctctttccttttaaagtccatctgtctgtcctccctacgtaacttctctgaaccttgttattttatccttaaaatggatctcttaatcactccctgcttaccttactgggttgttaaagttttttgtgttcaattatgaagcaccatgcaaatgtgagggagtatattaagatagtcattacgtcaaccagcctcttcctgtcttgggcccctttatgcccatcatctcattgatattcacaacaacaggtgaaaccgggcctagggcagtggaggcagctgccctgtgtcacacagtgggtctctctgactctgctgtgctctgcctgggctctgtccagctctctgtgccatctctatggacataaaggacactaaggacataaagatgctactttgatttgctgactgactagggagaagtagcctgttacagggagatcagtaagaaccccaggagtttgtcctgagtccccagagaaaggtacagtcaatgccataagaggcaagtggagcaggagagggagagagcagtaaggactggtgcaatgagggagaagttcctggaggaggtgacacttccaggtggaaggatagatgaaccccatttatcggagaggacaagggagtgaattcagagactggtgggaagagagcatattgggaaccaagtaagccattttgaccagagctaagaattcatactatattgtgtgcctcaaactgctagtggacacaccccctccagtaggtctcagatgaagcagtctgccacaaataggagatcttcaaaggcttgttttgtatatatttttgaaattttaaaagaaagttttaattggacaagtggcataatttattattattttattttttgagacagggtctcactctgtcacccaggctagagtacagtggcacaatcatggctcaccacagcctcaacctcctgggctcaggtgattttcccacctcagcctcctgagtagctaggattactggcgccggcttaatttttgtattttttgtagggttggggtttcactatgttgcccggctggtcttgaactcctgggctcaagtgatctgcccacctcagcctccaaaaatgttaggattacaggcgtgagccactatgctcggccagggcataatttgtaataagtaatttaaaacataacagaaaaggcctatgaacaactatctcaatccctgtattctccccagaggtaattgctatggaaatgtacatgcttcccaatgtatctcctcatggaaaatatattatcagtgggggaatgggagtggctgggggaatgtttacctaaattggtatcaggtcttataatgcacagtttaaattgttttggagttacatttttcttttcctttgtgacttttgcttttttgaatcttgttttagaaaggatttccttcttaatttttaatattcttgtgaattttacagtttgctttgtaaaatgtattttagtgtaaaaattgtgtaatcttagagattgtttgcaagaaacataaaccctgtcaagcttgtttctgttggagggaaatttgtttgtttgttttttgatcgtcagagaagaatattgagggaaattggctttaaagaattagaggtgcctcatgagactgaagagccggaggtaaaagtacacctctccagggcctggaactggaggctgggaagttgtcaggaactaaggcagctgcttcgtcattcttgttctctcctgcctctgcttccctctgcacatctgatcagtgctttcgctcattcatcatcacataggccccaaagcacagcccccatgctcacatgacctcactgggccagtgtctaaaggtaaccggacactagattgagccagtctcatgtcccacttccaagttcctggcagaggttgacagcccggcccagtttctggattgggtccagtggctgggtctccacccctggtttcatcagcagaggtcatggagggaaagtgaccggcagggtaaacatggccattgagacctatggtgtgggagggggcgcttctcagagaagaggggcagggcctggaaaatcccctcagaagtatctatggcgattcctctttatttcacacagtccaggttccagggagaggtgctgtgtccatcctgttctgtacctccctggtttagatcatttatgcatactctcaggtatagaagaacccctttagaaaactcaggtataggagttttttcattttttattttttattttttttttgagacagagtctcactctgtcatgcaggctggagtgcagtggcacgatctcagctcactgtgacctccacctcccaggttcacgccattcttctgcctcaacttcccgagtagctgggactacaggtgcccaccaccacgcccggataattttttgtatttctagtagagacagggtttcaccgtgttagccaggatggtcttgttctcctgacctcgtgatccacccgcctcgtcctctcaaagtgctggcattacaggcatgagccactgcacctggctggagtttttttttaagatagagtttcactcttgtcacccaggctggagtgcaacggcacgatctgggctcactgcaacctccacttcccaggttcaagcgattctcctgcctcagcctcccgagtagctgggattacaggcgcccgccaccatgcctggctaatttttgtattttcagtagagatggggttttgccatgttggccaggcttgtctcaaactcctgacctcaggtgatccacccacctcggcttcccaaagtgctgggattacaggcgtgagccactgtgcccagcagtttaaaagatttaaaagatgagattagaatgctaagggggtgcagcaagacttggagggttttgaatgccaattgagcattctgactttttgttgggcggtgtggaccagtggacccaatcatgttgctcaaggaatggatggggttggccctgccagcatagtgcctgggggactgctccatgccaggccctgtatgaggcactgggcagatgcatcgctcagttagagatgcagtccctgccctgtggaccttacagtcttctggcaaagcccaacagtaagcaggtaaacaaataagtcacagccgggtgcagtggcttatgcctgaatgccagcactttgggaggccgaggtgagaggatcacttgagcccaggagattgaggctgcagtgaactccgatggtgccactgcatgctagcctaggtgatagagcaagaccctgtctccaaaacaaaacaaaacaaacagaaagaacaaataagtcagaagttgctcattgtactaagtggcacgaagactcatcctcctcgtcaaggccttctttgaggtttgttctgggtcctcatctcttcagggaatcttgtccacacgtgtggccttagttacctcccatctccaggtgactcacacatttgtacctgtagcctagatcctcatgtcccagtgcatacttgaccacactcctaacttccctcaggctcccttccagagctgttttcacaatgagtggtgcgacctctcacctccacgtgtgcccctcatcaccaaggaacatcttcttttttttttttttttttttttgagatggagtctcactctgttgctcaggctggagtgcagtggcgtgatctcggctcactgcaacctctgtctcctgggttcaagtgattctcctgcctcagcctccccaaggcagatggatcactggaggtcaggagttcgagaccagcctggccaacgtggcgaaaccctgtctctcctaaaaatacaaaaattagctgggtatggtggcacgtgcctgtaatcccagctacttgggaggctgaggcacgagaattgcttgaacccgggaggtggaggttgcagtgagcccaggtcacgccattgtactccagcctgggcgacagagcaagactctgtcccccgacaaaatattattttattaagatctaatttgtcaatagattttgacttctatgagaatagaaactaatctcactgttgtgtccctagtatttaccatagaaccatagtgtgttttcagaaaatgttggttgaataacaaataaatgaaagaaaaaaaaaaactaaaaaggagcattcatagagaataatggtatgggggtgctccagatggaggggacctcttaggcaaaggtcctgaggcagtaaagaagctgaaatatatgtgaccctgaaagggggcccaaggggcaaaagcactgagatgggcaaagggaagagtggcacctgctgagtttgggtggtggtggcaaggccatattcaagtttgatggccctggtagtgagtttaagttttatttagtacacaggcaagcagcataatccagtttgtattttagaaagatcatatcagttgctgtatggaaactagattggaagggccaggagaggacccaaggaggccattctgttatttagggaagagatgatggtggtgtggatcgggttgtggttggtggaggaggagagaagtgcacagattgtagaagtgttttataagcagtcaagatttgtcgatggagtacatgtgggcagtgctcaagattgtgtcccacatttctttttttcttttttttttttgtttgattgggatggagtctcactgtattgcccaggctggagttcagtggcaccatctcggcttactgcaacctccacctcccgggttcaagcgattctcctgcctcagcctcccaagtacctggggctacaggcgcccgctaccacacccagctaatttttgtatttttaatagacatgaggtttcaccatgttggccaggctgttctcaaactcctgacctcaaatgatctgcccgcctcagcctcccaaagtgctgagattacaagtgtgagccactgtgcccggccttaaatttctgatggaagggtgccatataccgagaaggggaaatctggcaggggaacaggtttggggagaaatcaagaattctatttttttttttaattttttgttttttagagacagggtctccttcttttgcccaggctggaatgcagtggtgcagtcatagctcaccacagccttgaattcctgggcttaagcaatcctcgtgcttccacaggcacatgccaccacatccatgctaatttgtttcttctcttggtaaagatgaggtctcgctgtgttgcctaggctggtttcaaactcttgggcttaagtgatcctcttgccttggcctcccaaaatgttagggttacaagcatgagccacttgtgcctggccaagaattctatctgtatatctttataggtcttgagacatccaagtggagatgtcaagaaggcagtatgtgagtttggaattcaaaggagcgggctggagatacacatttgagagctgttagcatcgagaccgtgggtttcaaacctgcatctgtgtcagaatcacttggcgtcattcccagagagtatgattcagtggtggtatcttaggctttttatggcaagcaagagaaaccatcctgagctgatttaagcagaaaagggctgcactgaaagggaatgttcagtagttcacagaatttctgggaagttggaaaactggggctgggcagcaggcaggatctcagccaaaatcatgccaccgagccagtttggcaggacactgctgccacacactaaatgccatcgctgtgtcactgttccctgaacactagacaccattgctgtggttgccaccagcattggaatggatcttccactgtgctcctgattcaaagtctgtagtgagggcttctgattggttgagcttaggtgtaagggaggctggaaaagcaagaatttgttgttttcagctttcacaggaggtgaactctgccaagacctgtgcagtgaggaagtccccagacataggaaggaggtcagatgccagactggcacacaatgacagatgtacttgacagcaagtttgccagcttgtgggattgtctgggaatctgcatttaaaccagcaccctggaaattcccatgcaggtgctgcctgaaccacatttgcatccattgcttgaactggtacttaaagctgtgggggctgggcgcggtggcccacacccgtaatcccagcactttgggaggctgaggcagggggaccacttgaggtcaggagtttgagaccagcctggccaacatggcgaaaccccgtctcactaaaaatgcaaaaaattagccgggcgtggtggcacgcacctgtagtcccagctattcggaggctgaggcaggagaatcgcttgaacccgggaggtggaggttgcagtgagccgagattgcgccactgcactccagcctgggtgaaagggcaagactatgtctcaaaaaaataaaaataaataaataaataaagctgtggaatggacaagatcacctagagagaggaacgaagaaggcccagacccaagccctggggaccctcggtatcaagagattgggataggaagaggaattaataaaggagaccaagaacgggctgtcagtggggaaggaaggaaataagacagtgttgtgcctcagaagccaggagagaagtgttccgaggagaaggggtgctcggctctgttagatgctgcccagatgcccagaggtaaaataagacaatgacagagacacagcctctggctttggcaacacggaggtcattgggaaccttaagagcagatttatggctcacgcctgtaatcccagcagtttgggggactaaggcgggtggatcacctgaggtcaggagttcgagaccagcctggccaacatggcaaaaccccatctctactaaaaatacaaaaattagccagccatggtggcaggcacctgtaatcccagctactcaggaggctgaggcaggagaattgcttgaacccgggaggtggatgtttcagtgagccgagattgtgccactgcagacacagcaaggctccatctcaaaaaaaaaaaaaaaaaaaaaaaagagcagatttaatgccattttcgcctccacaccatcctggactgatttgaggagggggcagatgagaagttctccctagaaggggagcagagacatagggtgtggctagggccctgggatcagcagggttttctaggatggactggggacccaactccactgaaccagcctcctccctaccaacagcctctgcacagggggccgagggtcttcccagagttgtcaaccttgagcctgtctctcaaagtctccttctctccccaaatttgtctttttttgtgctcacttccttgcctagtgttcagctgtttctggccactgaggtacaaggagacagatgactcaggcagatttggaggcagaaactgtaactttaggtcagagcagaaggaacatgctttccctgaaggcaatttgatcatatcattctcagacaagatgctgctagaaggtcccttcgatgggcctagaacttgggcccagggcagatgagggagtgagacccacaggggaacagtgagtggcttctgtgactctaggtcagggccctggaaaaactgattccacctcaccaacgtcacaggaggtgctttggagggcatgggaggctgagctgggaacagctgctgaaggttctctaacttgactggttttagaccttgaaagagcttttaagaatctcagctgctgcgggctacacccagacccactgaatcagaatctcccaggggcgaggcctgggcaagtgtgcagttcagaagttcccaggtaactgatgagcagttggggtgaaaactattgtggtaagctattgcatgcccactgaaggttagtaatccattaagccatatttactgaatgcctgtggtgtacaaaggcaggctctgagggcacggagagaactagacaaggtctccttctgggtgggaggactctgccagtgaaaagttgattgacaacctgtagcatacagggatgtggctgaggtctgtggcgagagtccagtaactaaagtcagacagacttgggtttgaattcctattggctgtgtgactttgggcaaatgacttaacctttctgaatctcagttttctgatctgtgaattagggatgaagataattgtcttatgggtttgtttgaggggataacacatagaaaatctagcaagcatgaacctagcacgtaacaggtacttagtaattttttaaaattccctcttactgtaaacacaagtacacctgcacatagggtagttaaaaagatcaggaaacatacagagaaaagaggaaagtaattgcaatagggatgaggtaattaccatgagtgagtgttgagattatctgtgcggtcctggcaccagagcaaaaagagaaaccttatgtaccttggaggttttggggaatgaacagctaagcctgattttggacaaggcagggtcttccctcagctctgccctttgctctctgcctcctgttcatttctttgtcaaacatttgctgaggccagtgtggtggctcatacccgtaatcccagcactgtgggacgccaaggtgggaggatcacttgaagccaggagtttgagaccaccctggtctcaaacaacaaagcaagaccctgtctctacgaaaacaaaacaaaacatttgctgagaggctacctagcagttctcagtcctggctgcaccctacaatcccttaggttgcttttaggtagatttcctctcattcaggtaaaattcacataacataaaactcaccattttaaaatgtacaattcagtggccttaagtatattcacagtgttgtgtagtcatcaccactatgtaattccagaacatttccatcatcccaaaaagaaaccctgtattgattagtagttactctccactccttttccccggcccccgacaactttccatctctatggctttacctattctggacagttcatgtgaatgaaatcctactatatgtggccttttttgtctgatctctttcagttgcacagtgttttcaaggttcatccgtgttgtctgggttgtgttaaaaagcaataaaaataggaaaaacaaacacaccaggcagtgttgtaagcacttttcagatattagcacatcataacacagggcctgtccagttatttggatacagagaaggtgtctgctgggcaggaatagctaccatgaagccctttctgtgtgtattatgctgggccacgtgcttaaatgcctgactgagttcagtctgattagatagatgctgttattatgccatttgacagatggggaacatctatcagagaagctgtgtcacttgcctcaggtcacacagctaagaggactggaaccagaatttggactttaggacagtatgacttgaaagccggagtccttaacccttgctgtcttttctatattgccactgggccttgctagtatgtattcatacatttaatcattcattcattccacacatgcttattaacacccacatcctgagttttgtgttgagtgctgcagatacaaaggtaaatgagccattccctgcctttctggagttttcagccccgtagagatcagacatgtatggcaaataagggccaggatactctaatgaaagcctgtagtgggcataggatggaataaaggtaggcaggatcagttctgttgtggtggggagggggtgacctgtaagttgagtcgggaaagatgaagtgtttactagacagaatggggcaagggccctccaggcagagggagcagcatgagcaaaggtctgatggctggaaacagtttggcatatttaggaaattgccaagagttcaatagggatggttttaagggaccagtgatggatagcaagcccaagtggggggcagggagggattcatcctggccaacaagggaacccagaaggtgggaagtactgtttgctgctctgtccaagagggcaggccaggttcttccccaggattgggtggaattcagggcttgaggccaggggtcgggtaggaggaaccttccgcggttagtccagcaaagttcttgttctcttagctcatcaccgccaagcaatctcctgaggaaaatcccagccaggaaacttggggtttgcagaggcctcagcatacatcgagggtgtggctcccttcttgcaacccctcttcctccctgcttcccaccaccccacaagggacagccggtaaggctgagctggtgaggctggacaagtgcccaggctgggaagacgtctgcagaggcctgaccaaggggcgcacggccagtcacaggccccagcagtgcaggaaggaaaacagcaagaggccaggggatcctgaaataataaatgtcagagcatacaggagccttccctgtcaccacccaaacccttcattccagaagaggagtcagaggctcagggtgggaaggagactggccaggtcacaccgcgagacaggggcagggctggggctggccctgggtcctggctcccaggccttgcagtgtagccaccgtaggggctgtggggtggcaagcagggccaagggccaccttggtatggatgaggcagaggggtagctgggaagagcactgccctcctctggcacccccttctgccccagcctggactctcaggtgctgggggtgggggctgatccagaggaaaaccatttggagtctttggctcactcttgctggtggctgaggttggagcagccttgtagggtatgactaacctcaactgtgtcctagcgctttggcctggaaggggatttagagctcgtgtctgttagctcaaaattggacagatgaggaaactgaggcatagaaggaggaaggaactcgctcagaggcacactgagggcttaatggcagagacagccctaaaattcagcactttccagttcagggctcttggtctcatggccttgttctatatgcagtagaaggccattctctcagaatgtttctgcagcacctctgaagatgcctggcttccaccattagaaaaaacattacctcaatttcttttcacagcaatccttacagagataactggggctcagagagagaagatttagctcgtagtttgctttagtgtgatagcaagaaagggctctggaggcagaggtctctgcgtttcttagaacttcctacatgaccttgagcaaactgcctaacctaccccagcctcagtttcttcatctgtaagatggggaggataataactacctcacagagttgttgggaggaataggccaggtaacaaacataaaatgcctgccccaaagtgagcagtcagttagtggggcgataggtagttgaattcatgctaataatagactcaagctgggagcttggaatgggagtccttcctgttgggtgatctgctccgggccagggcctggctgtgttcctatcaccctgtcatgcctgggggacaaggctgaaccctctttgtcccgcttgaacatggatctgcagcccagccctggagttaaactttctatgttgagaattaccaagtaactgccctgttcagaacccttcaggagcaccccatcacttatagaataaaacctagaggtttggttaaaagcatggactctggagcccaactgcctgggtttgagtttattttatttattattattgttattattatttttgagatagggtctcgctctgttgctcaggctggagtgcagtggtgcaatcagagctcactgcagccttggactcctgggctcaagtgataccctaccttagcttcccaagtggctgggactacaggtgtgtgccaccatgcctggaaaattgttttgtattttttgtagagacagggtttcgccatgttgcccaggctggtctcaaacttctgggctcaagcaatccacccacttgggcctcccaaagtgctgggattacaggcaggagccacaacacctgacctgcattttctgtaaattggtaattggatctagaagtgagaagccctgggttttttttgtttttttttttgtactttatcattttgttaaatattttaagtgtaacttggtttgctcattcaggtattgtactttttttttttttttttttttgagatggagtctcactctgtcacccaggctggagtgcagtggtgtgatctcggctcactacaacccccacctcctggattcaagtgattcgcctcagcctcccaagtagctgggactacaaaaattagccaccacacccggctaatttttgtatttttagtagagatagggtttcaccctatctcaactaaaggatggtctcaaactcctgacctcgtgatcctcccacctcagcctcccaaagtgctgggattacaggcgtgagccaccgcaccctgccaaacgttgtatttttagcatcatgtttaatatgtagtacatataatttaatcatctttgtggacactggcgtcagagaccaaagagccaggattcagccatcccacaggaaaactcctttttagcgttggagtttcattgatcttcccacatcacgtatactgttagtattgattgattgaaaaatatgggaaagaacaaatgaattcaagaatgcttttaaagggttctgtgtcttattgatcatagagttgcacatatttggaatgtggtcagactaatttgtgaaacatttttatactcgtcagtagtgctcatgatgagtgtggcttcacagtgtcctgctagtaacaccatggaccttcagggtctgggtccattgcctggaaatgaacaagggagttagagtcttaacggtttagttcccaggtccacattttggctgtgtgagctcaggcaatgatcttcactgttctgtgcctcgctgactcatcagccagatgggaacaaaaatgatgactgccccattaagatgctgtgtgtctgaaatggtgggtgtcaaactcccttacaaactgtaaagctctatacaagttttaggttgtattttttttttctttttctttttttttttttttttgagacggagtctcactctgtcacccaggctagagtgcagtggcgtgatctcggctcactgcaacctctgcctcccgggttcaagcagttctctgcctcagcctcctgagtagccgggactacaggcacctgccaccacacccagctaattttttttgtatttttagtagagacggagtttcaccctcttgaccagggtggtcttgaactcctgacctcgtgatccacctccctctgcctcccaaagtgctgggattacaggcgtgagccaccacgccgacctagtttgtatttgtttcttagtttgtttgcatttccagtgaaacctggggcaagaaactcacctgagcctttattttgcagtctgtaaaatgaggaggtaatgttagataatctctaatattctgtgacttcgtctcttaaggaacaacaccatagtccaaagcaaagatagaaaatgtttttcatctcctctgccaactctagtttaattggtagaggctaccatcatatcttaacagaatgatgaaccaaatccacagtcagtggggaaaacactgtgatcgattaataatggctataatgggccaggcgtggtggctcacgcctgtagtcccagctacttgggaggctgaggcaggagaatggcatgaacccaggaggtggagcttgcagtgagccgagatcacgccactgcacttcagcacttcagcctaggcaacagagcaagactccatttcaaaaatagtaataataataataataataataataataatggctgtaatgggccgggtgaggtggctcacgcctgtagtcctagcactttgggaggctgaggcgggcggattacctgaggtcaggagttcaagaccagcctggccaacatggtgaaacccctgtctctactacagaaaattagccaggtgcagtggcgcatgcctgtaatcccagctactctggaggctgaggcaggataattgcttgaacctgggaggcggaggttgcggtgaactgagatcacaccactgcactccagcctgggctacagagcgagatttcatctcaaaataataataataataataatggctgtaatggtcatgggatgacacagaagtgataactatgtactatattataatggtccaaaggaatgaatgtctaatggtgaaatgtaatctgtatctcccaaggccttagctctagcagctctgcccccttggcttgagttgccttggtaaccacagctggctctgagaaaccatgggaatgaagaatgggtcctattgatgaatcctgacccagaagggggcatgcagaaggcccttctaggcagggcagctgggcatggcctagtgctgccatctgtggtcttttgcctgcagagaacacaaaccagagagccagagcatggtgtgtgtgtatgttgggatcagggtaggggacacaaagggcagtgccagcagctggaatttaggccttgtttagggccagccagggtaggctgcccaaaggactccagtgggctttccaagctcagacgtgtctcttacactaagatgtgtttcagccacctttgcccagtgcctgccaggctcttgcatggatccattgactcttagctttgaatgaaatctaaatagctgtccattctaatccaaaatccagtgtctgaatcactctctagcacctaaagtatttgaatacttcaagtgacagggagctcactgccttcaggggtggcctgttcttccttagaaatgtcccctgtttgagctgaagtctgtttctgcctccctaacttccacctctcagtcctgggaatcctctctgaggccagcctgaacaaatccgttttcttttcagtaggacatcctttacagtgtttgtattcggggcctcaccattgctgtcaaccttgttttccttggacagatctccctctgtgccctgccttctccctttcctaagcctgaggggatggtgagggaatatggtagaggtggtagaattgggatttaggtttggaggcagatccagtcccaagatcaaataagctgtgccccctaactttgtggggcagcttagagatggggaaagaacattggccctggatttggctagtcctggatttaaattgtaactctgggccaggtgcagtggctcatgtctgtaatcccagcactttgggaggccgaggtgggcagatcatctgaggtcgggagttcgagaccagcctggtcaagatggcgaaaccctgtctctactaaaaatacaaaaattagctgggcatggtggcacacgcctgtaaacccagctactcaggaggctgaggcaggaggatcgcttgaacccaggaggcagaggtggcagtgagctgagattgtgtgtctgcactctagcctgggcgagagtgagagtctatcccccccccaaaaaaaaagaaagaaaaaaaagaaaaaaagttacagctctgccactgttcatcactgtgtgacttggacatgttcctcctcctgacagcttcatctttaaaatgggaatggcaatgccttcctcaaagagtggccaggatagtgacaagtaatgaggctgcacagagcaggcacttgggacatgctgcttgcactctccctgcccggcggcagaggtctgctgtggtccctctccacctgtgcttccccacagcttgctgacgaggatcaacatggagttgggggtgtggggagatatgtttaattaattcaatgaaagttgagaaattcctaaaccaaattcaatttaattttgaagtagataacatttttagttatcaaatagtggacagtattctaagcactttacctatagaatttacttaatctccccagtaaccttatgtggtacgcaatattatcatcttcattttatgaatggggaaattgagggactgagagatcacatcaggtacctggtggagctggaattcaaatccaggtagtttggggacagccccatacttttagcaatgatgatgtactgcatctctgaagagaattagaacagtaattcccaaactttagcatgcattagaatcacctggagggcttgttaaaccacagattgctggacctcacccccagattttctgattcagctggagaatttgcttttctaacaagttcctggatgatgcctgctgctggttgagggcccccaccttgagaatctctgactatcagggattaaatgggcccacctgaacccagaagctgatttttttttttttttttttttttttttttttttttaagacagtgtctcattctgtcactcaggctggagtgcagtggcatgattatagcttactgcaacctcgaactcctgggctcaagggctcctctcatcccagcctcccaaatagctgggactacaggtgtgtgtcacagcacttggctaacttttttaaaaaattttttgtaatggtcgggtgcagtgcctcatgcctgtaatcccagcactttgggaggccaagacaggaggatcagttgaggtcaggagtttgaaaccagcttggccaacatggcgaaaccccatctctactaaaaatacaaaaattagccgggcatggtggcgggcacctgtagtcccaactacttaggagcctgaggcaggagaatcgattgaacctgggaagtggaggttgcagtgagccgagatcacaccactgcactccaacctgggcaacagagagagactgtgtctcaaaaaaaaaaattttttttttttttggtatagatcggggtgggggtctcactttgttgccgaggctggtcttgaactcctgggctcaagcgatcctctcaccttggcctcccaaagtgctgggatgataggagggagccgccacacctggcttttccttcatctatccagtttcatgggaaacgagggctgatctcacacagaggcagaaaacaaaccacagtaagaaccatactcatgttttccaaatgcctcaagccttgccatgtttgtgatctcattaagcctcacagtaattctgtgagttaagcagagaatggatttttctgcctgtaatcccagcactttgggaggccgaggcaggcggatcacgaggtcaggagtttgagaccagcctggccaacatggtgaaaccccgtctctactaaagataaaaattagccaggcatggtggcgggcacctgtaatcctagctactcgggaggctgaggcaggagaatcatttgaacctgggagacggaggttgcagtgagccgagattgtgccattgcactccaggctgggcaacagggcgagattccatctcaaaaataaaaaaataaaaaaataaaaatctattttaaaggagaggaagtttagaaaactagctgggctagtatcacccaaggagataattttggagatgctggggctagaatcttagttactgactcatcatagcactctggaaacctctgcctttcctcaaaataccttcctttccccaggctactatcagaatcgtctccttaaaactaaatttttttatgagtgtgtggatgagtggattaaaaaaaaaaacctgcatttctttagcttaaatctttgagccctattataccacaggataggtgttatcaaccagtgtaaatgattttcagatattttcttgagaaaggagtaattagaacttttcccttttcatgctccctatgggcacttgcatgttcttaagtctgtggttctcttgaaggaaggggccatgtcttatgtgtccccaccatctggcaccatgcctggctgaaacagtcaccaagaaatgcttgttgaaatgaatgaatgaatggaggaactatgttcctgtccttgtccattcttcccagagcacgcctcccttcctggcagtcctaccattttttaccaagcattccctcccctctacctcatagtgtagtctctttagtctcttttctgcctgtccaggggccagagttaagcaacacagcttaagggacgccttccccattccttcaaagcagacatggctctgttttccctggactcccaggaaccttccatcatagccctcatcacattgcatgataagtgtctgcttataatggctttttcttcccttcaatgatgatgtccttgagagctgagattgtgtcttttttgtttgttttttgagacggagtctcacactgccctcctggctggggtgcaatggcgtgatctcagctcactgcagcctccgcctcccaggttcaagcgattctcctgcctccgcctccctagtagctgggactacaggcacatgccaccatgcccggctaattttttgtatttttagtagagacgtgttagccaggatggtctcgatcttgacttcgtgatctgccagcctcagcctcccaaagtgctgggattacaggtgtgagccactgtgcccggctgagattgtgtcttttttacacagggtgtagtgggcactcaataactaattgaatgaataaacagccatgtgaacttggctgccaagagcagtagggacgggaatggtatctggctgggaagctgtttcctgatagatgtctgacaagggcatcgaaaaacagtttgtggccgggcgcggtggctcacgcctgtaatcccagcactttgggaggccgaggcaggcggatcatgaggtcaggagatcgagaccatcctggctaacacggtgaaaccccgtctctactaaaaaatacaaaaaattagccgggcgtggtggcgggcgcctatagtcccagctactcgggaggctgagtcaggagaatggcgtgaacccgggaggcagagcttgcagtgagccgagattgtgccactgcactccagcctgggctacaaagcgagactccatctcaaaaaaaaaaaaagaaaagaaaaacagtctgtgagtgattcgggtgacttgtctccctttaccagttagagctagtttcagccacaagtggcagaatacccagtataacagtggctcaaataagagatttctctttcatattaaagaattccacagataagtagactggggctgctagggtagtttcctaatcactagggacaaggctgatatcttgttgctccgccatccataacaaatggcttctacttcatggtccaggattgctgcctgagctctagacatcgccagcacattgtagccagaagaaaggggtgacagagggtacccttgcattccccttttttcttttgttttttttttttgtgggggggtgcgtttgagacagggtcttgctctgttgcccaggctggagtgcagtggcacgatcacagctcactatagcctcaactccctggggtcaaacagtcctcccacctcagcctcctgagtagctggaattataggcccatgccccatgcctggtttttaattttttgtagagacagactctcactatgttgcccaggctggcctcgaactaggctcaagcaatcctcccgccccagcttcccaaagtgtgagattacagccgtgagccaccccaccccaggccctttttttctaaattaaaaaaaatcgactttattttttagagcagttttaggttcacagcaaaattgggcaggaagtacatagagttaccatatacacacagcctccccctctgtcaacagctcttaccagagtggtacatttgtttcaatgaccatacattgacacatcatcaccaaaagtccatagtttacattagggttcactcttagtgttgtacattctgtgggattggacaagtgtataattccatgtatccaccattatagcatcatacagaaatgtttccctgccctaaaaaccctctgtgcttcacctgttcctcctcactacccccatccctggccaccactgatctttttactgtctccatagttttgccttttccagaatatcgtatagttgaaatcatgtagtagccttttcaaattggcttctttcacttagtgatgtgcatgtaactttcctctgcatcttttcatggtttgatagctcatttcttttcagtgatgaataatatttcactctctggatgcatgacaatttctttatccattcacctactgaaggacatcttggttgtttccaaattttggtaattatgaataaagctgatgtaaacatccgtgtgcaggtatgtatacgttttcaactcattgagaaaatatgaaggagtatgattgctgactcatttggcaagagtacgtttagttaagaaactgtcaaactgtcttccgaagtggctgtaccattttgcattcccaccaacaatgggagtttctgttgctccacatctttgtcagtatttgtgttttggggttatttatttatttatttgtgtgtgtgtgtgtttttgtttggttttttttttttttttttttgagatggagtctcactctgtcacctgggctggagtgcagtggcactgtctcagctcactgcaacctccgcctcctaggttcaaatgattctcctgccttagcctcccgagtagctgggactacagcggtgtgccaccacgcctggctaatttttgtatttttagtagagacagggtttcaccatgtttgccaggctggtcttgaactcctggcctcaagtgatccaccagcctcagcctcccaaagtgctgggattataggcgtgaaccaccgtgcccggcctccctttgccagtatttggtgttgtcagtgttttggattttggccattctaacaggtgtgtagtccctcccttcctttttatttttcaattttttaaagccactttattgaggtaggattgacatgtaaaaagctatacatagtcagtgtatacaacttgatgagtttgggggttatctcccttctttgtaagatactttttggaagttaacaattaaaatattatattccatggccaggacttagtcccatgaccacagttagctgcaaggtaggaaatgtagtctttattctaggtcgccaagtggccatctgaaaagtcaggtttcttgtgaaggaagaagagagaatggacactgggagccacccagtgatctctgccacactgcagggaagggaaatcttctcaaacttgcttaaaggaacttcgttgggtggattcaggggtatttcatggaatttcaccaaagacataatgtgtggaggttgcctctgaagaggtagcatctggaaagttgccagaaaccagcaccactcttcctcttctgccttgctgtggcggtgtggggcttgttcatgtctttctacacatctgctctgttcttttctctctgcatgtggcaggaaggacatcccagctttagcatttcagtcagtcaactagctttccagagcccaattccaaagtccttggagagagaatctgattggtccagcttgggtcaggtgggagagagaatctgattggtttagcttgaaccaggtgtctgtcgactctggctagaacaaacaaggctgcaggggcccacctccagaggaagggagggcagttttcagaaaatgggtgtcatgggatgggaagactcctcagaatgtatctagagcatgaacatactcctctcaggtccatgtcccaggactttgcaaaccatcattcatttaggtaaacatttattgggcaccttctgtgtgctaggtacatggatctgccctctagggattttggaaatttttttggaaattgttcatatcttttttttttttttttttttttgagatggagtctcgctcccattgtgcaggctggagtgcagtggtaccatctcagctcactgcaacctccacctctcgggttcaagagattctccttcctcagcctcctgagtagctgggattacaggtgtgcaccaccacgcccagctaatttttgtatttttagtagagacagtgtttcgccatgttggtcaggctggtcttgaactcctgacctcaggtgatccactgccttggcctcccagagtgctaggattacaggcgtgagccactgtgctggcccagttgttcatatctttaacctgaattgtcttttagagcgaaatcatagctccttaaattactcaccttttagctttccaggtttcaagatggggatcaagggatttggtaaacacatgcttctgtttccccatctggattttggggaaccatagaagtggccatgttcttgcctctttttttttttctttttctgttggccagtttagaaagaaacgttctcccctccacctctttgtctctttagtaagaaacattttggttgttttttgtttgtttgctttgctttttgagacagggctctctctgtcacccatgctggagtgcagtggcgcaatcagggctcactgcagttttgacctccccaggctcaggtgatcctcccacctcagcctcccaagtagctgggactataggtgcatgccaccacatggagatggggtttcgccaagctgtccaggctggtcttgaactccttggctcaagtgatcctcctgctttggcctccccaagtgctggaattacaggtgcaccccaccacacccagctaatttatttattttttcttttcggtagagacaaggtctcactatattgcctaggctggtcttgaactcctggcctcaagtgatcctcctgtttctgcctcccaaagtgctgggattataggcatgagccaccatgcccagcctcatgttttaaccaactcaaatatgatgccgtctccttaatcttcctgattcttttgttttctttcttcagccctgggatgggcctccacggatctcaaatatgaaagtgtctcaagttcacacccgaggaggagaatgttagatttctagcccctgtaggaaaagcacctggaacttggcagaccttcctagcatcagcagcagctgatgataacgatcacaggtgctgttcattttgaacatactccatgcctagcaccaagctaaatcctgtatttgcatcctctcatacatatagccctcataccaaccctgagaggtaggcatcgatttccccattttacacatggctaatcaggaagctcagaaagaataggcaacttgtgcccgggcacggtggctcatgcctgtaatcgcagcaccttgggaggccgaagcgggtggatcacttgaggtcaggagtttgagaccaacctggccaacacaatgaaaccccgtctctactaaaaatacaaaaaattagccaggtggtgggcacctgtaatcccagctagtcagaaggctgaggcaggagaattgcttgaacctggcaggcagaggttgcagtgagccaagattgtgcaactgcactccagcctgagcaacaagagcaaaacttggtctcaaaaaaaataggcaacttgttcaaggtcacatagcccccgagtagtggagctgagcttcgtaactagaccccccttcctccagaggcttcccacatgccaccggcctctgagaacactccacattgcctctgagttctgccctatgcatgttctcctgtgggtatcattttgaatctttggcagtaccatttccaatgtgtttactaactcttgtcatgtaactctggaaatcagactctgatcccattttatttttgtcactgggaagaacagctgggctggggtcagggtggggctgtggtacatggatggaacactgttctgttgcacccgggaagtccagctctgtggcttccccaccatgtgtctctcggtaagggcctcccatctcttggcttcagttttctcatctgtgggccccttccagctcgacattctgtgttttccaagttaactgtgcatttcgcaaggatttcatgaggttgtcaacttccatgccccactgaaagggggagtgtttcccatctaggctgagcctgcttggggcatgtgagacttgcttcttgccatcacatctctggcctttcccacattctgatgtttgttctgcagcctctgggctttggggttatctggtgttgtctctccagttctccccagtggtgatggagtgtgctcccgccaccctctgccatctccccagactcaggtaactgaatgcctccaacccctctctgctcacccatagcatcctggcctcttcctccttgtcctgacataactgtttattgagcctggggtttggtgaacaagtgtaccctgctttgtatcttaagggaagatagagatgtgtgtgttctcccctctggccttttgctcagcattttgtacatatttacaaatcattcatcttctcagcaactccacaagtcccctagtatcatccccattttgtagacaaggcactcaaggctcagagaagttaacagatttgtctaacggacacaccagctactgccagaggcaagattcaaacccaggcctggcacaccctgtcatgccacgtacctttgactcactacatttacgctgcattggattcagggagaaaagtctgtggtcttcttggagtggtgtgactggtctgtggtttctgtgtggttttttgtttggtggggtaaacaggaagaccctagggataagttccagaggacagcaaaactcaatgtatttgtttggagggcggttggggggtggaaatcatagatacagcgttcctgaaggaagcaccctattccagcttggcatccctgaacctctgtccacatttgcttccagatcttggaaggagaccaagccatcctgcagagaataaagaaggctgtgcgggcaatccatagctccggccttggtaagtgagcctcctgggtgccccgcctggtcaggaagcccctctcccagccccagcctggagctaactccaagctcccgtctgtacctccacaggccatgtggagaatgaagagcagtaccgagaggccgtggaatccttaggcaacagccacctgtcccagaacagccatgagctgtccacaggcttcctaaacttggccgtgttcacccgcgaggttgctgcgctcttcaagaacctggtgaggcccctgtctcttccttgcccagactcagggtaaatctagtggtcttaagaacctgactgggaaagggtccgtttccttccttctcccaatttgcccttgatctctgacctgagttcagacctgaggtccctttccagccctgacccttcttttggataatcctcctttctctctggcttcttacccaactaactcttctctctgttctcctccttctcttcacccaggagcagagggggtctcacagcagggaagagccccgtgcaagggagggttccctggaggagctttgggataaaggagagacaggctcgggggttcctacctttataccactactgctgccactgccaccaccaccgctgccaccgcctcctcctctcctcactccctctttgtcctctgctttcccaatccacatctgcttcgtacttaaatcccaggacctgtccctgcctccacaagcgtctcagcccctgtacatggcccagtggcctcgggttgcttcccgatggcctccttggtgactgcctcctctctggtccttcaagtcctttcctcaaggccaccctgtgacagcagctcttcccatgtgcaggcacagttctcactagttcatgtgttcactcattcgatccggatgcacagctctgtggggctggtgtgactgttgtctccaccttacaggctaggaaactaggacctcaaggttaagcagcttgcccgaggtcacacggttcggtttgaacccaggttgtctggctccagagtccaagcataagcctggctacactgcctcccaggaaagcctctcatctccctccaggctccatggcactggaccagctcttgtggctccagtcctacccagcatcctccctggttggcaggggccacatcatccttgagaggcagtgtgctcagtggttaagcacccaaccttggacctagactccagcttggaatcttcactctgctgcttactaggtcaagtcactcagtctgcccaagccccaggtctctcatctgtgaaactgggataataatgctgcctacctcacagagcggtaatgaggattaagcaagttagtgcctactttatggtaagcgctcagtaaatgttggctaatattatattaatggcaaaacagcaattacttttgcaccaacctaataaaatctatcattgttatagctcttggcatagctgtgcctcgtacactgtcctgcatgtaaaaagcctttaacagtgtttgaggctgggtgcaacatttcaaaccttaatcccagtggtttaggagcctgaggtgtgtggatcgcttgagcccagaagctctagaccagcctgggcaatgtagtgagaccctgactctacaaaagtatgaaaattgccgggtgcggtggctcacgcctgtaatcccagcactttgggaggccaaggtgggcggatcacttgaggtcagagattcgagaccagcctggccaacatggtgaaactgtctttgcgaaaaaatacaaaaattagttgggtgtggtatcaggtgcctgtaatcccagctactcaggaggctgaggcaggagaatcacttgaacccgggaggcggaggtggcagtgagctgagatcatgccactgcactccagcctgggtgacagagcgagattccatctcaaaaaaaaaaaaaaaaaaatgccaggtgtgggggcgtatgcctgtggtcccagctactcgggatgctgaagtaggaagatcagtttagcctgggggaagttgaggctgtagtgagtgtgatcacaccactgtgctccagcctgggtgacaaagcaagaccctgtctcaaaaaaaaaaatagtgtttgagttcaattgaattagtgtccttctttgtcttcacctcttctctccctgtttcagtcaaactagtgtttcctgggggtctgctgtctagtggacattgtaccaggggttggtgacacaggaaagtgtcagactgcctcagagagccacagtctagtgggggagagaaaaactagggtgtggactagtgtcaagaaataccagcagcatggcacaaactcaaggacccagcagctggtgtcagaggcctagtgctgccatggttcagaaaaggggagatcagcatagaccaggcgggaggagtagccaggagagacttcctggaggaggagagacccaagctgtaccttggaagctggttgaaatattaggcctctttaggttgcgaaatcacagaaacccaactcaaactaggttaaatttttaaaagggaattcattagcccctgtaatgagaagtccaggggcgcagctggcttaggctctatcctttcctcttaaggtagtttctctgtctctgctcagtggacaggatagcccagcaggcccagatgcccatcttaccaaaataaagatggtctttctcccacaacttaggcagaaaaatcccagcgaggattgtgattggctggcttgggtgcgtgcctgttccctatccagtccctctatcctggggctggggtgccctgctcagatctgacttctgcgtttaccccatctgaccacagaggaggagttccccacaggaaagggggttctatgaccattaataggggaggctctgaagcgttagccagcccagaacaacagacgtgcactacaggtcaacttgagagagtcagagaggagaagggaggctgctcctggcgaggaacaggggagagattgactgtgggatgctgctggagcagtgcagcgatgaggctggagccatcagggaaggggctcactctgacacacctcggcctcccctcctgccccctttcacacaggaagcctggcgggcagcaggtcagccatcctaagcagaccccagagctggatcctctagtccccccccgcaggctcagcactcctgccatgacggtcccccttacttggctgtcatctctttgataacatcttttcctctcccctacttcccttccccgctgctctctttgccaagtgatgcttcactgtacaccgaatccctaggggctggatgccggtcacctgaggcgggaatgagcgtctctgttttttccagattcagaacttgaacaacattgtctctttccccctggacagtctgatgaaggggcagctgagggacggtcgacaggtgagtctccatgctgggagtggtggtgggacagagtaaaagaggggtgggcaggagactgttggggggcagggctggactgagggtggaggccaggtgaaggggctgtcttagcgggagtgatgagcctggggaggtctggaggacctggctcgggtcagcctaggatggctgacctgctgtctgccaggccccttgtgtgaaacatgtcatgtaaatcttacaaccatcctatgaggtaggctttgtgggtacactcatccccattttgcagttgaaattcgaggccaagggagttaggtaacctgctgatggtttacataactaggaagtagagagcccatgtgggaatccagggatcctgaatcccatactcgagctgctttctctgtgcctggcagcccttggctggatgcagagtggagctcaaagaaggtgacagaataatctctctgggcaatctgccccagacggcccaggggaggagccgtgctcccccaagagggttccctccctgccctaggctgccagcgtggcaccagcctgctaaccacacaaaccagacaggcagctttttcaccttgggagtctcggggttgttcagaagggtgtgagcagcctggctggatgaggcttaggcaagctaggcagggggtagtcaggtctccctggtttgctgtatggcctggggtagacttctcaacctctctgtgcatgttccttgacctgtacccttgctctaagaggatgatctagcaccaggcaggagaaaatgctgggctaaagttaggcagggggaatttggccttcatcctcccatcctcatggtcatgactgatctctcttctgagcaagaggactcagggtagagcccaaagatctcttcacaccccaagccatggcccaccaaacctgactgattcttggcatctctggggaggagaaggtctgctgggaggagggccttagctctgagaaatggggtcagctgagcctgtttggtgggggcaggtttgcagcaggactgtgggggcaggggctggttagagaagggctctgagcagctcaggggagcacactagcaggtcctcctacaggcagcagagcatactgtttattccagtgctccagcttccctctgggcaaattgtccttttttaacccacaggattccaaaaaacagctggagaaggcatggaaggactatgaagccaaaat

SEQ ID NO: 15463 - DNA, 56002 bp, Homo sapiens
aggatttggaagacccagagcgggatgaaacgggacagagccctgaaggggcagggatgggggaaggcggaggagtttctactgaggccaggggtggggcatcgcgccagggggcggggtctgaggcggtgaggggctgggggcgtggcctagggggccggcgaggggccggggaagcggcctgacgcggtgcggggccgggaccggggccggagcctggaccttggcggtggaggaaggcgaggagccgggggcggggccgtcccagctgaggagcggagagcggctggagggtcgggggcggggcgtgcggaggggcggggcgtgtggaggccgggacggcgcccccggccggcggtgaggccggctcagcgcggagcagctcagtgccccccgcgccccgctccggcagctccacgctcgcgcccgccatgccggagcagttcagcgtcgccgagttcctggccgtcaccgcggaggacctcagctccccggctggggccgccgccttcgccgccaagatgccccggtaccgaggggcggcgctggcgcgggaggaggtgagggggccgaggcgggaggggtcgggggtcggcgccgggcctggccttgacctccacaggcgtgtcgcacccgagctgcgatggcccttcaccgcgccccgaaacctgccccctccctaggtctgggaggaccgagcgcatctccaacagctgcgtcctcaccgtcgaggcgggggaaggcccgagggaccgttttggggggcctcgaggtctcttcgatgacaaactccacaggtcgggggacgtaccccaagtgccccgcgtgaccgcctcatcacatatgtgtttgcctagcgccttccagcctcagtttgcgttttcatcttcggagccccacaagtgtgccccccgagtcactccccttctgagaggcaggcttcccgcctcagtcctgaactttcttccccccggctgcagagaggccccctcccgcttgcggctggttcggagatttggcccgcgtttgtggaatgaatgcggatgggaaggcgccaggagccggggttcaccttggccgggctgttggcaagtttatcgtctcctctcccctcccctctcctctttgtctttcccagcaaagcgtcccaggccttttctttcggtcttgcaggctgccccaccccattcccatgctcttcggagttccttccattcctcttctctgaacctgctgcagctttccgcagctcctctgcaaagaatattctaggacagacaccccgtggccttggtccaacggagaataatgtgtttttgcagctccccatccaaaggatgccctcaatttgggtggcattttggacctcagcaacggctctagccttccacccttcaccttaagtgtactaggcacccactgcgtggcagatacaaagctcagtagttcataacaccctgcgccagtgtcaggaaatctgtcctcttctctcttgtcagggtgaccctccatctcggagtctgtttgtatcactttgtaagggtgatagaggattgtggaaggagcatcgactttggggaaggcagaccttttttctttccttttttttttttgagacggagtctcgctgtgtcgcccaggctggagtgcagtgacgcgatcttggctcaatgcaaactccgcctcccaggttcacaccattctcctgcctcagcctcccgagtagctgggactacaggctcccgccactacgcctggctaattttttttttgtatttttagtagagacggggtttcaccgtgttagccaggatggtctcgatctcctgacctcatgatccgcccgtctcggcctcccaaagtgctgggattacaggcgtgagccaccgcgccggccaaggcagaccttttttcaaacgctggctctgcagtttgccatttgggtgaacgtgggcatgtgacctgtcctgtcatctgtggaatgggggtaataatgtgtacctcacatgagacaatgcatataaagcatgcatcttttttttggagacagagtcttgctctgtctcccaggctggagtacagtggtgcgatctcagctgactgcaatctctgcctcccgggttcaagcaattctcattcctcagcctcccaagcagctggaattacaggcatgctccaccacacccggctaatatttgtatttttagtagagacagggtttcaccatgttggtcaggctgttcttgaactcctgagctcaggcagtctatccgccttggcctctcaaagtactaggattataggtgtgagccgctgcactggcccatgcctcttgataaatggaatgattatcgtcagattaatcggcagatctctttagacagtgattgggtctcttttgtcttcatttgtctcacagagcctcaccttgtctcatttgtctcacggagcctagcctactactttgcacatagtaggggtacatgttttattaaaataagaagcagccggtcagatttggcttccttccttgggcagagtccactgcctgtggatgtgggttatattttactgtggggctcacagggaaacactgctgtccagcccatcctttggagagcttcctgagatttgtcttcatagcctcacatttcatgacccagaatagctcagtgccatccacattcttagggatttcatggttcatcctcctccccaggttgttcattagaatcttagagcaggagaaggggctccaatatgaaccttatccatggacagaaatgcccatttatgcccatacatctggccttgcctggctgtgtaagtgtaagcactgtgtgttgggggagggacccttagaatgggtctggaggccacagcaggctctgttcagggctcagctttgccccagttcaggcaagacaaaacccatcctcctttgccttcagatttttggtttggtgcacgtagaggttcattgttacaacagaaaggcttgcggcacccaaacacagcttttctcttcagcatctcagggcccaaaaagttagagtctgaactttggattagacttccctgaggtttcctgtttggttttgcatttgcatttatattttgcgattatattgtgtttacatatagtttgatgctgcaattttttcccccagttctgggcttgactaacccacccccaggcttgtagctctatttgactgaatcaaaatgcaactgattcttaagtcaagtcttccagttctgactggtttcctgggagtaactagggaccctgtcctgggactcgcagcccttttgtacagtcctgctgggaaggaccctgggcagatcacaggaaactagaatgtcagggctgagggacccttttaagatagagaccagctagaaactctctcagataagatggagtaactgatgtccagagaggccaagagacttggccaagctcctgcggctggatagtgggaaagttagcatttctacccacgtgttctacccccggtcctgttctctttccttttaaagtccatctgtctgtcctccctacgtaacttctctgaaccttgttattttatccttaaaatggatctcttaatcactccctgcttaccttactgggttgttaaagttttttgtgttcaattatgaagcaccatgcaaatgtgagggagtatattaagatagtcattacgtcaaccagcctcttcctgtcttgggcccctttatgcccatcatctcattgatattcacaacaacaggtgaaaccgggcctagggcagtggaggcagctgccctgtgtcacacagtgggtctctctgactctgctgtgctctgcctgggctctgtccagctctctgtgccatctctatggacataaaggacactaaggacataaagatgctactttgatttgctgactgactagggagaagtagcctgttacagggagatcagtaagaaccccaggagtttgtcctgagtccccagagaaaggtacagtcaatgccataagaggcaagtggagcaggagagggagagagcagtaaggactggtgcaatgagggagaagttcctggaggaggtgacacttccaggtggaaggatagatgaaccccatttatcggagaggacaagggagtgaattcagagactggtgggaagagagcatattgggaaccaagtaagccattttgaccagagctaagaattcatactatattgtgtgcctcaaactgctagtggacacaccccctccagtaggtctcagatgaagcagtctgccacaaataggagatcttcaaaggcttgttttgtatatatttttgaaattttaaaagaaagttttaattggacaagtggcataatttattattattttattttttgagacagggtctcactctgtcacccaggctagagtacagtggcacaatcatggctcaccacagcctcaacctcctgggctcaggtgattttcccacctcagcctcctgagtagctaggattactggcgccggcttaatttttgtattttttgtagggttggggtttcactatgttgcccggctggtcttgaactcctgggctcaagtgatctgcccacctcagcctccaaaaatgttaggattacaggcgtgagccactatgctcggccagggcataatttgtaataagtaatttaaaacataacagaaaaggcctatgaacaactatctcaatccctgtattctccccagaggtaattgctatggaaatgtacatgcttcccaatgtatctcctcatggaaaatatattatcagtgggggaatgggagtggctgggggaatgtttacctaaattggtatcaggtcttataatgcacagtttaaattgttttggagttacatttttcttttcctttgtgacttttgcttttttgaatcttgttttagaaaggatttccttcttaatttttaatattcttgtgaattttacagtttgctttgtaaaatgtattttagtgtaaaaattgtgtaatcttagagattgtttgcaagaaacataaaccctgtcaagcttgtttctgttggagggaaatttgtttgtttgttttttgatcgtcagagaagaatattgagggaaattggctttaaagaattagaggtgcctcatgagactgaagagccggaggtaaaagtacacctctccagggcctggaactggaggctgggaagttgtcaggaactaaggcagctgcttcgtcattcttgttctctcctgcctctgcttccctctgcacatctgatcagtgctttcgctcattcatcatcacataggccccaaagcacagcccccatgctcacatgacctcactgggccagtgtctaaaggtaaccggacactagattgagccagtctcatgtcccacttccaagttcctggcagaggttgacagcccggcccagtttctggattgggtccagtggctgggtctccacccctggtttcatcagcagaggtcatggagggaaagtgaccggcagggtaaacatggccattgagacctatggtgtgggagggggcgcttctcagagaagaggggcagggcctggaaaatcccctcagaagtatctatggcgattcctctttatttcacacagtccaggttccagggagaggtgctgtgtccatcctgttctgtacctccctggtttagatcatttatgcatactctcaggtatagaagaacccctttagaaaactcaggtataggagttttttcattttttattttttattttttttttgagacagagtctcactctgtcatgcaggctggagtgcagtggcacgatctcagctcactgtgacctccacctcccaggttcacgccattcttctgcctcaacttcccgagtagctgggactacaggtgcccaccaccacgcccggataattttttgtatttctagtagagacagggtttcaccgtgttagccaggatggtcttgttctcctgacctcgtgatccacccgcctcgtcctctcaaagtgctggcattacaggcatgagccactgcacctggctggagtttttttttaagatagagtttcactcttgtcacccaggctggagtgcaacggcacgatctgggctcactgcaacctccacttcccaggttcaagcgattctcctgcctcagcctcccgagtagctgggattacaggcgcccgccaccatgcctggctaatttttgtattttcagtagagatggggttttgccatgttggccaggcttgtctcaaactcctgacctcaggtgatccacccacctcggcttcccaaagtgctgggattacaggcgtgagccactgtgcccagcagtttaaaagatttaaaagatgagattagaatgctaagggggtgcagcaagacttggagggttttgaatgccaattgagcattctgactttttgttgggcggtgtggaccagtggacccaatcatgttgctcaaggaatggatggggttggccctgccagcatagtgcctgggggactgctccatgccaggccctgtatgaggcactgggcagatgcatcgctcagttagagatgcagtccctgccctgtggaccttacagtcttctggcaaagcccaacagtaagcaggtaaacaaataagtcacagccgggtgcagtggcttatgcctgaatgccagcactttgggaggccgaggtgagaggatcacttgagcccaggagattgaggctgcagtgaactccgatggtgccactgcatgctagcctaggtgatagagcaagaccctgtctccaaaacaaaacaaaacaaacagaaagaacaaataagtcagaagttgctcattgtactaagtggcacgaagactcatcctcctcgtcaaggccttctttgaggtttgttctgggtcctcatctcttcagggaatcttgtccacacgtgtggccttagttacctcccatctccaggtgactcacacatttgtacctgtagcctagatcctcatgtcccagtgcatacttgaccacactcctaacttccctcaggctcccttccagagctgttttcacaatgagtggtgcgacctctcacctccacgtgtgcccctcatcaccaaggaacatcttcttttttttttttttttttttttgagatggagtctcactctgttgctcaggctggagtgcagtggcgtgatctcggctcactgcaacctctgtctcctgggttcaagtgattctcctgcctcagcctccccaaggcagatggatcactggaggtcaggagttcgagaccagcctggccaacgtggcgaaaccctgtctctcctaaaaatacaaaaattagctgggtatggtggcacgtgcctgtaatcccagctacttgggaggctgaggcacgagaattgcttgaacccgggaggtggaggttgcagtgagcccaggtcacgccattgtactccagcctgggcgacagagcaagactctgtcccccgacaaaatattattttattaagatctaatttgtcaatagattttgacttctatgagaatagaaactaatctcactgttgtgtccctagtatttaccatagaaccatagtgtgttttcagaaaatgttggttgaataacaaataaatgaaagaaaaaaaaaaactaaaaaggagcattcatagagaataatggtatgggggtgctccagatggaggggacctcttaggcaaaggtcctgaggcagtaaagaagctgaaatatatgtgaccctgaaagggggcccaaggggcaaaagcactgagatgggcaaagggaagagtggcacctgctgagtttgggtggtggtggcaaggccatattcaagtttgatggccctggtagtgagtttaagttttatttagtacacaggcaagcagcataatccagtttgtattttagaaagatcatatcagttgctgtatggaaactagattggaagggccaggagaggacccaaggaggccattctgttatttagggaagagatgatggtggtgtggatcgggttgtggttggtggaggaggagagaagtgcacagattgtagaagtgttttataagcagtcaagatttgtcgatggagtacatgtgggcagtgctcaagattgtgtcccacatttctttttttcttttttttttttgtttgattgggatggagtctcactgtattgcccaggctggagttcagtggcaccatctcggcttactgcaacctccacctcccgggttcaagcgattctcctgcctcagcctcccaagtacctggggctacaggcgcccgctaccacacccagctaatttttgtatttttaatagacatgaggtttcaccatgttggccaggctgttctcaaactcctgacctcaaatgatctgcccgcctcagcctcccaaagtgctgagattacaagtgtgagccactgtgcccggccttaaatttctgatggaagggtgccatataccgagaaggggaaatctggcaggggaacaggtttggggagaaatcaagaattctatttttttttttaattttttgttttttagagacagggtctccttcttttgcccaggctggaatgcagtggtgcagtcatagctcaccacagccttgaattcctgggcttaagcaatcctcgtgcttccacaggcacatgccaccacatccatgctaatttgtttcttctcttggtaaagatgaggtctcgctgtgttgcctaggctggtttcaaactcttgggcttaagtgatcctcttgccttggcctcccaaaatgttagggttacaagcatgagccacttgtgcctggccaagaattctatctgtatatctttataggtcttgagacatccaagtggagatgtcaagaaggcagtatgtgagtttggaattcaaaggagcgggctggagatacacatttgagagctgttagcatcgagaccgtgggtttcaaacctgcatctgtgtcagaatcacttggcgtcattcccagagagtatgattcagtggtggtatcttaggctttttatggcaagcaagagaaaccatcctgagctgatttaagcagaaaagggctgcactgaaagggaatgttcagtagttcacagaatttctgggaagttggaaaactggggctgggcagcaggcaggatctcagccaaaatcatgccaccgagccagtttggcaggacactgctgccacacactaaatgccatcgctgtgtcactgttccctgaacactagacaccattgctgtggttgccaccagcattggaatggatcttccactgtgctcctgattcaaagtctgtagtgagggcttctgattggttgagcttaggtgtaagggaggctggaaaagcaagaatttgttgttttcagctttcacaggaggtgaactctgccaagacctgtgcagtgaggaagtccccagacataggaaggaggtcagatgccagactggcacacaatgacagatgtacttgacagcaagtttgccagcttgtgggattgtctgggaatctgcatttaaaccagcaccctggaaattcccatgcaggtgctgcctgaaccacatttgcatccattgcttgaactggtacttaaagctgtgggggctgggcgcggtggcccacacccgtaatcccagcactttgggaggctgaggcagggggaccacttgaggtcaggagtttgagaccagcctggccaacatggcgaaaccccgtctcactaaaaatgcaaaaaattagccgggcgtggtggcacgcacctgtagtcccagctattcggaggctgaggcaggagaatcgcttgaacccgggaggtggaggttgcagtgagccgagattgcgccactgcactccagcctgggtgaaagggcaagactatgtctcaaaaaaataaaaataaataaataaataaagctgtggaatggacaagatcacctagagagaggaacgaagaaggcccagacccaagccctggggaccctcggtatcaagagattgggataggaagaggaattaataaaggagaccaagaacgggctgtcagtggggaaggaaggaaataagacagtgttgtgcctcagaagccaggagagaagtgttccgaggagaaggggtgctcggctctgttagatgctgcccagatgcccagaggtaaaataagacaatgacagagacacagcctctggctttggcaacacggaggtcattgggaaccttaagagcagatttatggctcacgcctgtaatcccagcagtttgggggactaaggcgggtggatcacctgaggtcaggagttcgagaccagcctggccaacatggcaaaaccccatctctactaaaaatacaaaaattagccagccatggtggcaggcacctgtaatcccagctactcaggaggctgaggcaggagaattgcttgaacccgggaggtggatgtttcagtgagccgagattgtgccactgcagacacagcaaggctccatctcaaaaaaaaaaaaaaaaaaaaaaaagagcagatttaatgccattttcgcctccacaccatcctggactgatttgaggagggggcagatgagaagttctccctagaaggggagcagagacatagggtgtggctagggccctgggatcagcagggttttctaggatggactggggacccaactccactgaaccagcctcctccctaccaacagcctctgcacagggggccgagggtcttcccagagttgtcaaccttgagcctgtctctcaaagtctccttctctccccaaatttgtctttttttgtgctcacttccttgcctagtgttcagctgtttctggccactgaggtacaaggagacagatgactcaggcagatttggaggcagaaactgtaactttaggtcagagcagaaggaacatgctttccctgaaggcaatttgatcatatcattctcagacaagatgctgctagaaggtcccttcgatgggcctagaacttgggcccagggcagatgagggagtgagacccacaggggaacagtgagtggcttctgtgactctaggtcagggccctggaaaaactgattccacctcaccaacgtcacaggaggtgctttggagggcatgggaggctgagctgggaacagctgctgaaggttctctaacttgactggttttagaccttgaaagagcttttaagaatctcagctgctgcgggctacacccagacccactgaatcagaatctcccaggggcgaggcctgggcaagtgtgcagttcagaagttcccaggtaactgatgagcagttggggtgaaaactattgtggtaagctattgcatgcccactgaaggttagtaatccattaagccatatttactgaatgcctgtggtgtacaaaggcaggctctgagggcacggagagaactagacaaggtctccttctgggtgggaggactctgccagtgaaaagttgattgacaacctgtagcatacagggatgtggctgaggtctgtggcgagagtccagtaactaaagtcagacagacttgggtttgaattcctattggctgtgtgactttgggcaaatgacttaacctttctgaatctcagttttctgatctgtgaattagggatgaagataattgtcttatgggtttgtttgaggggataacacatagaaaatctagcaagcatgaacctagcacgtaacaggtacttagtaattttttaaaattccctcttactgtaaacacaagtacacctgcacatagggtagttaaaaagatcaggaaacatacagagaaaagaggaaagtaattgcaatagggatgaggtaattaccatgagtgagtgttgagattatctgtgcggtcctggcaccagagcaaaaagagaaaccttatgtaccttggaggttttggggaatgaacagctaagcctgattttggacaaggcagggtcttccctcagctctgccctttgctctctgcctcctgttcatttctttgtcaaacatttgctgaggccagtgtggtggctcatacccgtaatcccagcactgtgggacgccaaggtgggaggatcacttgaagccaggagtttgagaccaccctggtctcaaacaacaaagcaagaccctgtctctacgaaaacaaaacaaaacatttgctgagaggctacctagcagttctcagtcctggctgcaccctacaatcccttaggttgcttttaggtagatttcctctcattcaggtaaaattcacataacataaaactcaccattttaaaatgtacaattcagtggccttaagtatattcacagtgttgtgtagtcatcaccactatgtaattccagaacatttccatcatcccaaaaagaaaccctgtattgattagtagttactctccactccttttccccggcccccgacaactttccatctctatggctttacctattctggacagttcatgtgaatgaaatcctactatatgtggccttttttgtctgatctctttcagttgcacagtgttttcaaggttcatccgtgttgtctgggttgtgttaaaaagcaataaaaataggaaaaacaaacacaccaggcagtgttgtaagcacttttcagatattagcacatcataacacagggcctgtccagttatttggatacagagaaggtgtctgctgggcaggaatagctaccatgaagccctttctgtgtgtattatgctgggccacgtgcttaaatgcctgactgagttcagtctgattagatagatgctgttattatgccatttgacagatggggaacatctatcagagaagctgtgtcacttgcctcaggtcacacagctaagaggactggaaccagaatttggactttaggacagtatgacttgaaagccggagtccttaacccttgctgtcttttctatattgccactgggccttgctagtatgtattcatacatttaatcattcattcattccacacatgcttattaacacccacatcctgagttttgtgttgagtgctgcagatacaaaggtaaatgagccattccctgcctttctggagttttcagccccgtagagatcagacatgtatggcaaataagggccaggatactctaatgaaagcctgtagtgggcataggatggaataaaggtaggcaggatcagttctgttgtggtggggagggggtgacctgtaagttgagtcgggaaagatgaagtgtttactagacagaatggggcaagggccctccaggcagagggagcagcatgagcaaaggtctgatggctggaaacagtttggcatatttaggaaattgccaagagttcaatagggatggttttaagggaccagtgatggatagcaagcccaagtggggggcagggagggattcatcctggccaacaagggaacccagaaggtgggaagtactgtttgctgctctgtccaagagggcaggccaggttcttccccaggattgggtggaattcagggcttgaggccaggggtcgggtaggaggaaccttccgcggttagtccagcaaagttcttgttctcttagctcatcaccgccaagcaatctcctgaggaaaatcccagccaggaaacttggggtttgcagaggcctcagcatacatcgagggtgtggctcccttcttgcaacccctcttcctccctgcttcccaccaccccacaagggacagccggtaaggctgagctggtgaggctggacaagtgcccaggctgggaagacgtctgcagaggcctgaccaaggggcgcacggccagtcacaggccccagcagtgcaggaaggaaaacagcaagaggccaggggatcctgaaataataaatgtcagagcatacaggagccttccctgtcaccacccaaacccttcattccagaagaggagtcagaggctcagggtgggaaggagactggccaggtcacaccgcgagacaggggcagggctggggctggccctgggtcctggctcccaggccttgcagtgtagccaccgtaggggctgtggggtggcaagcagggccaagggccaccttggtatggatgaggcagaggggtagctgggaagagcactgccctcctctggcacccccttctgccccagcctggactctcaggtgctgggggtgggggctgatccagaggaaaaccatttggagtctttggctcactcttgctggtggctgaggttggagcagccttgtagggtatgactaacctcaactgtgtcctagcgctttggcctggaaggggatttagagctcgtgtctgttagctcaaaattggacagatgaggaaactgaggcatagaaggaggaaggaactcgctcagaggcacactgagggcttaatggcagagacagccctaaaattcagcactttccagttcagggctcttggtctcatggccttgttctatatgcagtagaaggccattctctcagaatgtttctgcagcacctctgaagatgcctggcttccaccattagaaaaaacattacctcaatttcttttcacagcaatccttacagagataactggggctcagagagagaagatttagctcgtagtttgctttagtgtgatagcaagaaagggctctggaggcagaggtctctgcgtttcttagaacttcctacatgaccttgagcaaactgcctaacctaccccagcctcagtttcttcatctgtaagatggggaggataataactacctcacagagttgttgggaggaataggccaggtaacaaacataaaatgcctgccccaaagtgagcagtcagttagtggggcgataggtagttgaattcatgctaataatagactcaagctgggagcttggaatgggagtccttcctgttgggtgatctgctccgggccagggcctggctgtgttcctatcaccctgtcatgcctgggggacaaggctgaaccctctttgtcccgcttgaacatggatctgcagcccagccctggagttaaactttctatgttgagaattaccaagtaactgccctgttcagaacccttcaggagcaccccatcacttatagaataaaacctagaggtttggttaaaagcatggactctggagcccaactgcctgggtttgagtttattttatttattattattgttattattatttttgagatagggtctcgctctgttgctcaggctggagtgcagtggtgcaatcagagctcactgcagccttggactcctgggctcaagtgataccctaccttagcttcccaagtggctgggactacaggtgtgtgccaccatgcctggaaaattgttttgtattttttgtagagacagggtttcgccatgttgcccaggctggtctcaaacttctgggctcaagcaatccacccacttgggcctcccaaagtgctgggattacaggcaggagccacaacacctgacctgcattttctgtaaattggtaattggatctagaagtgagaagccctgggttttttttgtttttttttttgtactttatcattttgttaaatattttaagtgtaacttggtttgctcattcaggtattgtactttttttttttttttttttttgagatggagtctcactctgtcacccaggctggagtgcagtggtgtgatctcggctcactacaacccccacctcctggattcaagtgattcgcctcagcctcccaagtagctgggactacaaaaattagccaccacacccggctaatttttgtatttttagtagagatagggtttcaccctatctcaactaaaggatggtctcaaactcctgacctcgtgatcctcccacctcagcctcccaaagtgctgggattacaggcgtgagccaccgcaccctgccaaacgttgtatttttagcatcatgtttaatatgtagtacatataatttaatcatctttgtggacactggcgtcagagaccaaagagccaggattcagccatcccacaggaaaactcctttttagcgttggagtttcattgatcttcccacatcacgtatactgttagtattgattgattgaaaaatatgggaaagaacaaatgaattcaagaatgcttttaaagggttctgtgtcttattgatcatagagttgcacatatttggaatgtggtcagactaatttgtgaaacatttttatactcgtcagtagtgctcatgatgagtgtggcttcacagtgtcctgctagtaacaccatggaccttcagggtctgggtccattgcctggaaatgaacaagggagttagagtcttaacggtttagttcccaggtccacattttggctgtgtgagctcaggcaatgatcttcactgttctgtgcctcgctgactcatcagccagatgggaacaaaaatgatgactgccccattaagatgctgtgtgtctgaaatggtgggtgtcaaactcccttacaaactgtaaagctctatacaagttttaggttgtattttttttttctttttctttttttttttttttttgagacggagtctcactctgtcacccaggctagagtgcagtggcgtgatctcggctcactgcaacctctgcctcccgggttcaagcagttctctgcctcagcctcctgagtagccgggactacaggcacctgccaccacacccagctaattttttttgtatttttagtagagacggagtttcaccctcttgaccagggtggtcttgaactcctgacctcgtgatccacctccctctgcctcccaaagtgctgggattacaggcgtgagccaccacgccgacctagtttgtatttgtttcttagtttgtttgcatttccagtgaaacctggggcaagaaactcacctgagcctttattttgcagtctgtaaaatgaggaggtaatgttagataatctctaatattctgtgacttcgtctcttaaggaacaacaccatagtccaaagcaaagatagaaaatgtttttcatctcctctgccaactctagtttaattggtagaggctaccatcatatcttaacagaatgatgaaccaaatccacagtcagtggggaaaacactgtgatcgattaataatggctataatgggccaggcgtggtggctcacgcctgtagtcccagctacttgggaggctgaggcaggagaatggcatgaacccaggaggtggagcttgcagtgagccgagatcacgccactgcacttcagcacttcagcctaggcaacagagcaagactccatttcaaaaatagtaataataataataataataataataataatggctgtaatgggccgggtgaggtggctcacgcctgtagtcctagcactttgggaggctgaggcgggcggattacctgaggtcaggagttcaagaccagcctggccaacatggtgaaacccctgtctctactacagaaaattagccaggtgcagtggcgcatgcctgtaatcccagctactctggaggctgaggcaggataattgcttgaacctgggaggcggaggttgcggtgaactgagatcacaccactgcactccagcctgggctacagagcgagatttcatctcaaaataataataataataataatggctgtaatggtcatgggatgacacagaagtgataactatgtactatattataatggtccaaaggaatgaatgtctaatggtgaaatgtaatctgtatctcccaaggccttagctctagcagctctgcccccttggcttgagttgccttggtaaccacagctggctctgagaaaccatgggaatgaagaatgggtcctattgatgaatcctgacccagaagggggcatgcagaaggcccttctaggcagggcagctgggcatggcctagtgctgccatctgtggtcttttgcctgcagagaacacaaaccagagagccagagcatggtgtgtgtgtatgttgggatcagggtaggggacacaaagggcagtgccagcagctggaatttaggccttgtttagggccagccagggtaggctgcccaaaggactccagtgggctttccaagctcagacgtgtctcttacactaagatgtgtttcagccacctttgcccagtgcctgccaggctcttgcatggatccattgactcttagctttgaatgaaatctaaatagctgtccattctaatccaaaatccagtgtctgaatcactctctagcacctaaagtatttgaatacttcaagtgacagggagctcactgccttcaggggtggcctgttcttccttagaaatgtcccctgtttgagctgaagtctgtttctgcctccctaacttccacctctcagtcctgggaatcctctctgaggccagcctgaacaaatccgttttcttttcagtaggacatcctttacagtgtttgtattcggggcctcaccattgctgtcaaccttgttttccttggacagatctccctctgtgccctgccttctccctttcctaagcctgaggggatggtgagggaatatggtagaggtggtagaattgggatttaggtttggaggcagatccagtcccaagatcaaataagctgtgccccctaactttgtggggcagcttagagatggggaaagaacattggccctggatttggctagtcctggatttaaattgtaactctgggccaggtgcagtggctcatgtctgtaatcccagcactttgggaggccgaggtgggcagatcatctgaggtcgggagttcgagaccagcctggtcaagatggcgaaaccctgtctctactaaaaatacaaaaattagctgggcatggtggcacacgcctgtaaacccagctactcaggaggctgaggcaggaggatcgcttgaacccaggaggcagaggtggcagtgagctgagattgtgtgtctgcactctagcctgggcgagagtgagagtctatcccccccccaaaaaaaaagaaagaaaaaaaagaaaaaaagttacagctctgccactgttcatcactgtgtgacttggacatgttcctcctcctgacagcttcatctttaaaatgggaatggcaatgccttcctcaaagagtggccaggatagtgacaagtaatgaggctgcacagagcaggcacttgggacatgctgcttgcactctccctgcccggcggcagaggtctgctgtggtccctctccacctgtgcttccccacagcttgctgacgaggatcaacatggagttgggggtgtggggagatatgtttaattaattcaatgaaagttgagaaattcctaaaccaaattcaatttaattttgaagtagataacatttttagttatcaaatagtggacagtattctaagcactttacctatagaatttacttaatctccccagtaaccttatgtggtacgcaatattatcatcttcattttatgaatggggaaattgagggactgagagatcacatcaggtacctggtggagctggaattcaaatccaggtagtttggggacagccccatacttttagcaatgatgatgtactgcatctctgaagagaattagaacagtaattcccaaactttagcatgcattagaatcacctggagggcttgttaaaccacagattgctggacctcacccccagattttctgattcagctggagaatttgcttttctaacaagttcctggatgatgcctgctgctggttgagggcccccaccttgagaatctctgactatcagggattaaatgggcccacctgaacccagaagctgatttttttttttttttttttttttttttttttttttaagacagtgtctcattctgtcactcaggctggagtgcagtggcatgattatagcttactgcaacctcgaactcctgggctcaagggctcctctcatcccagcctcccaaatagctgggactacaggtgtgtgtcacagcacttggctaacttttttaaaaaattttttgtaatggtcgggtgcagtgcctcatgcctgtaatcccagcactttgggaggccaagacaggaggatcagttgaggtcaggagtttgaaaccagcttggccaacatggcgaaaccccatctctactaaaaatacaaaaattagccgggcatggtggcgggcacctgtagtcccaactacttaggagcctgaggcaggagaatcgattgaacctgggaagtggaggttgcagtgagccgagatcacaccactgcactccaacctgggcaacagagagagactgtgtctcaaaaaaaaaaattttttttttttttggtatagatcggggtgggggtctcactttgttgccgaggctggtcttgaactcctgggctcaagcgatcctctcaccttggcctcccaaagtgctgggatgataggagggagccgccacacctggcttttccttcatctatccagtttcatgggaaacgagggctgatctcacacagaggcagaaaacaaaccacagtaagaaccatactcatgttttccaaatgcctcaagccttgccatgtttgtgatctcattaagcctcacagtaattctgtgagttaagcagagaatggatttttctgcctgtaatcccagcactttgggaggccgaggcaggcggatcacgaggtcaggagtttgagaccagcctggccaacatggtgaaaccccgtctctactaaagataaaaattagccaggcatggtggcgggcacctgtaatcctagctactcgggaggctgaggcaggagaatcatttgaacctgggagacggaggttgcagtgagccgagattgtgccattgcactccaggctgggcaacagggcgagattccatctcaaaaataaaaaaataaaaaaataaaaatctattttaaaggagaggaagtttagaaaactagctgggctagtatcacccaaggagataattttggagatgctggggctagaatcttagttactgactcatcatagcactctggaaacctctgcctttcctcaaaataccttcctttccccaggctactatcagaatcgtctccttaaaactaaatttttttatgagtgtgtggatgagtggattaaaaaaaaaaacctgcatttctttagcttaaatctttgagccctattataccacaggataggtgttatcaaccagtgtaaatgattttcagatattttcttgagaaaggagtaattagaacttttcccttttcatgctccctatgggcacttgcatgttcttaagtctgtggttctcttgaaggaaggggccatgtcttatgtgtccccaccatctggcaccatgcctggctgaaacagtcaccaagaaatgcttgttgaaatgaatgaatgaatggaggaactatgttcctgtccttgtccattcttcccagagcacgcctcccttcctggcagtcctaccattttttaccaagcattccctcccctctacctcatagtgtagtctctttagtctcttttctgcctgtccaggggccagagttaagcaacacagcttaagggacgccttccccattccttcaaagcagacatggctctgttttccctggactcccaggaaccttccatcatagccctcatcacattgcatgataagtgtctgcttataatggctttttcttcccttcaatgatgatgtccttgagagctgagattgtgtcttttttgtttgttttttgagacggagtctcacactgccctcctggctggggtgcaatggcgtgatctcagctcactgcagcctccgcctcccaggttcaagcgattctcctgcctccgcctccctagtagctgggactacaggcacatgccaccatgcccggctaattttttgtatttttagtagagacgtgttagccaggatggtctcgatcttgacttcgtgatctgccagcctcagcctcccaaagtgctgggattacaggtgtgagccactgtgcccggctgagattgtgtcttttttacacagggtgtagtgggcactcaataactaattgaatgaataaacagccatgtgaacttggctgccaagagcagtagggacgggaatggtatctggctgggaagctgtttcctgatagatgtctgacaagggcatcgaaaaacagtttgtggccgggcgcggtggctcacgcctgtaatcccagcactttgggaggccgaggcaggcggatcatgaggtcaggagatcgagaccatcctggctaacacggtgaaaccccgtctctactaaaaaatacaaaaaattagccgggcgtggtggcgggcgcctatagtcccagctactcgggaggctgagtcaggagaatggcgtgaacccgggaggcagagcttgcagtgagccgagattgtgccactgcactccagcctgggctacaaagcgagactccatctcaaaaaaaaaaaaagaaaagaaaaacagtctgtgagtgattcgggtgacttgtctccctttaccagttagagctagtttcagccacaagtggcagaatacccagtataacagtggctcaaataagagatttctctttcatattaaagaattccacagataagtagactggggctgctagggtagtttcctaatcactagggacaaggctgatatcttgttgctccgccatccataacaaatggcttctacttcatggtccaggattgctgcctgagctctagacatcgccagcacattgtagccagaagaaaggggtgacagagggtacccttgcattccccttttttcttttgttttttttttttgtgggggggtgcgtttgagacagggtcttgctctgttgcccaggctggagtgcagtggcacgatcacagctcactatagcctcaactccctggggtcaaacagtcctcccacctcagcctcctgagtagctggaattataggcccatgccccatgcctggtttttaattttttgtagagacagactctcactatgttgcccaggctggcctcgaactaggctcaagcaatcctcccgccccagcttcccaaagtgtgagattacagccgtgagccaccccaccccaggccctttttttctaaattaaaaaaaatcgactttattttttagagcagttttaggttcacagcaaaattgggcaggaagtacatagagttaccatatacacacagcctccccctctgtcaacagctcttaccagagtggtacatttgtttcaatgaccatacattgacacatcatcaccaaaagtccatagtttacattagggttcactcttagtgttgtacattctgtgggattggacaagtgtataattccatgtatccaccattatagcatcatacagaaatgtttccctgccctaaaaaccctctgtgcttcacctgttcctcctcactacccccatccctggccaccactgatctttttactgtctccatagttttgccttttccagaatatcgtatagttgaaatcatgtagtagccttttcaaattggcttctttcacttagtgatgtgcatgtaactttcctctgcatcttttcatggtttgatagctcatttcttttcagtgatgaataatatttcactctctggatgcatgacaatttctttatccattcacctactgaaggacatcttggttgtttccaaattttggtaattatgaataaagctgatgtaaacatccgtgtgcaggtatgtatacgttttcaactcattgagaaaatatgaaggagtatgattgctgactcatttggcaagagtacgtttagttaagaaactgtcaaactgtcttccgaagtggctgtaccattttgcattcccaccaacaatgggagtttctgttgctccacatctttgtcagtatttgtgttttggggttatttatttatttatttgtgtgtgtgtgtgtttttgtttggttttttttttttttttttttgagatggagtctcactctgtcacctgggctggagtgcagtggcactgtctcagctcactgcaacctccgcctcctaggttcaaatgattctcctgccttagcctcccgagtagctgggactacagcggtgtgccaccacgcctggctaatttttgtatttttagtagagacagggtttcaccatgtttgccaggctggtcttgaactcctggcctcaagtgatccaccagcctcagcctcccaaagtgctgggattataggcgtgaaccaccgtgcccggcctccctttgccagtatttggtgttgtcagtgttttggattttggccattctaacaggtgtgtagtccctcccttcctttttatttttcaattttttaaagccactttattgaggtaggattgacatgtaaaaagctatacatagtcagtgtatacaacttgatgagtttgggggttatctcccttctttgtaagatactttttggaagttaacaattaaaatattatattccatggccaggacttagtcccatgaccacagttagctgcaaggtaggaaatgtagtctttattctaggtcgccaagtggccatctgaaaagtcaggtttcttgtgaaggaagaagagagaatggacactgggagccacccagtgatctctgccacactgcagggaagggaaatcttctcaaacttgcttaaaggaacttcgttgggtggattcaggggtatttcatggaatttcaccaaagacataatgtgtggaggttgcctctgaagaggtagcatctggaaagttgccagaaaccagcaccactcttcctcttctgccttgctgtggcggtgtggggcttgttcatgtctttctacacatctgctctgttcttttctctctgcatgtggcaggaaggacatcccagctttagcatttcagtcagtcaactagctttccagagcccaattccaaagtccttggagagagaatctgattggtccagcttgggtcaggtgggagagagaatctgattggtttagcttgaaccaggtgtctgtcgactctggctagaacaaacaaggctgcaggggcccacctccagaggaagggagggcagttttcagaaaatgggtgtcatgggatgggaagactcctcagaatgtatctagagcatgaacatactcctctcaggtccatgtcccaggactttgcaaaccatcattcatttaggtaaacatttattgggcaccttctgtgtgctaggtacatggatctgccctctagggattttggaaatttttttggaaattgttcatatcttttttttttttttttttttttgagatggagtctcgctcccattgtgcaggctggagtgcagtggtaccatctcagctcactgcaacctccacctctcgggttcaagagattctccttcctcagcctcctgagtagctgggattacaggtgtgcaccaccacgcccagctaatttttgtatttttagtagagacagtgtttcgccatgttggtcaggctggtcttgaactcctgacctcaggtgatccactgccttggcctcccagagtgctaggattacaggcgtgagccactgtgctggcccagttgttcatatctttaacctgaattgtcttttagagcgaaatcatagctccttaaattactcaccttttagctttccaggtttcaagatggggatcaagggatttggtaaacacatgcttctgtttccccatctggattttggggaaccatagaagtggccatgttcttgcctctttttttttttctttttctgttggccagtttagaaagaaacgttctcccctccacctctttgtctctttagtaagaaacattttggttgttttttgtttgtttgctttgctttttgagacagggctctctctgtcacccatgctggagtgcagtggcgcaatcagggctcactgcagttttgacctccccaggctcaggtgatcctcccacctcagcctcccaagtagctgggactataggtgcatgccaccacatggagatggggtttcgccaagctgtccaggctggtcttgaactccttggctcaagtgatcctcctgctttggcctccccaagtgctggaattacaggtgcaccccaccacacccagctaatttatttattttttcttttcggtagagacaaggtctcactatattgcctaggctggtcttgaactcctggcctcaagtgatcctcctgtttctgcctcccaaagtgctgggattataggcatgagccaccatgcccagcctcatgttttaaccaactcaaatatgatgccgtctccttaatcttcctgattcttttgttttctttcttcagccctgggatgggcctccacggatctcaaatatgaaagtgtctcaagttcacacccgaggaggagaatgttagatttctagcccctgtaggaaaagcacctggaacttggcagaccttcctagcatcagcagcagctgatgataacgatcacaggtgctgttcattttgaacatactccatgcctagcaccaagctaaatcctgtatttgcatcctctcatacatatagccctcataccaaccctgagaggtaggcatcgatttccccattttacacatggctaatcaggaagctcagaaagaataggcaacttgtgcccgggcacggtggctcatgcctgtaatcgcagcaccttgggaggccgaagcgggtggatcacttgaggtcaggagtttgagaccaacctggccaacacaatgaaaccccgtctctactaaaaatacaaaaaattagccaggtggtgggcacctgtaatcccagctagtcagaaggctgaggcaggagaattgcttgaacctggcaggcagaggttgcagtgagccaagattgtgcaactgcactccagcctgagcaacaagagcaaaacttggtctcaaaaaaaataggcaacttgttcaaggtcacatagcccccgagtagtggagctgagcttcgtaactagaccccccttcctccagaggcttcccacatgccaccggcctctgagaacactccacattgcctctgagttctgccctatgcatgttctcctgtgggtatcattttgaatctttggcagtaccatttccaatgtgtttactaactcttgtcatgtaactctggaaatcagactctgatcccattttatttttgtcactgggaagaacagctgggctggggtcagggtggggctgtggtacatggatggaacactgttctgttgcacccgggaagtccagctctgtggcttccccaccatgtgtctctcggtaagggcctcccatctcttggcttcagttttctcatctgtgggccccttccagctcgacattctgtgttttccaagttaactgtgcatttcgcaaggatttcatgaggttgtcaacttccatgccccactgaaagggggagtgtttcccatctaggctgagcctgcttggggcatgtgagacttgcttcttgccatcacatctctggcctttcccacattctgatgtttgttctgcagcctctgggctttggggttatctggtgttgtctctccagttctccccagtggtgatggagtgtgctcccgccaccctctgccatctccccagactcaggtaactgaatgcctccaacccctctctgctcacccatagcatcctggcctcttcctccttgtcctgacataactgtttattgagcctggggtttggtgaacaagtgtaccctgctttgtatcttaagggaagatagagatgtgtgtgttctcccctctggccttttgctcagcattttgtacatatttacaaatcattcatcttctcagcaactccacaagtcccctagtatcatccccattttgtagacaaggcactcaaggctcagagaagttaacagatttgtctaacggacacaccagctactgccagaggcaagattcaaacccaggcctggcacaccctgtcatgccacgtacctttgactcactacatttacgctgcattggattcagggagaaaagtctgtggtcttcttggagtggtgtgactggtctgtggtttctgtgtggttttttgtttggtggggtaaacaggaagaccctagggataagttccagaggacagcaaaactcaatgtatttgtttggagggcggttggggggtggaaatcatagatacagcgttcctgaaggaagcaccctattccagcttggcatccctgaacctctgtccacatttgcttccagatcttggaaggagaccaagccatcctgcagagaataaagaaggctgtgcgggcaatccatagctccggccttggtaagtgagcctcctgggtgccccgcctggtcaggaagcccctctcccagccccagcctggagctaactccaagctcccgtctgtacctccacaggccatgtggagaatgaagagcagtaccgagaggccgtggaatccttaggcaacagccacctgtcccagaacagccatgagctgtccacaggcttcctaaacttggccgtgttcacccgcgaggttgctgcgctcttcaagaacctggtgaggcccctgtctcttccttgcccagactcagggtaaatctagtggtcttaagaacctgactgggaaagggtccgtttccttccttctcccaatttgcccttgatctctgacctgagttcagacctgaggtccctttccagccctgacccttcttttggataatcctcctttctctctggcttcttacccaactaactcttctctctgttctcctccttctcttcacccaggagcagagggggtctcacagcagggaagagccccgtgcaagggagggttccctggaggagctttgggataaaggagagacaggctcgggggttcctacctttataccactactgctgccactgccaccaccaccgctgccaccgcctcctcctctcctcactccctctttgtcctctgctttcccaatccacatctgcttcgtacttaaatcccaggacctgtccctgcctccacaagcgtctcagcccctgtacatggcccagtggcctcgggttgcttcccgatggcctccttggtgactgcctcctctctggtccttcaagtcctttcctcaaggccaccctgtgacagcagctcttcccatgtgcaggcacagttctcactagttcatgtgttcactcattcgatccggatgcacagctctgtggggctggtgtgactgttgtctccaccttacaggctaggaaactaggacctcaaggttaagcagcttgcccgaggtcacacggttcggtttgaacccaggttgtctggctccagagtccaagcataagcctggctacactgcctcccaggaaagcctctcatctccctccaggctccatggcactggaccagctcttgtggctccagtcctacccagcatcctccctggttggcaggggccacatcatccttgagaggcagtgtgctcagtggttaagcacccaaccttggacctagactccagcttggaatcttcactctgctgcttactaggtcaagtcactcagtctgcccaagccccaggtctctcatctgtgaaactgggataataatgctgcctacctcacagagcggtaatgaggattaagcaagttagtgcctactttatggtaagcgctcagtaaatgttggctaatattatattaatggcaaaacagcaattacttttgcaccaacctaataaaatctatcattgttatagctcttggcatagctgtgcctcgtacactgtcctgcatgtaaaaagcctttaacagtgtttgaggctgggtgcaacatttcaaaccttaatcccagtggtttaggagcctgaggtgtgtggatcgcttgagcccagaagctctagaccagcctgggcaatgtagtgagaccctgactctacaaaagtatgaaaattgccgggtgcggtggctcacgcctgtaatcccagcactttgggaggccaaggtgggcggatcacttgaggtcagagattcgagaccagcctggccaacatggtgaaactgtctttgcgaaaaaatacaaaaattagttgggtgtggtatcaggtgcctgtaatcccagctactcaggaggctgaggcaggagaatcacttgaacccgggaggcggaggtggcagtgagctgagatcatgccactgcactccagcctgggtgacagagcgagattccatctcaaaaaaaaaaaaaaaaaaatgccaggtgtgggggcgtatgcctgtggtcccagctactcgggatgctgaagtaggaagatcagtttagcctgggggaagttgaggctgtagtgagtgtgatcacaccactgtgctccagcctgggtgacaaagcaagaccctgtctcaaaaaaaaaaatagtgtttgagttcaattgaattagtgtccttctttgtcttcacctcttctctccctgtttcagtcaaactagtgtttcctgggggtctgctgtctagtggacattgtaccaggggttggtgacacaggaaagtgtcagactgcctcagagagccacagtctagtgggggagagaaaaactagggtgtggactagtgtcaagaaataccagcagcatggcacaaactcaaggacccagcagctggtgtcagaggcctagtgctgccatggttcagaaaaggggagatcagcatagaccaggcgggaggagtagccaggagagacttcctggaggaggagagacccaagctgtaccttggaagctggttgaaatattaggcctctttaggttgcgaaatcacagaaacccaactcaaactaggttaaatttttaaaagggaattcattagcccctgtaatgagaagtccaggggcgcagctggcttaggctctatcctttcctcttaaggtagtttctctgtctctgctcagtggacaggatagcccagcaggcccagatgcccatcttaccaaaataaagatggtctttctcccacaacttaggcagaaaaatcccagcgaggattgtgattggctggcttgggtgcgtgcctgttccctatccagtccctctatcctggggctggggtgccctgctcagatctgacttctgcgtttaccccatctgaccacagaggaggagttccccacaggaaagggggttctatgaccattaataggggaggctctgaagcgttagccagcccagaacaacagacgtgcactacaggtcaacttgagagagtcagagaggagaagggaggctgctcctggcgaggaacaggggagagattgactgtgggatgctgctggagcagtgcagcgatgaggctggagccatcagggaaggggctcactctgacacacctcggcctcccctcctgccccctttcacacaggaagcctggcgggcagcaggtcagccatcctaagcagaccccagagctggatcctctagtccccccccgcaggctcagcactcctgccatgacggtcccccttacttggctgtcatctctttgataacatcttttcctctcccctacttcccttccccgctgctctctttgccaagtgatgcttcactgtacaccgaatccctaggggctggatgccggtcacctgaggcgggaatgagcgtctctgttttttccagattcagaacttgaacaacattgtctctttccccctggacagtctgatgaaggggcagctgagggacggtcgacaggtgagtctccatgctgggagtggtggtgggacagagtaaaagaggggtgggcaggagactgttggggggcagggctggactgagggtggaggccaggtgaaggggctgtcttagcgggagtgatgagcctggggaggtctggaggacctggctcgggtcagcctaggatggctgacctgctgtctgccaggccccttgtgtgaaacatgtcatgtaaatcttacaaccatcctatgaggtaggctttgtgggtacactcatccccattttgcagttgaaattcgaggccaagggagttaggtaacctgctgatggtttacataactaggaagtagagagcccatgtgggaatccagggatcctgaatcccatactcgagctgctttctctgtgcctggcagcccttggctggatgcagagtggagctcaaagaaggtgacagaataatctctctgggcaatctgccccagacggcccaggggaggagccgtgctcccccaagagggttccctccctgccctaggctgccagcgtggcaccagcctgctaaccacacaaaccagacaggcagctttttcaccttgggagtctcggggttgttcagaagggtgtgagcagcctggctggatgaggcttaggcaagctaggcagggggtagtcaggtctccctggtttgctgtatggcctggggtagacttctcaacctctctgtgcatgttccttgacctgtacccttgctctaagaggatgatctagcaccaggcaggagaaaatgctgggctaaagttaggcagggggaatttggccttcatcctcccatcctcatggtcatgactgatctctcttctgagcaagaggactcagggtagagcccaaagatctcttcacaccccaagccatggcccaccaaacctgactgattcttggcatctctggggaggagaaggtctgctgggaggagggccttagctctgagaaatggggtcagctgagcctgtttggtgggggcaggtttgcagcaggactgtgggggcaggggctggttagagaagggctctgagcagctcaggggagcacactagcaggtcctcctacaggcagcagagcatactgtttattccagtgctccagcttccctctgggcaaattgtccttttttaacccacaggattccaaaaaacagctggagaaggcatggaaggactatgaagccaaaatgtaagtggccacagccagggtcgtttgtctgggagagtagcacttaggctggatagggaagaacctaaatgctgccgagacatgtcatccagaattgggtgacatctggctctgtagaggcatttacagcagattgtttatacccagacctgactggattctggggactgggccacgagaccaccaaaggagctattgtgaagggacctcaggatgctgctctcagagtcccatctgctcagtggtgccagacatgggcagggatgggaaggagctagcactgaccaaacacctccgcgtgctggccatttaatcttcacagtcaccctgtcatgtgtgagagaggtattagtatcacaattaccacaggaggactcagagaggttaagtcacttgcccaaggccccacagcttggcagaggcagaactggggtttatgccccttgctcctcgttcctcagtgtcagttggtatatctagagaaggaaatggctttctgtgtcctgtgcacaccacacgatactccagatctctcaccagctactgggacatcatggggaaagaaggagcctcagtcaaccagtggccaattcctcctgggcagagactccttgggctctgtcttatgaggagtctgtccagatcccagcctttgccctctgcccagccaggcccatactgtagagcattgtttgtgcttttttgtaaaattttgttttctcttgcattttgccaaagcaatttatgcttattatgaataattttgaaaatatggagaagtaaaagaagaaaaaaaattaatcatccttagcagaggcttagggttatggcaggcggataatactctctgttgtttgaatttttttttttacaaggtctgggtaacattgcagttttcatcattaaaaaaaaaaggttggatggggagaaactacccaaaaataggagaaaaattcttaattttcaagcctaaaatattaacattttaacatttatttttctatgtatgaagaaatgtttttataaaaatgagatcataacaacatactgttttgtaatctgcttttttcattcaaaaaatacattgtggccatctttgtacaccattacatattcttccacatcaatcaaacgggtgtgccaaaacctgcataagccattatgtatttaatctgttcctgtcattggagaagcatccttggatttaaatatttgtccctactcataattatttttgcaggatcaatttcaagaagtagatcctggagctttttattgttccctcagctcccagagccatggcaccgctccaagtctgaggcaaggtcacatcttgtccctgcacaagcatctccagccccagctgtgggcatagatcctgtgatgaagggtgtagacactgtgtggccatccctgtggggccctatccctgcctgtgatggggcacggccatctgctctcactggaggcccagggacgggtagtgagggcacaggctgaccttgtcttcatgatttgctgtggggccacatggccctcttcttcctgagttaccttaactaagccgttagactttcggggatcgtctaccaaatagaaataataagctctactctgctgaccttcccaaagcaggtctgcttttcctaggtttctatattgagccttcctgtagcatttcatttacaggccagactccatttagttgatgggaaagggggcttggctgaggttattcggtgagttatcgataggacctggactagaacccagggcttctgagtctagtgctatttctgccatgtggtctcctggctcccaccatggagccacatagtttgagctaatgtcttggcacgggtgactgtacactccttttcatacgggctccaggtgtagccagatatgcgtgagccgtaagttcctatgtaatttcaccacattcctaccaaacaagtctgagccccagctggaagggcccagggccctgatagcatctgtcaaataccactgggagcttcacccctggctgttcatataggaggaggattacctctccacgtggggctgctgagaaaggcatcccgggccctgtacagaggccaaatttatctaggcagttccatgtacaggtctgtttcctcatctgtacaatagggacagtaatacctttcagggtcaatgcggcgatgaataagcacggtgcatataaagcactcagcacttcagttcagcaagtatttattgaccacctatatgagccagaactaggaccagaataacacaggaagagattgacaggcagaaacccacacatctgctggtagcatttaccctagccagcttttaatcttgtgcaagccattttccttctctggatctcagcttcatcatctgtaaaatggtccctgttctgagagagactgttatctctcagaaaataaacagtgtgactgtcagcagctcgcaggaatgaggcagggaaggaggaatggaacaaacctgagtcacagtgttggttgcttgggctgcccctaaggcttaggcaccagccagtcctgggttcaactcctggccccaccacttaacagctgtgtgacttggacaaatgacttatctcagccataggctcctcttctataaaatgggataatgatcctgccttatggggctataattttaacatatgaagggcctagcagagtgcctgggcctaaaaattataactaggagcctgtaatcctagcactttgggaggccaagacaggaggatcacttgggctcaggagttcgaaaccagcctgggcaacatagtgagaccttgcctctatttaaaaaattgataataataatacatatataataaatataatacatatatttagaagccacacatggtggctaatgactgtaatctcagctacttgggaggctgaggcaggaggattgcttaaggccaggaaatttgagaccagcttgggagacagagctagaccttgtctctaaaaaagaataataataataattagtaataatagcagcttctactttagagtttcctttgtgccaggcagtggagtaaggtctttgcatctattaccagatttattctccctggcagggaaagctgctattgttattcccaatttataggtaagtagtgaggaatccctgccacctaagcgtggctcaaggtttcaaggttggtgggtgtgtggtatttaaatactttcctgcctgcaccaggagtacctgtacccatcccatgaataacactggactgttgctgtagtctccttctgcaatgatctcggtcttagtaactagcatttaagtactttcacccactatttcatttcattccttctattgcaattccactcataagacagaaaaatgtttctaacatttgaaatgttttagaaatgttttaaaaatgttggtgatcctttgaggatagggaaggaatgggacttgttattttataggggaagaaaagcactccccagctattaggtcatctcagaatgactatgtcagactttgtagggaaaatctctatgaattatcttagctgaggctgagggacagaactgtgataattgacaaagccattttgtcacagctgtgtacattttgtcaaagctgaagtacattgacaaagttgtgtacttcacggcttatctacaccttgagttaagtagcatcttttaatctctactagcattcaaaaaataaaagaaagaaagaagaaagtaccatatgctgaaaaaaattatctaaaagggatcaccagtatttactactctgtcatcattgccatcacttgaatcatcataatcctaccattcattgagggcttgccatatgccaggaactgtactgtttcctatgcattatattatccaaggactaggtgtcattacagtggttcccccttatccttgggggatacgttccgagacccccagtggatgcttgaaactgaagatgatactgaaccttacattaggttggtgcaaaagtaattccggcagtttttggcattaaaatgtaatctgtgctttttcctatatatacgtacctatgataaaaattaagcacagtaagagatgaacaataatagtaataaaacagaacatagtagcatcactactcttgcactctggggccattatgaagtaaactaagggttacttgaacacaagcactgcaatagtaaaacagctaatctgataaccaagaaggctactgaatgactaatggcaggtggtatagaccaggggtcctcaacccctgggccatggactggtacaggtccaaggcctgttaggaacctggactgaacagcaggaggtgagcgttggcaggcgagcgagattaccgcctgagttccgcctcctgtcagatcagcatggcattagattttcatagaagcacgaaccctattgtgagcttcacatgccagggatctaggttgcatgctccttatgagaatctaagcctgatgatctgagctggaacagttccatcccaaaaccaccctcccccaccctgctatccgtggaaatattgtcttccatgaaaccagtccctggtgccaagatgttggagactgctggatagacagtgtaaatacactgaacaaaaggatgattgatgttccaggcaggatggagcagaaggatgcaggatttcacatgccactcataatgatgcataatttaaaacttacaaattgggctgggcatggtggctcatgcctgtaattccagcactttgggaggccgaggcaggcagatcacctgaggtcaggagttcgagaccagcctgaaacacattgtgaaaccccggctctactaaaaatacgaaaattagctgggtgtggttgtgggcgcctgtaatcccagctacttgggaggctgaggcaggagaatcgcttgaacctgggaggcagaggttgcagtgagctgagatggcgccatggcactctagcctgggtgacaagcaaaactccatctcaaaaaaaaaaaaaaaaagacaaaaaaacttatgaattgtttatttctggaattttccatttaatatttttggacaggggttgaccatgaataactgaaaccacagaaagcaaaactacagagaaggggggactacagtattattctcattttccaaatggggaaacaagctcagaaagttttataaaggttaagtaagtgaaggagctgccattcaaatccagaatctacatttctaaccactgtactgtattgtggtttgctttttgtccatttactctggagcagatatatttccatgtcagtacagtcatccctcattatccatgggggattggttccaggacccccgcagataccaaaatctgaggatgctaaagccccttagtcagctgcctatatcctcaggctttacacccacagatatggagggccaatcacatgtacagatattccttcttcttttttttttttcttgagacagagtctactctgttgcccaggctggggtgcagtggtgcaatcatggctcactgcagccttgaactcctgggctcaagtgatcctcctacctcagcctcccatgtcgctgggacttacaggaccatgctaccatgcctggataatggtttaaaattttgttttaaagtagaaacggggtcttgctatgttgcctaggctggtcttgaactcctggcctcaaatgatcctcccacctcagcctcccaaagcacttggattacaggcatgagccactgcacctggccaatcttcattctaacagctgcatgatatttctatatatcgccatactattatttgtctaactacttcctactgatggacatttagcttattttccatttttgactattgaaagatatggtaacagtgtacactgggagacttcccctacgccagcccacctgatgtcacttggtctccctcattcctttttttttttggagagacagggtcttgctctgtcacccaggctggagtgcagtggcacaatcacagctcactgcagccttgacttcttgggctcaagggatcctcctacctcaaccttttgagtagctgggactataggcacacaccaccatgcctggatcatttttaaatttttctgtagagacagggtttcaccatgatgcccgagctggtttcgaacttctgggctcaagcaatcctctcaccttggcctcacaaagtgctgggattacaagcataagcttccacgcccagccctccctaattccatagcaagctgccaggcactgctgctgagatgctgcaggcccagccatcacctcccctctctgctgctttttttcagattcacaaagaagtctgtcctgaccctcaggcctggttcacaggatcagttcctaccctacttctaccactctttacaaactcttgcttggggtatcagaaagcttaaggaaataaaaaataaccccctctttaaaattaaaaaaaaaaaaaaaagcctacagagcctgcaatgtctggagacatttctggttgtcacagctggggggatgctactggcagctagtgggtggaggtcagggaggctgctaaacatacaaaccaccaggcagccccccataacaaagaatcatctggccaaaaatgttatcagttccatggttgagaaactgctctacaggtccccagggacagattctgtatatgaacactatcccagaggtcttacctactcaggagggcccagaactttagagtcagaagggacctgagaacttaccgtagaccattgcttcctccatttacagatgggaaaacagaggccttgaggggcctacagtaaaagctgccatgtgtcttctatgtgctgagtcttttccatgctgtgcctcatctgggtacagataagaatctccgttttccagatgaggagaccaaggctcagagaggggaataaatgcagccagcaagcagcagagtttgtattaatcccactctgtctttgtcttctctgctcagggctggcccccacttgagagcagaactattaagcaagccctttcctttacatgggatttggagtcacatgcacccagcctgagatgtggaaatactctcctggctgtgagtgggtagtctgctgggcgtgggatttccaggaaaccatttacacacagatccacccatccccaaagagggaaaacagccaacctctgagggggaaggccccagttactcttagctacaaggatgggaagcgctttctgtctccacttaaaaagagaagagcacggtggggcgtggtggctcatgcctgtaatttcagcactttcagaggctgaggtggacagatcacttgaggcccgagttcaaagaccagcctggccaacatggtgaaactccgtctctactaaaaatacaaaagttagctgggtgttggccaggcacggtggctcatgcctgtaatcccagcactttgggaggctgaggtgggtggatcacctgaggtcaggagatcaagaccatcctggctaacacggtgaaaccccatctctactaaaaatacaaaaaaattagccaggcatggtgacacccacctgtactcccacctactcgggaggctgaggcaggagaatcgcttgaacccaggaggccgaggttgcagtgagccaagatcatgccgttgcagtgagccaagatcgtaccactgcactccagcctgggcaacagagcgagactccgtctgaaaaaaaaaaaaaaagattagctgggcatggaggtgggcacctgtaatcccagctactcaggaggctgaggcatgagaatggcttgaacctgggaggtggaggttgcagtgagctgagatcgcaccactgcactaaaaaaaagaaaaagaaagaaaaagaaaataaaagaacaaaggttttctgagctttaagtatgaagctccatgggctcagaagaatgaaagcactttgaaataactcagaaacagaaagtcaaacactgcatgttctttctcccttataagtaggggggtaagcaatgggtacatgtggacagacagagcagaatagtagacattggagacttcaaaaggtgggaggataggtgagagatgaaaaattacctattgggtaccatgtacactattcgggtgatgggtactctaaaagcccaggcttcaccactgcacagtatatccacgaaacaaaactgcacttgtaccccctgaatctataaaattaatacaaataaaaaagattgaaggcacctgtgttcttaaatcctttccaggaaaatcagaactgtttgccccaaatctcacttggcccttgtttgagtccttcatccccctgaataaacaccttcaaatccttcccattactcttgggataaagaccaagaatatattaacatggtgtgaattagaccctgcatggtctggcacctccttaccttagctggcaccagccctctccatcttggcactcgctcctgccttggggccatcacatggtccatccctcttgcccagcagtagcttcctccaagcttctcaggcttcagatcccagctcagacatcacttcccaactagccccaacgaggttggatccccattttctctcccatagttctctgcgtggctgtgatttgattcatgtctttctcccccaccactctgtggattccctaaactgtcttgttcattgtacccagccccaccacacagctggcacaggagggcctcctgcaccatgtggcccctttgctcatgcatccttggcagaagaggatataggggctggtgagacttgttcaggcttctctttccttggggtctagggccaagctggagaaggagcgcgatcgggccagggtgacaggagggatccctggggaggtggcccaggacatgcagagagagcggcgcatcttccagctgcacatgtgtgaggtaaggggtgctctggatgagggagggggggcgtgggatgtgtcttcctgtctgcctctccaggggaccagtcacagcctcagctcaggtcctggccacatggccctgtgggatgtcaccaaggcccagtcgcagccaggaggattagcctgggatggggactgcagcccctcgttcccaggattctgcttcagctcacatcacgtatcttgccctgccctcctcctagtatctgctcaaagccggggagagccagatgaagcaaggtcctgacttccttcagagcctcatcaagttcttccacgcccagcacaagtaggtatcttcccgcgtccctgccactaacccttccagtgtcacagaacaaggcccctctcaaggtgtgatagacctgagagtctctttggaggcctgcatctttttggcagaactttcatagttcctcattgagtgctcaccgggtgtcaggcatgagtactttacaaacatcaattcgctcaattccccaacacttctgggagcaggtactctattatccccattttatagatgagaaaactgaggcttattttccaagattacatagctagtaagtgggatttgaacctagtcaagagagactcttgtctatggagtgtctgttcttgaccgtcagactacaattccctgaggtgccctgtgatccttacggcagcttctcccacacttctggcttcatctctcatttccatctttatctggacccttgtttggcctctgacacctcttagctttttccaagatggctggaaggctgcccagagcctgttccccttcatcgagaagctggcggcctcagtacatgcagtaagttgggtctcacccttgggcacgtgatcaagccccctgtccttccaggaaaatctgtgggtgtggaagagctggcttctgcccacagagtgaggctactgctctgctcttctgggtctgggctctgtgcctgacatatttgttggctggtgatgggatcccatcctctgtcccatagctccatcaggcccaggaggacgagctacagaagctgacccagctccgggactccctccgagggacactgcagcttgagagcagagaggtcagcccctgaactatcccaaaaggaatgccctcccccaaggcccaccgtggagggagggagagaaggaagacccacagggtcccctggagaagtctccctgagtgagcccccgcagaatggggctcttcccactgagatgccctgaggtctcctttgcatgtccgagggacaggaacacctgagccggaagaactcaggatgtggctatagcatccaccagcaccaaggcaacaagcagtttgggacggagaaagtgggctttctatacaagaaaagtgacgggtaagtgattcagagcttacataatttgcccaatgtcacactgcaagtaaatgacagggttggggaagctgcccaaaggaactgttctaatcatttgtgtagacaccgagggttgcaatgtaaaatcctcaattcctgggttgtccaggacacctgggcatgtgaacttctgctaaaggtgactggttattttaagttaaagaagaagaatagcagtagctaacacttttttttttttttttttttgagatagagtctcactctgtcgcccaggctggagtgcagtgccatgatctcggctcactgtaagctccgccttccgggtcatgtcattctcctgcctcagcctcccgagtagctgggactacaggcactcgccaccacactcggctaatttttttgtatttttagtagagacggggtttcactatgttagccaggatggtctcgatctcctgaccttgtgatccgcccgcctcagcctcccaaagtgctgggattacaggcatgagccaccgcgcccggctggcagtagctaacacttattgcaacacttactatgccctcattcttttttttttttttttttttttttttttttgagatggagtctccctccgtcacccaggctggagtgcagtgacgtgatctcagctcactgcaacctccgcctcctgggttcaagcgattctcctgcctcagcctcccgagtagctgggactacaggtgcccgccactacgcccagctaattttttgtatttttagtagagacggggtttcaccgtgttagccaggatggtctcaatcttctgaccttgtgatctgccagcctcagcctcccaaagtgctgggattacaggcgtgagccactgcgcccagcctatgccctaattaatctctgcaatatactgaatatgcctagaaatgaaagtattggctgtgccttgcttcctagtgtaaaaaaaaaaaaaaaaatcagtctgtgggccaggtgcagtggctcacacctgtaatcccagcactttgggaggccaaggcaggcagatcacttgaggccaggagttcaagaccagcccagccaacatagtgaaaccccatctctactaaaaatacaaaaaattagctgggtatggtggcgtgagcctgtagtcccagctgcttgggaggctgaggcatgagaattgcttgaacctgggaggcagggattgcaatgagccgagatcgtgccactgtattccagcctgggtgacagagaaagatcctgtctcaaaacaaaacaaaacaaaaaaacaaaactgctgtgaaatgcaaaggcccttgtgggatatattcatgtttctacctaccaatcagtttaatcggagaagaataactttgaagaagaaaccaatgaatatttacctgttacaggagaagtgttacggagttttggatcatggacttgctaattttattttggggatattaatattgatcttgcttagttgaaccacaatttatttgttgttgtcaagagcctgtgcctctcagactaggagctccctaatgatataagctatgtctcccccatcagactgggagctctcagagggccaaagtcacatcatccccttagaataaggattcccagggagtgaggctgtgtttctccatcagactggcatcttcctaagagcagaactgtgtctcctccatcagaagggagccccagagagtcaggggtcaggggtgggggtgtagggttaggagaagaaagaggtaaagggatgtggctagagatcatacaggtgggggcaaatttctgttctctgacacctgcgaactaggtgtgagccttgggtcactgtccttctatccctctgggctttagaattcgaagagtctggcagaaaaggaagtgtggagtcaagtatggctgcctgaccatctcacacagcacggtgaggcctagaggtggtgggagtctcagggcacgatggaccctcttcttctggtgttctgagcaaataatgtcaagccctccctctaagactggcccccaaacctaggtccagggagctggagacccgtttgggaggacagatgggacctgaaggccccaatctagtcttagtctacacttcacatccttgaggtgctgctgggtgaggagaaacacaaatggaacaggatgattatgcccatttaacagagtgggaaatggaggcctaaagaatgtggagggccagaggtaatgcatacatcctccgcccctaaattcccacagataaaccggcccccggtgaagctgaccctgctgacgtgccaagtgaggccaaaccctgaggagaaaaagtgcttcgacctggtgacccgtgagtggtccctgtgcctctcccccacccacagctgctcagggcttctctaagacacctgtcagctcccggggggcttcagtgaggggtctgtgtccagttccacacatggtgtcgaattgctgctactgcagacataagaatccttaggtctaggatacccacatcacattaaatgtcaaaatgcacccactttacataataaatgtggctatttatacagagcatatttgagtggatttgggtcatctgggttttgaaattatttctttttttaaaattttacctttttttcccaaatacccagacttgaaggagatgaaattattgtttctttacattttctacttttcgttcttcagagcctttggtgcaggctttgtgtgagagcagacacaggctgagaaagacctagatcttgtcctcaggaaactctctggcaggggtgtggggtgggtacccaggactgtaagatgagggggctgtccagaagatgggtgcagatatagccccatagaagattagggagcaggaaggcctgcactgctgtggggaatcaggaaaggctcctggaggagacagtatttgagtttagccttgaaggacatgtagaatgaagagtttgtggggtgggggcttttgaggagacaggattagcatgatgaaaggcatggaagcaggagagtgggtctggccggtttggccagagtggagggttcatgtagcagagtgagagatgaggcctggaaatccctcttaaaagtttggaccttatttcctggcaatagagagccatgggagatcttggggcagggcagtggtgtaattagagcagagccttgggcacaacagttgggagctggtacaggctaggggaaaggggaaatgggaagcagggagaccagacaggaggcctggtcgcccaggaggagaccaggaagggcccagtggggtggtgacagttggttcagaggatgccctgcctcagagctgggttctctggggttccaagccctttgagacctcgtctgagcctggaaccagggcttcacgcagagggagctttgttgggatcctacttcggaggccagttctgagaaactgcccctggtgctggccactgtcattccactcccttcccactcctagcttgagagtccgacttgtcagggacacatctccatgtggccccagcggctttggtgggggctccctgggctccgggaaggccagcagcatttctgtgggtcagaagcccccttctctcccgacagacaaccggacgtaccactttcaggcagaggacgagcacgagtgtgaggcgtgagtgccccctcggccagcccggccagccttgtgggtgggggccggcggccctatctcttcccacttgacatccccatcccaccccgttcaatctccgcaggtgggtgtcagtgttgcagaacagcaaggacgaagccctgagcagcgccttcctcggggagcccagcgctggcccggggtcctgggggtccgccggccatgatggggagccgcacgacctcacaaagctgctcatcgcggaggtgaagagcaggcctgggaatagccagtgctgcgactgcggggctgcaggtcggtccccggggccggggcaggagggaggcttaagtggaggggaggggctgcacctccaggctccagctgctttcctctgcagaccccacgtggctcagcaccaacctgggcgtgctcacctgcatccagtgctcgggcgtccaccgcgaactgggcgtgcgcttttcgcgcatgcagtcactcaccttggacctgctgggcccctccgagttgttggtgagggcggggcggggcctggaaggggccagaagcggagttaggggtgtagtttcatccgggggcggggcttgcaggttgtgggtgggacctggccgaggtgggctgggacaagccaggtagcgggtggtcaggggcggggcctgaaccgggagggcggccgaggggcgggactctgggggcttggagctccaccctatgcaggcttaaccgcccggtcttactccgccccacgtctattttcctacgactccagctggccttgaacatgggaaacacgagcttcaatgaggtcatggaggcccagctaccctcacacggcggccctaaaccctcagctgagagtgacatgtaaggggattctcagagagaggggcaccctgcctaggggattctgcctccgcagtgtccagggtcgtagaaaagtcttggatcagaagtctggggaggctgggcgcagtggctcacgcctgtaatcccagcactttgggaggccaaggcgggcggatcacttgaggtcaggaatttgagaccagcccggctaagatggcaaaaccccgcctgtactcaaaatacaagaattagctgggcgtggtggcacacgcctgtaattccagctactcaggaggttgaggcactagaattgcttgaaccctggaagcagaggttgtagtgaaacgagattgcgccactgcactccctcctgggcaatagagtgagactgtctaaaaaaaaagcctggggagaggggagcctcagatctagacgtcttcaggacatggttctggagaaaaagagagctgtatctcctgtgggagggccccagggatcagctgggcagacacggtccatgctctgagatcctgtggttgtttttggtaggggcacccgcagggactacattatggccaagtatgtggagcataggtttgcacgccggtgcacacctgagcctcagcgactctggacagccatttgcaacagggacctcctgtcggtactggaggcctttgccaatgggcaggactttggacagccgctgccagggcctgatgcacaggtgagaacccctccaagggccacttataacccacctgtctaacatattccccagttcttctccaggaccagctgttactcccctccaccccacctctgacatctgctcagatctcacccatcagagtggtaagtgggaaagagcacagcttcagtcaggcagacctgggtgggaatcctggctctgttttttcctagctgtgtgatctagggcaggttacttctctgagtctcatttcctcatctataaaaggggttaataatagcacccacggtgatgaagtgagaagtcatgtatataaagggcttagtgtacaatgggcatgcaataaacgttaatatctttttctttcacctaaatagccctgaaatataagggcatgtcagtttagagccaggaaggccacattgctttggctattccaagaacaaacacatgagcatggagaaaggatatcagagacatttgaaaaagtaaatcaacaggagttgctgactgattcgacatcaaaaattggatgttggctgggtgtggtggctcacgcctgtaatcccaacactttgggaggccaaagtgaaaggatcacttgagcccaggagttcagaatcagcttgggcaaaataaggaaacccccatctctacaacaacaactaaaattagctgggtatggtggcacacacctgtggtcccagctactcagaaggctgaggtgggagggtggcttgagcccaggaggttgaggctacagagagctgtgattgcgccactgctctccagcttgggtgacaaagcgagaccctgtctcagaaaaactaaaaacgggtatctttgaactgtctgtctgatatcttggtgggctatccaatgggcagtgcagcacttaggtgaggtaagaatttggaacagcctgcacatgtgtgatagttgaaaatgtgaggttgctgaggtcttggtggggaagtgcgatcagggagaggagccgagagctgagaaagaagtttgggaaacacttgttgggggcagaggaggaagagccgtgaatgggaacaatgggagaatggcccttcaccttcctcccagacatgaggctctgcccttgcagtctcatctctccagggttctggcagcttcctatggggggataaggggttagcaagagttcaagagggaaatactgggttggaggcaggtgcactggggggggaatctcagaggtgtggatgtgttttcaggcacctgaagaactcgtcttgcatttggctgtcaaagtcgccaaccaggcttccctgcctctggtggatttcatcatccagaacgggtgagagcctccctgcctgtctgtctggctcctcacactccctctcctttccttcctcttctcccattctcttccctcctttcccctcccactttttcccctgactttgatcccctcattgatctgttccccttcctttctccctgaaccctcctctccccagtggtcacctggatgccaaggctgctgacgggaacacggctctgcactacgcagcactctacaaccagcccgactgcctcaagctgctgctgaaggggagagctttggttggcacaggtggggcttgaatacctcctccgtcagactcctattcctgactaccccttatgtggacttccgatggtctcgggctctaatcctggcttgcttctgaccacctctgtgatcttaggggtttgtcattcagctcttgaatttcagcttcctcatctgtaaaatgggaataataccactgacctagcaggactgctaaagaaaaaagaaaataatatttctgggagtacttaggcaaataaatattagctagatctgaatgataatgattgtaatagctaatatgtattgtttaacatatgcctggcaatgggacaagtgctttttgtatgttaattaattgaatcctcacaaccacttcatcaggtagttccaagtattatactcatttcataaacaattttgtcccaaaaggttatataacttgcctatggtcacatagccagaaaatggcagagccaggattcaaacccatacattctgattccagaggcccgtcttaatctctaagctgtaatgtttctttgactatgaccatgaaccctgactttccccgctcacagtaaatgaagcaggcgagacagctctggacatagccaggaagaagcaccacaaggagtgtgaggagctggtgaggactcggggaggcaaggggcccctgactctttctctctccctgctgagcccccaaccctctgaaccaccaagcctttgtttttggcagctggagcaggcccaggcggggacctttgccttccctctacatgtggactactcctgggtaatttccacagagcctggctctgacagtgaggaggatgaggaagagaaggtgggtcccagccctgtccctcaggcctctggatggcagaaggaaagagccagattgggcctggtgtgtgttggcgggggcggtgaggcggggggacagggctacaccggaggaaccaggctgtcctcatcctcaatcttttgctctggcagcgctgcttgctgaagctcccggcccaggctcactgggccagtgggaggctggacatcagcaacaagacctatgagactgtcgccagcctgggagcagccacccctcagggcgagagtgaggactgtcccccgcccttgccagtcaaaaactcttctcggactttggtccaagggtgtgcaagacatgccagtggaggtacagttggatgcccagataaatgctcaccatgccattcacagaggacctgtatatgctggggcactgagctgagtgcatatgttagtccgtactatccttatgatgacctcccaggaaggggttctcatcttccccttacagataaaagaacagaggtgttaagtcacatgtttaagatcccacagctaataagtctctgatgtaggattcaaatctcagcccatcttattccaaattcctcaatgctccacttaacaagagagaaacgagtttattgagcatccccttcatcctgagtcctttgagggctaccaagacacagtctagtaggggagataaaaactggaatgcaattcattataatacaaggcacaatgtgatatagaatgtaaatcccaaaaggacaaggactttgagtgtttcattgaatactatttgtccagtgcctagcgcagagcctggctgttctcaagaactatttgtcgaatgaaggaacagacttgttgtgggaggttggggcagttggagagggagcatgtcctgctgggattgggggttggtttaagaaggcttcctggtgaggatagcatatgagtgaacctgagggatgagcaggagaatccaaactgggacagggtatgagcacaagcaaaaaagtgagtcagcatggccctggccaccgcgaacaaaggcttcatcagttgaaggagaatactggacaggtagatggggaatggactattggcagagaaccagaagagatcctaggccagatgtggtggctcgtgcctgtaatctctgcactttgggaggccgaagcaggcggatcaccccaggtaaggattttgagaccagcccagccaacatggtgaaaccccatctctactaaaaatgcaaaaattagccaggtgtggtggcatgcacctgtaatcccagctactctggaggctgaggcaggagaatctcttgaacctgggaggcggaggttgcaatgagccgagattgcaccactgcactccagcctgggtgacagagtgagactctgtctcaaaaaaaaaaaaaaaaaaaatcctagaggccagagactgctttgaggttgggcacagagcaagtgataaagaaaagctttatcatttctgatgtttctgattccagatcgttctgaagtctccagcctgagttcagaggcccctgagacccctgagagcctgggcagtccagcctcctcctccagtctgatgagccccttggaacctggggatcccagccaagccccacccaactctgaagagggcctccgagagcccccaggcacctccagacccagcctgacatccgggaccaccccttcggagatgtacctccccgtcagattcaggttggtgagggcccagctgtgcaaccagggcaaatcccctgacttctctgagcatccattgatttccacacctctaaatagtacctgcctaaagactgggtcacacgccatctctgggcccatcacttatgcagaaatgctgaaccctgggaccccttcccccttcacacacttgctcccaaatcctgcatggagagctgaggaggagccagggatcctccctgctgatgttggagtaaagtaggcttagccccctgtgtggcttattctagaggctctcagtggggtcttcactctgtccccacctccaacccaggatccagtcttctcccttccatacaaacccattcagtctggagtttggggagaagtagacctgcagatatccacagagtcttctggaggtcagttccagccttcttgggcctgtgatggacctggcctgggggccttgtggactctacccacccatcctaagcccccagactggctctgttcctgagccctttctccccactctgaggggctctctggacatgagggtcatgttggcctttccctgccttccagctccgagagcactcgctcctatcggcggggggcgcggagccctgaagatggtccctcagccaggcagcctctgcccagaaggaacgtgccggtaggaactctgggaccatggtttgaggggcggtggcagggtgcctgggaggcagagttagtcaagagtaggcgtattggggtgggagacctccccatggttggggtacagatgggcccaggcagccacagtttggacagtccctgtcctggtgcccaggtgggcacggtttggccagtccctgtcctggtgcccaggtggccacggtttggccagtccctgtcctggtgcccaggtggctgcagtttggccagtccctgtcctggtgctcctctttccatgctccagcccagggctgggtgaagctgaggagagcccaggccttgagggatggcagtgatcatgaggcccaagctctggcttctccccaggggaggatgaggaaagttgtgttagccaggccagtcgctcagagaaggcatcacttccctgcagaagaggcaggattaggtggccgtgtaccagcccttgtttgcctaactctccccttgttcatgagtctcctggaatccacagggactttcagatcccaggcatagagggatgtgacagggacagggcaagagctgtcatccttaatccagcttctccctgctgaatcaccaagtctccaacaatggcatatattagttgaacctaggagtgggcacagatcagagccagttgtgttgggaaagaagcctcttctgtcccttgttcctctgggaattcctcagaatggcattggttgtgttgggagtcaggatggcaggggcaaaagctggttctgtctggggaatcgtcatctttagtccaccagagttagtcagcagacacaaatctatgtccatattctggttccactattgccctgaaaaccaagtatccatcagatggcatttaattgatgcctgtgattgtggtgtgtatgatagcaagagcttgggctttagagtaaggagactttggataagtggcttcacttcctcaagcctcagtttctttgtctgtaaaatgagaataatttaatttatctacaataggacagatgtgaaactgagtgagatgaacacctggtatgttacaggtgctttgaaaatgtcagtttcatccttctttctgcaggttggcatcactgaaggagatggctcaaggactgggagtctcccagcaagttctgtgcaacttttgcaagactagctccttgctggcccccacatgccccatgctaggccccaatgttcagagctgggacttgagctcacaaaactggggagctgagacatttgttctcttggatctcactctctctgtcccttgtgcctctgtagctggccttcttcctgccacaggccatgcctctaccaaggacacatggcctttccctgttaggactgatggcggttctttcctatctcattacccgctaggggcctgggagccctgtggctggatctgagtgctcctgagctggcttcagctgcagaactctcagtccctcatcagatcgagactctatttcccccgtcagtctgggggcttcacaagggcaggagagccctccatcactgacttccagatcagggaccctgccaagtagggactgtcttctcagccagccatttattagtctaatattccttcactaaattccaactctatgtctggacctgtgttaggcacttcagataccacacgagtaagacaagggccctgcaggggtggtcctttggtggaaagctggtcttaagggttgggcttgggaataggcagggtcagattccagggcatggctctggactcagctggtttatacctatatgaccattacaattgtctacagatcacatccattctggctggtcaacatgcatgctgtactggctgttaaataaaaatattctgaatgtcactccttttgagggacagcacagccttccctaggcattctcctatattccccagccaaattgtagagtcagatgcacccacatttgcctgtgtccttgatttagcaggaaggaaaggaatagtcagggttgatggatgcccacttctcttctctttctcttggtcaactcaggagccttttagtctgagggaatggagaggcaaagaaagaagggagagtaatagaattgggagggcagagacttaagggttctgcttcccagccctagaaattctatcattgctcagccccaatgagaaagcagatacacctaagccatcatcaaccactaacatctcaacttgccagttgctgggtgctgggccctggcaggaatgggccaagccaagcaggggagactagagagcaccaatggccaacacagctgcctggctggggaggctgtgctgtttcccctggagacctgactggtctgtggttcccacaggaacagggttgtcttttgagcccccagtgtctggtttcattcatctcagacttgttatttcactcatctctaataaaggattggggggtcagtt

SEQ ID NO: 15464 - DNA, 281339 bp, Homo sapiens
ctcggcccaacaaaatggcggcggcagcggtgtcgctttgtttccgcggctcctgcggcggtggcagtggtagcggcctttgagctgtggggaggttccagcagcagctacagtgacgactaagactccagtgcatttctatcgtaaccgggcgcgggggagcgcagatcggcgcccagcaatcacagaagccgacaaggcgttcaagcgaaaacatgaccgctgagcccatgaggtaaaacgcaaccccgtctcatgggccccagcggtctgggcccaggcaccgtctgagtcgggtgtttgggaaggcgttcgcttggtgggttaggcctgtgtgttgcttagccgaaagaggcatcgttttctctttaggtgagaagggtttcggggtatcggcgcaaggctccgacgggggtgggggtggggatggggtggggggaggtggggggggcgcggcctagggtatggggcgcttcttgcaatctcccctaaacggtgacgcttggtcgggctcctctgtttattctttggtgcctgtgggattgagacctcgaagtcggaggcggtctttggtatcccggtcatttttgctaatctttgggcctagaaactgcgtggggaagaagcggggggagggtgagaagagggggaggggtgggcgggcgcgaggatgtgagatcccaggacgacttagaggcgtttaggttgctggagatgggaagcacccgggccctgcgggattttttttctgcagccccaggagacaagcctttttttgattgggttgtggtgcagttccaggtatttaggtatcttttctactccatatcctgaaggatatccttgggtttatttctaggcgaggggggacttaacacagggttttgcttccagaggaccctagtatactactttttgtgatgtccagccttaatgggacctcaagtgtttccccactttctgggcaaatttcgaggagtaattaggccctatctttatttacttatttattccatgaaggatgaagggcaggttaacgtgggctgatgcgaagtaagatttattgcaagggaaaatgcctggcaggcctcctcttaaccaatcaagcacgtttattaggttgaagctgtttttctgtgtgcttctgatttgcctcttgacgggtctgaaaatttgggtagtcaatatgaaatgtatacacttttacccaggtggctggctggcgtttcagtttgacatttgaattttcatcccacaatgtgaattaagtaatttttttactcggagatgcatccttggcgtccagtggcaaaataaaattacaaggagcatgggtcagaattgcatttcaagttggcgaaatgtgcctttgagtaactcttagattggcatatgtttttagagcaatttagctagaatgtagaattgggcaatgagcctatgatacgtatgtctgtatttctgcatgaacaagcagtagattatattttctttaccttggggaaagatatgcttcagttcttagattgtagatctctagttgtgtacacgattgtggccttggtttctgaatttgtcagtaggctcaaatacaacaaatctttatctgtggggtattaggcacgtaagtggtacccagtataacttgttggcctgtaattaccaggcactcatgttcatatgcatggatggtgtaccttacagttaaattatgacctctagattttactaagtttcacaaagtctacatttgaaactatagtttgaagtcggatcttctcagtttctttagaatgaacaaattacgtatatagaatttctgaatagaataattaattttacacaagggtcagtttttcttactagtcttggatttttgtagatcttgatgataagagtaataatcataactaagttgagtgcttattgtcgttctttataatcttgatgaattctcaaacctgtgaggtaagtacttggttttgcccattttaccgatgaggaggaaagtgagacatagatcaagaacttgaccgaagttatacagcttgtaattggtggagctggaattgaaccccatcttgacttcacagcttatgttcttaaccacaaggcattaatgcccccttcagctgccaggtctaacctgattatgaccatttaaatttagcccaagtgttacaatgaaagaagttcatattacctactctgatttgttgcaggtctatgattttgtagctgtttataatgttacattttttgtgtccaggtgtactatgtagtgagataactgaaatatttaatgctaggagagtcttaagctacatgaaaaacctctagtaaagaactgcatatatgcatgtagggaattaattaaaaagtgtgacactccctgatgatttactatgaaagagctccaagtaggtgttcagaactgtctcaggctgaagtgtcatcgatctcctaaaccataatcatggttaaaggagaatctgacaggtaatgcttgagttgaacccacagtaccaaatccctcttgagtcttttctaatgtgaggcagaaataatataagcattattgttaatattattttacacagtagttccagattttctctttatcaaatattttgtcaagcacttaaaaagcaggaacaaagactagttctaatttttacttgtgtttataaaaaaaagtaatattctaggattctgtggtggaaaaatggccagaagacaagaggaaggaaaataaaccgatgacctggctaaaacatacactgactaatcagtggctcagtctttaaaggttttgttgtttttaaaggatttttttggttgtttgtgttgtttgaaataagattgacttgcttctggcattataaaagataaggtcttttataatcaccaagctctcaatgtagtacttgggtacctgggtgtcactgctgattattttttaatttttaaatttatttttttgagacagagtctcactttgttgcccaggctggagtgaaggggcgtgatcttggcttactgccgcctccgcctcccaggttcaagtgattctcatgcctcagcctcccaagtaactgggattaacaggtgtgtgccaccacgcctggctaatttttgtatttttagtagagagggagtttcaccatattggctaggctggtcctgaactcctggactcaagtgatctacctgccttggcctcccaaagtgctgggattacaggtgtgatccaccgcgcctggctctctgctggttattcagggcccaagggctcttcagttatcaggtgatgtatgctgctaggactgggaccttcccttcagggcagcagattcccttctggcccaggatgtgtctagaattgtcatcctggagctagggcctggaatggaggcttcatgactgatgaactttaatttgttttctttatttttattttttttgagatggagtctcactctgttgcccaggctggagtgcaatggcaccatcttggctcactacaacctttgcctcctgggttcaagcgattctcctgcctcagcctcccaagtagctgggattacaggcaagtgccaccacacctggccaatttttgtatttttagtagagacggggtttcaccatgttggccagccaggctggtctcaaactcctgacctcaggtgatctgcccgcctctgcctcccaaagtgctgggattacaggtgtgagccactgcgcttggccttaatttatttgcatataaagatttcagtattgggagatttggtgaaatttgtcattctaatccttatggcaattgattacttgaaaagctgacagctatattaccttgttattgatcttaaatataaaaaggcagaagttgtctaaattgagagattttgaatgtcttagaaagtatctgttaaggtggtagtttacaagcagttacattgtaacctaattgttgaaaaatgttatctgtgaaatacttgcatttccactatgaaaagcatgaaaccaggcccttggagggggaggagatgcaaattttataaaggtttttaaaaagcatttaaatatcaatggcttggttatgtaatgggttggggtgaaaagaaagacatttgtgaccttaatttttatcaggcccagttttattattggccacccttggcatagttggccttgagctttcagttatgtattgtatttctagagataagataaatgtagtacttaaaataatatttaagtattgatgtaggtgtgtgaaataattgtttcataagtaattgtatgtgtctttttcacttttggggtctgaataaacttatgggttgggtaataggatacgggcaattcttgaatttacatgaagtgctttcccccagaccgtgaatgttcttttggatatcagaaactatttaaatagttgaagccagtgaaaactgatgcatagatcttcctttagaaatgttgaatataacagggcagtgaaaggagggtctaagcagtctgtctctaattttatcctaatgcttgtcttatgatcagcttggaagctgacatgcaagatgtttaacttctatttttccatctgtaaaatgggaataagctcaaatgggagtaaatatcaatatttatcaataatagatattgataaagtctaaaggtattctgaaggaggtaacatgtttgtaacaatggttcttaaaagagaaactaaagctctggggtcctagttttttttttttttttttttttttgagacagagtctcactatgttgcccaggctggagtacagtggcacgatctcaggtcactgcaaactccgccctccgggttcacgccattctcctgcctcagcctcccgagtagccgggactacaggcacctgccaccatgtgcggctaattgtttgtatttttagtacagacagggtttcaccgtgttggccaggatggtctcgatctcctgacctcgtgatttccacccgcttcggcctccaaagtgctaggattacaggtgtgagccaccgcgcccggctgttaatttttaagagtgaaaagaggtgctgcgactaaatggtttgagaactgcttgtatagaggaatgaacactgaactgtgagccaagccttggtttttcagttatagctctgttgcttgattgtatgactgtggacaaatcatttatctgttccaggcttctgctttgtcatttgcagaacgaacaagactagatggtctgtagcattaatttttttttgggacaaggtctcactgtcacccaagctgtagtgcagtgacactgaacatggctcactgtagccttgacctcctggctcaagcaatcctcctgcttcagcctcccatgtagctgggaccacaggtgtgtcatcatgccccgctaattttttgatttttttgtagaaacagtggtctcactttgttgcccagtctggtcttgaactcctggacttaagcgatcctcctgccttggcctcccaaagtgctgggattacaggtgtaaaccaccataccctgcctaaagttagtttttaaaaaattctgcttacaggccacgtgcagtggctcacgcctgtaatcccagcactttgggaggccgaggcaggtggatcatgaggtcaggagttcaagaccagcctggccaagatggtgaaaccccatctctactaaaaatacaaaaaaaaatcatctcggtgtggtggtgggcacctgtaatctcagctactagggaggctgagacagagaattgcttgaacccaggaggcggaggttgcagtgagctgagattgcgccactgcagcctgggcgacagggtgagagtctgtctcaaaaacaaaaacaaaaacaaataagcaaaaaattctgcttatatgagtgtttatcattttctcttatctgccttttgtgggttagggagaagggtagtggtgagataaagtttctttattcagtgtatttatatctttttgccttaaaacttacatggttaggttacaggtgttttgttgctgatacttgtcatagtatcatgtatacctggttgtataaacatttattggaaaggaaaaaacatttttgttggaaagtttggtaattattgtggcttaggatatgttctattttgaaagattgctatatccagtatatttctgcccttttatgattgaagatgtacgtctgaaaatacctatgttagttctagccggttgttctttttgcgctgggaagtctttgaattttgcactgtagctgctattttcagatcctgtctctgaaactttgtctctcagttttagcttgaagtagccatttcctgtatctgtagtccagcactcttgttaactgtcccatacaatatttgttaagaaattattgttctggcagtagtattcacatgtatatatcctgcactccatattttgggggaatgctttattagttgatcaaatacttaagtatcaatttggggccaggcatggcactgtgttagggttatgccaaaggtaataaaattcctgccatcttaaggcattcttagtcaagtgagggagattggtaagtaaatgagcaattagaaagcagtgctaaaatatggaaatatattgattgcgctagggatcagaaatgaaagaaagcctaatttgggggatgtctaggaaagttttgcaaaggagatgttaactgtattgagtcttgaatgagttagcagttaagggttgactgtgagagggcagtccagacagctattagtatggttaaagattagtcttattttccatatatcagaggaaataagacatgtacacgattagttttggtgcaagatataaagtgataaatgctgcatgaagtaaaagtaagttgttgtgtgagttcaaagtagaaagacatttctggtggggaccaaggaaagctttatagagagatagcatttgagccgggcgccgtggctcacacctgtaatcctagcactttgggaggctgaggcgggtggatcacgaggtcaggagatcgagaccatcctggctaacatggtgaaaacccgtctctactaaaaatacaaaaaaaaaaaaaaaaaaaaaaaaatccgggcatggtggcgggcgcctgtagtgccagctgctcgggaagttgaggcaggagaacttcgtgaacctgggaggcggagcttgcagtgggccgagatcgcgccactgcactctagtctgggcaacagagcgagactccgtttcaaaaaaaagaaaaaagagagatagcatttgaatctagtccttggaatataggtacagttttgacaaaggagactgtgggagaattccagatgtgaggagtagcagcttgagcaaaggaatgttgtgtatattagcattttctatttggaagaaggtcaacatcgaattttaaacttaatttctggacaaatactgtataactattgtgcctttttttttttttttgagacgtagtctcgctctgtcacccaggctggagtgcagtggcatgatcttggctcactgcaacctccgcttcccgggttcaagcgattctcctgcctcagcttcccgagtagcttggactacaggcgtgtgccaccatgcctagctaatttttgtatttttagtagagatgggatttcaccgtgttggccaggatggtcttgatctcctgacctcatgatccgcccgccttggcctcccaaagtgctgggattacaggcgtgagccaccgcgccctgcctattgtgcttttttttttttttttaagagacagggacttcctctgtcacccagcctggagtgcagtggggtgatcatagctcatagcttactgcatcctagaactcccgggctcaagtgatcctcccacctgagcctcctgagtagctgggaccacaggcatgtgccactatgcccagctactattgtgcattttgtatggtagcttttgtggcttgatgatcttgtaaaaggtacatgtgcctttgtgaatgggcctgataattttagttcagaattgtcaaaagtattatctacttttttttttttttttgagacagagtctcactctgtcacccgggctcagtggcaccatctcagcttactgcaacctccacctcctgggttcaagcgattcttctgcctcagcctccgagtagctgggactacaggtgtgagccaccatgcctggctagtttttgtatttttagtagagacggggtgtcaccatattggccaggctggtctcgaactcctagacctcgtgatctgcccacctcggcctcccaaagtgctgggattacaggcatgagccaccgcgcctggccagtattacctacttttaaataagattgtgtaggatttaatgcacagattttgaatcactgtgataaaaatgcatccttagttgtcttcattttgctcatttgaagtgctcagttgacttttgggtgggtaacatttgacttatagaatctaagataaaaaattatttctgagtaatactggatttgttattttgcttatttggattatattagttattttttggtttatttgatagcattccagatttagttttgctataatgcttgttttgaaaatgtggattttttccaaaagggttgatatttcagggaacaatttgaagcatacgacaaaatttgcatttgcttatgggggattttgtctgcagggtcagggatcagcatactgtggcctaccaaccagtggcctgttttttgtaaataaagttctttttttttgtttttgatctttgttttgttttgttttgttttgttgagacggagtcttgctctgtcgcccaggctggagtgcggtggtgtgatgtccgctcactgcaacctccgcctcttgggttcaagcgattctcatgcctcagcctcacgagtaggtgggatttcaggcatttgccaccacgcctggctgatttttgtattttttttttttttttttttttttttttttttagtagagacagggttttaccacattggcctggctggtcttgaactcctgacctcaggtgatccgcctgccttggcctcccaaagtgcagggattatagatgtgagccatgtaaataaagttctattggaatacacctatgtccatttatttacattgtctgtggctgcttttgcactgtagttgcagagttgaatagctgcagcagagacctagtagcccacaaagcctaaaatgtttactgtctggccctgtattgaaagagtttgctgattattgtgctagatgaatgcaggatactacacccctctaaaaagagctgcatagaaatacatgcatatagatgcacacacgtctgacatctaccagctacctcatttcaccacttgggttataaaccacacatatttacatctgttgtacaattttcaatccgatttcagataaccttccttctaccacttcacaataattcatgagctgcaacccttttgatgcccacttcacaagcaaacttcaggtctttttcaaagtaaagtgccacatttattgttatatttgagcatttattatttaacatgtcaaactgtgctaccatttttctttggtttctttgttttaaaaaaagtcactgatgaaatttttgaatgttgtgcttctaacctcatttttcctatgagttctatggtgttaattgcacaattttacatagtttggtggtttttaggaacccatatgttacattattgaggaactgactaattatcatcctgtaaaaagtactaattcattcaccaaacatttctggggtgatgtaaatattaagtgagttaaatgggcataaagcacttatgtctttattgttactcaaatattagttattactgattactattaccatgtgtcaggaactgtaataagtagtgcattgatgaacaagacagataagggacctgtctccatgaagcttacattgtatttttaaaaatctattaatatacattttggctagtaaccgagcccttgccccacagaaaagttgtgctgttacacaaaataatattttaagatccatccacaagtcaaagacatttcacttaaaacagctttctcagcagtgtctccttgatagggtataatattttattgaattattgtttttggctgggtgcagtggctcatgcctgtaatcccaccactttgggtggccaaggcaggtggttctcctgaggtcaggagttcaagaccagcctggccaacatggtgaaaccccgtctctactaaaaatacaaaaattagccgggcgtggtggcgcatgcctgtaatcccagctactcaggaggctgaggcaaaattgcttgaagccgggaggcagaggttggagtgagccgagatatcaccaccgcactccggcctgggcgacagaatgagattccgtttcaaaaataaataaataaataaataaataaataaataaagaattattgtttttaatttttgtttttttctgagataggctgttactctgtcactcaggctggagtgcattggtgcagtcatggctcactgcagcctccgcctccctggttgcaggtgatactcccacctcagcctcccgaatatctgggactataggtgcatgccaccatgctgagttaatttttgtatttttttgtggagatgagtttttgccatgttgcccaggctggtatcgaactcctggactcaagctatctgccctctttggcctcccaaagtgctgggattataggcatgagccaccaaacctggccatgtgattgtttttttgtaactgtaacctcaggagatgaatccgatctatctttagggagataaagagtaatcatcccttcctttttttactgtataaaaggttacaaaatataatttcagacttgtagaaaatttgtaaaaatagcacaaagattctcagatgtgcttcatccagatgcagcaaggggtaacattttaccatgtttactttatcatcctctattattatttttctgaattgtttcagagtaaattgcagacatgatgtccctttactcccaaatactttaatacatatttctcgaaactaggaatagtctgttacatgatcccagtatagttagcaaaattaaaaattagcattaaggctgagtgcggcctcccacacctgttatcccagcactttgggaggctgaggtgggaggattgtttgaggccaggaattcaagaccagtcttctcaacatagaccctgtctctacaaaacaaacaaacaaacaaacaaacaaacaaacaaaagtactaaattagccggtgtggagcatgcctggagtcccagctactcagaaagctagagtcaggaggatcacttgagcctagaagttccaggctgccatgaactatgatcatgccactgcagtctagtgtgaatgacagagtgagacccccatctcttaaaataaaagagagattagcattgatacaataccatttttttttttttgagacagagtctcacactgtcgcccaggctggagtgcggtggcgcgatcttggctcactgcaagctccgcctgctgggttcacgccattctcctgcctcagcctcccgagtagctgggtctacaggttcccgccatcacgcccagctaattttttgtatttttagtcgagacgggttttcaccgtgttagccaggatggtctcgatctcctgacctcatgatccgcctgcctcggcctcccaaagtgctgggattacaggcgtgagccactgcacccggccgatacaataccatttttaatctacagaccttattcacattttaccaattgcttcatgacatccttcatgatgaaagacaaaaagttcttgttttctgatctaccatctaattctagaacactcattatatttcattgtcatctggaacagctcaccttgccatttttttttttttgagacagttttgctcttgttgcccaggctggagtgcaatggcatagtcttggctcactgcaacctccatctcccaggttcaagtgattctcctacctcagccacccgagtaactgggactacagacatgccccaccacgcacggctaattttgtatttttagtagagatggggttgcaccatattggtcaggctggtcttgaactcctgacctcaggtggtctgcccgcctcggactcccaaagtgctgggattacagatgtgagccactgcgcccggcctcttctccatttttaaaagaacacaggccagttgatttgaatttgtctgatgtttccctttgattatatattttggtaggaacactatgaagtgatgttttgtccttcacagcacattttatcaggaggtgtataatgcctttgcttttactatgttttagaatgattttgctttgtttttttttttctgagacagagtcttgctctgtcgcccaggctggtgtgcagacgtgcgatctcggctcactgcagcctccgcctcctgggtccaggcgattctcctgcctcagcctcctgagtagctgggactacaggcgtgcaccaccatgcccagctaatttttatatttttagtagagacggggtttcactgtgttgatcaggatggtctcgatatcctgacttcgtgatccgcccgccttggcctttcaaagtgctgggattacaggcgtgagccatcgtgcctggccgattttgcttctcatgctaaaattattaatcagctcattctctgccattttatttagaggtttgaagtttggcttgattaatttctacagaattggggagagttttcccacctcccatttttcttgctttttccatttcctccttcctcagatacccccaaagttcaaaaccaaccaccccgattatgaattttcattttgtattctgaacatatagctaaaagcagagaattaagggtgaatgtttcatgttaaagtgattggacctgttgttaagcatatgaaataatatatttccttcaaaggctgactatactatagtgcatccaacatagcttgttgaatatctcagttcttttttttttttttttttttttttagctgaaatttgccacagggaaatatctctccagcctgggcaacatagtgagactctgtctcaaaaaaaaaaaaaaaattagccaggtgtggtggtgcacaactgtagtcctaaatacttgggaggctgaggagggaggatcctttgagcacaggagtctgaggctgcagtgagctatgattataccactgtactctagcctgggagacagagcaagaccccgtctctcaaaaaaaaaaaaaaattggtggtgaaatacacataccacaagatttagcattttaaccattaaaaaagtttgtttttggctgggtgtggtgactcacgcctttgggagtgatcccagcactttgggaggccgaggcggatggatcacgaggtcaagagatggagaccatcctgtccaaaatggtgaaaccctgtctctactaaaaatacaaaaaaaaaaactagctgggcatggtggtgtatgcctgaagtcccagctactcgggaggctgaggcaggagaattgcttgaacccagggggcagaggttgcagtgagccgagatggcgccactgcccgccagcctggagacagaacgagactctgtctcaaaaaaaagcttttttttttttttttttgagagaagggatctcgctatgtttcccaggctggtctcaaacttctggcctcaagcaatccttctgcttcggcctcccaaagtactgggattacaagagtgagccactgtacctggcctcatttttctattttgataaacacttttttttttttttttgagacggattcttgctgtgttgcccaggctggagtgcagtggcatgatcttggctcactgcacctctgcctcccgggttctctgcctcccgggttcaagcaattctgcctcagcctcctgagtagccgggactacaggcgtatgccaccgtgcccagctaattttttttgtagttttagtagagacgggttttccccatgttggtcaggatggtctcgaactcctgacctcaggtgatccgcccgcctcggcctcccacagtgctgggattacaggcgtgagccaccatgcctggctgataaacacttttaaggcttaacatgagctaagtattattttagaacagattgtctcaaccttggcactatagacattttgtccagaaaattttttgttagaggctgtcctgtgaatgcattttatccctgacctctacccactagataccagtaacacccctaccctgagttgtgacaagcaaaaatatttccagaaattgccagatgttccctgtgggcggtatgggtttgagaaccacttttctagataataggcatttgtagataatgaatactgagctaagtggaggagtaaatggttgaaatagactatgtggttaagtacagttacagagatataaaccaagagatgtggaagaatagcaaaaaatttccttagagagttgatagcaagtattttcccaagagagacagcaattctgagttgggtcattggggatggtggggggaaatgtgctgaggagggggaaatattctaggtggtggaacgggttatgtctagagatacggtagaggagcccttgggtgccttgagaaaaatgagataataagtatgattggagagaatatgggaggtagaattggaaagaaggatgctagttggggtcaggtttgagaaaggcttttttttttttttgagacggagtcttgccctgtcacccaggctggagtgcagtgcctcactcggctcactgcaacctccgccttctgggtttaagtgattcttctgcctcagcctcttgagtagctggcattacaggtgcgtgccaccacttccggctaattttgtatttttagtagagaccgggtttcaccatgttggccagactagtctcagaactcctgaccttgtgatccgccagcctcggcctcccaaagtgctgggattacaggcatgaaccaccacgcccggccgagaaaggctttttatgctatgctaaaatgtttcattttccccctttcattatagaaaatcaacaaatacttttaaagtctgtagagttatatgatcagctttttaaaagaatagtgatacagtgaaatggtaaaaatggtcaatggtgaatattaaactcaagaagataactctagcctgtaaagtaggaaaataggaagggatggagatttatataaaactaaaactagatgtcatatgttgcccttaaatcacatcaccctgtgtgtagacttcttcatcctcatttgtcaaaattctgacatattgtcaatactgatgaagattcttgatattcaaagcaggagtgaagtgggcaaaaatctgtattctaattttcattaccctaataatgtccttttaatttggagcagttctgtggcctctctttgtctgtcctgatcttgacatttttgaagagtatagaacaattattttttagaatgtatctctatttgggtttgtgtgatgcttctttatgattagatgaagggtatgcatttttggaagaaataacagaagtgatggtatgttgttttcagtgcctctgtaacaggagatgcatgacattggttggtcccattactgatgatggtaattttaatcacttgggtggtttccagtagatttttctatgtaaagtttatcatttttggccgggcatggtggctcacgcctgtaatgccagcactttgggaggctgaggcaagcagattacttgaggtcaggagtttgagaccagtctgaccaatgtggtgaaaccccatctctaaaaaaatacataaattagccaggcatggtggcatgcgtctgtaatcccagctgctcaggaggctgaggcaggagaatcacttgaaccctggaggtggaggttgcagtgagccgagattgtgccactgcacttcagcctgggtgacagagtgagactccgtgtcaaaaaaaaaaaaaagtttatcatttcccatttttattttgaaacagtcttgctctgttgcctaggctggagtgcattggcacaatctcagctcactgcagcctcaacctcctgggctcaagtgatcctcccacctcagtctcctcagtagcgtgttccaccacacccggctgctttttgtattttttggtagaggtggagtttcaccatgttgctcaggctggtctggaacccctgagctcaagggcactgatcacctcagcctcccaaagtgttgggattacaggtgtgagccaccacgcctggccctgaaaaatatttttaacggttacattatcatggagaattggatggtataaaacaatagcagttctcatatttgaaaataaattgatgtaatgaaacaaatgagaggatcaaataatattgtaaaaagaataaaaacccacatatggacaggtctgtggaaattgtattaaagcctacctctcccagattgtttccgtttgttgcaatccatttaagaacagtttttgggctgggcacggtggctcacgcctgtcatcccagcactttgggaggcccaggcaggtgtatcatgaggtcagatttcaagaccagcctggccaacatggtgaaaccctgtctctactaaaaatataaaaattagctgggcatggtggcatgcacttgtaatcccaggtactcgggaggctgaggcaggagaattgcttgaaccaggactcgggaggtggaggttgcagtgagccaagatagcaccactgcactccagcctggcctgggctacagggtgagactcagtctcaaaaaaaaaaaaaacaaacaaaaaacagtttgtgggaaaaaacaatccttgtgtatgacataatttgctgcttttcccatttagaaaatttaaaaaatacttatttgagatggggtctcactatgttgtccaggctagggtgcagtggctattcacaggtgtgaacatagtacactacagcctcgtactcctggccttagcatcttgagtagctgggactgcaggtgcacatcacagtgcctcgcttactttttccatttttgtctgttgatcctctctctcttcctttggggtaaaaattgtggcttgtgatggtggtttgtggggaaagaaaaagttggtaagctacaagctctgagcctttaatgtgtttttgttaaccatgcagacagacattagatacatagatacaacatagatgagttaaatttgaaagaaggcaccaaactttgttactttaaagcaggatttctcaaagggacactgttgacattgatttcagaagtgagattttcatggtttttaatgttattattataatggtatggatagtgttttgccctctaagaagtagctaggagtgtttccatagatgcatttagtttatatcacttatgtattctgtctctattttgtaagaaaattgcctatgaacagaattttttctgtatgtggatttaatgtcttcttctaaaggaaacatgggtgtggttcacatttccttagttttgagtagcatggcttaagttgtgatccaattttaaaaaatcagttgaataaataaatagaaaataaaaggataatttctgtactaaaaaagtcagctggacagttaaaacatctccttttattcgtaagtttttcaataaaaattgttaaaagcagtattcatttgtgtaatgatataatctttgttattgttttatgtgcttttctaaaatgcaggaaacataaggtaaggagaagtctttccttaccctgggaccagatgtctatgaggactgttgacttttctgctataaacaggatgataaattaacagtggtgtgataggtaaagtagatttgttatgacatatcttccattaagcgataataacttgatttttacttagttgatgaaataaaataactttgaaaccttgggtaacatgaaattgaatcaaaatattttcaagttatggaacatagtgttattaatagaatggagtgttgaaaaagcactggattatgctttctgtaacttttagttctgggtcttatgataactgtgaccctgagcctcagtgttttccttttaatctgtagtgatattttttagttcagtctctcattttaaactgcttttagctctaaaattttatctcagtgacctgttgagttatataacaatcgtatcaggtaacctagataagaagaggaaggcagtaacatttcagaaatacagtttggggttgggaatccttaagtgatccagacttctcctttggtccgaagatagtgtgaataaaacagctgagggatgtgggcatcaatatattgcagaggaaaaggttatttccaggagtggatttgcagctactcttaaatctattatgttggggctgggcactggggctcatggctgtaatcccagcactttgggaggctgaggcgggcggatcacctgaggtcaggagttcaagaccagcctggccaacgtggtgaaaccctgtctctacaaaaatacaaaattttgccgagcatgatggcgggtgcctataattccagctacttgggaggctgaggtgagagaattgcttgaacccaggagtcggaggttgcagtgagctgagattgtgccattgcactcctgcctgggtgacagagcgagactctgtctcaaaaagaaaaaaaaaatctattatgttggatagatggtcttttccagaagcaaattttatagatggaaagcattttaattaatctagtaaaattctctcattttacaaatgaggctccctctacctctctccccctctccccctctccctctctccctctctccctctctccctctccccacggtctccctctccctctctttccacggtctccctctgatgccgagccgaagctggactgtactgctgccatctcggctcactgcaacctccctgcctgattctcctgcctcagcctgccgagtgcctgcgattgcaggcgcgcgccaccacacctgactggttttcgtatttttttggtggagatggggtttcgctgtgttggccgggctggtctccagctcctaaccgcgagtgatccgccagcctcggcctcccgaggtgccgggattgcagacggagtctcgttcactcagtgctcaatggtgcccaggctggagtgcagtggcgtgatctcggctcgctacaacctcacctcccagccacctgccttggcctcccaaagtgccgagattgcagcctctgcccggccgccaccccgtctgggaagtgaggagcgtctctgcctggccgcccatcgtctgggatgtgaggagcccctctgcctggctgcccagtctggaaagtgaggagcgtctctgcccggccgccatcccatctaggaagtgaggagcgccttttcccggccgccatcccatctaggaagtgaggagcgtctctgcccggccgctcatcgtctgagatgtggggagcgcctctgccccgccgccccgtctgggatgtgaggagcgcctctgcccggctgcgaccccgtctgggaggtgaggagcgtctctgcctggccgccccgtctgagaagtgaggagaccctctgcgtggcaaccgcctcgtctgagaattgaggagcccctccgcctggcagccgccccgtctgagaagtgaggagcccctctgccccgctgccaccccgtctgggaagtgaggagcgtctccgcccggcagccaccccgtccaggagggaggtgggggggtcagccccccgcccggccagccgccccgtcggggaggtgaggggcgcctctgcccggccgcccctgctgggaagtgaggagcccctctgcccggccaccaccccgtctgggaggtgtgcccagcggctcattgagaacgggccatgatgacagtggcggttttgtggaatagaaaggggggaaaggtggggaaaagattgagaaatcggatggttgccgtgtctgtgtagaaagaggtagacatgggagacttcattttgttctgtactaagaaaaattcttctgccttgggatcctgttgatctgtgaccttacccccaaccctgtgctctctgaaacatgtgctgtgtccactcagggttaaatggattaagggcggtgcaagatgtgctttgttaaacagatgcttgaaggcagcatgctcgttaagaatcatcaccactccctaatctcaagtacccagggacacaaacactgtggaaggccgcagggtcctctgcctaggaaaaccagagacctttgttcacttgtttatctgctgaccttccctccactattgtcctatgaccctgccaaatccccctctgcgagaaacacccaagaatgatcaataaaaaaaataaaaataaaaataaaaaaaattaaaaaaaaatgagaaaattgagctctcctgaggttgcagtttgcttaacagcatagatctaattagtaattaggactagaaccaaggttatctgactcccagttcaaggttcttggtacagtaccgtgtttttaactagtccattaggttgttttctgtgtattttataacacttctgtaagaaagtggaatatttttctctaaggtatgttaaaactcttgttcgagaaaatacagtaaaggatacctgttgtatcttaaagtgatttttatgtttttctgtcaatgccacaatctgaagaaagtaaattagctacacttctattgctgtgacaatagattatttagaatcttcttgattacttgtattattgttcccgtgcttcagagctgtttccttgctatttaaaatcattatggtatagcccagaggctaagggggttttctaagagtatgcaatttgtcattgacatagtttttttgtttgtttttgtttgttttgtttgtttttgagacagagtttttgctctgttgcccaggctggagtgcaatggtgtgatctcggctcactgcaacctccacctcctgggttaaagcaattctcctgcctcagcctcccgagtagctgggattacaggcacccaccaccacacctgactaatttttgtagaggcagggtttcaccatgtcggcgaggctggtcttgaactcttgacctcatgtgatccacctgcctcggcctgtgaggattacaggcatgagccaccgcaccctgccaacacagttgtttttgattggaaaagtttattttcctaatctcaaagtagcttgtatctgttctttattgtgaaatgcagtttctacattgaatttgtgtagtctgtagttttgactgttttaagttcaataactagcttagtagtatacttgttagaggtcagagtaggttaactactagaaagaacagtccttctgcttactgtactaggaggaagtctgtggtggagggaaaaaaggagtaaaacaattccagtcttctgtaaaatttgagtaatttctttctctactccttctacatgaaaaatacatcttatttgatttttgcatcacatgccttctatatgtgttggaatctggatcaccatttcttcattacttgtgggtttttgttgtgaaaaatgtggagtaagttagaagttgactgtagaataggtaacattctcttaaattctttgatcagagtgagcagagtccagaagcttggctcagacttagggaactcatgacacttctcttaatatcctaagttcatgacatgtctcttaataccctaagtgtacaatacaatagtagatcaaggaaggcagaggtatctggcagacttagaagtaactgttcataaaaacaaggatcagtatgtttctacaagataatgatttaaagttgagccaggattagttatacctttaatataaaaaattgaaatagcttatttaatctgttctaggctatagtatacggagctaggtattaaaacattctctatatatttaactcttttttttgagacagggtctcactctgtctcccaggctagagtacagtggcatgatcttggatcactgcagcctagacctcctgggcacaagtgattctcccaccttagcctccacagtagctgggactacaggcctttgccaccacacctggctcatttttgtattttttgttgagacggggtttcaccttgttgcccaggctggtcttaaacccctaagctcaagtgatccgcttgcctcagcctcccaaagtgctgggattacaggtgtgcaccactgcgcccaggctatttgacttttttattctgtaaaattgcaagcatattcagaaataagaaaatagtataacggggccgggtgtggtggctcacgcctgtaatcccagcactttgggaggctgaggcaggtagatcacgaggtcaggagttcgagaccagcctggccaacatggtgaaaccccgtctctactaaaaatacaaaaattagccaggcgtggtggtgggcgcctgtaatcctagctactcgggaggccgaggcaggagaatttcttgaaccagggaggcggaggttgcagtgagccgagatcgtgccactgcactccagcctgggtgacagagcaagactcattttttttttttttttttttaaaaaaaagaaaaaagaaaatagtataatgggttgggcccggtggctcacgcctgtaatccagcactttgggaggccaaggtgggcggatcacctgaggtcaggagttcaagaccagcctggccaacatggtgaactcttgtttctactaaaaacacaaaaattagctgggcatggtggcaggcacctgtaatcccagctacttgggaggctgagttaggagactcacttgaacctgggaggtggaggtttcagtgagccaagattgtgccattgcagtccagcctgggcaacaagagcgagactccatcccaaaaaaaacaaaaaacaaaagacaactatatatatatatataaaataacgaaaccccctaagtacctgtcacccagcttcaacaattatcatcttgcagttagttgaatttggttaacacttacccttcagtggattattctagactaaatttccaaacataatcatattgtattgaagtgttttttgaacaaactatactatggggtatttacctaaaatgaactatttgcaaaaagataagttgattttttttcttctggtgccagtacacatcataattgtagttaaaagctattatcctcacattaaagtttaatttttaacacattatgaaaatttaaaacttacagcaaagctttaaaaattttacactgaacaccaatattattaacatctagattctacctttaacattttactcttcttttttttttactcttcttgttttatcacatattgatccatctgtccaactctccattgatgtaacatttcattttattttcttattcatttcaaagtaaattacagatattagtatagttgaggttcagtttttaaagtcatattttcaactaattgtttttcctgttttgaaagactgttatatctgaagttccacattatgacaactcatagtctctatggttccagtgcttcccattttgaacttttctttcatgttctacgaacctttattaaaatatttagagctatgtacaagtaatatatacagtatttagctaaaactaagtagaatgaatgagggttttgcttgtgtgtttattgcagtctttaaaaaaaatctcttctagtgagtcaatgtgtatcttttttttttttttttttttttttgagacagagtcttgctctgtcgcccaggctggagtgcagtggcgtgatctctgctcactgcaaagctccacctcccggattcatgccattctcctgcctcagcctcccgagtagctgcgactacaggcgcctgccaccacgcctggctaattttttttgtattttttgtagagatggggtttcattatgttagccaggatggtcttgatctcctgacctcgtgatctgcccgcctcggcctcccaaaatgctgggattacaggcatgagccaccgcgcctggccaagtcattgcgtatcttaagatggtacactaaactaatatgcttgccattggtgacaacatagatgaacctggaggacattatggcaagtgaagttagccagacgtggaaaaaataatacttcatgacttcaacctatatgtggaatctaagaatgccaagtctgcaaaagaagagagtagaaaagtagttaaatgggtaggaaggtgggagaaatggggagatattggttaaaggttaccaagttggaatcacgtaggatgactaggtctagagatctaatgtacagcatgaacactatagttaataatactgtatcatgtactggaaagttgttaaaagagtagatttcaggtgttttcagcacacacagaaaaagataactatatgtggagatgggacattttgcttgaccatagtaatcatttcactatgtatatgtatatcaaaacattcatgttgtacactttattgattgattgattgagacagggtctctcgctgttgcctcagctggagtgcagaggcatgatcacagttcactgcctgcttgacctcccaggctcaagcgatcatcccacctcagccccccaagtagctgggactacaggtgtatgctaccatgcctggctaatttttatagtttttgtagagatgggttttgccgtgttgcccaggctggtattgaactcctgagctcaagcaatctgcccgcctctgcctcccaaagtgctaggattacagatatgagccactgcgcctggccataccctttaaatatatacataaaaagaagaatgcctttaaaaattttccatttaacaattactctcagggccaaaactcactgtttaagtattttgctcttttactttgatcttggtgttctatgtagtgctaaaatatactttcatctccatatgactgcttgtaacaaaaagctgttcaccacattatgaactccctgaatacacacaataatcatatagtaaatgcttgttgaataaacaagacaaaattcatcagtttttatccttacttaattttttgaacttttccttgaacttctgttatcaaacttaatacatgaacaacagaaagatgctacggatctatgtagtacaaagtaaaatatgaaatttacacactaaatatttctgtagcatattttcagaagtaagtaattgaatataaacagaagcaagcatattctatttttttattatttaagtgggaaatattttaaaatcttatgtcatatttgctttagatttcttttaaagaattaaaacattacagatagagttgaagcctcatgggttattttaatgttttctacataaacatgtttccatatacataaaccttatttagaattttttcagtttatttatttatttttattattatactttaagttttagggtacatgtgcacattgtgcaggttacatacgtatacatgtgccatgctggtgtgctgcacccactaacttgtcatctagcattaggtatatctcccaatgctatccctcccccctcccccctccccccaccccacaacagtccccagagtgtgatgttccccttcctgtgtccatgtgatctcattgttcagttcccacctatgaatgagaatatgtggtgtttggttttttgttcttgcgatagtttactgagaatgaaattttttcagttttatacgtttatgtaagtggcaccatacagtacatattattttgcaacttgccttttttttttttgtttgtttgctcaatgttgtttttaggattttgatgtaactccagatctgcactgtccaatacaatagccactaactatctgtggctattgagtactggaaatgtagctagtccacattgagatgtgctagaaatatatttgtacatggaatttcaaatatttagtattaaaaacatgtaaaatatctcactaaaagtttagtatccctaagaatctgaaatagaaaatgctccaaaacccaaaattttttgattactgacatgactctcaaaggaaatgctcaaaggtttaatgcaaatattccaaaatctgaaaaaatctgatatattgaccacatatggaactgataatagtttggatgtattggattaaataaaatgtaaaaattttaccagtggtttccttttttaaaatatggctactagaaaatttaaatatatatttgaaatgccttacattatatgtctgttgggcagcactgatctatattgcccacttttcattcctgtttatttattattattttatttttatttttattttttgagacagagtctcgctgggtcgcccaggctggagtgcagtggtgctatctttgctcactgcagctgctgcctcccaggtccaagcaattctcttgccttggcctcccaagcagctgcgattacagctgtgcaccaccacacttggctaatttttgtatttttagtagagacggggtttctctgtgttggccaggctggtctcgaactcctgacctcaagtgatccacctgccttggcctcccaaagtgctgggattacaggtgtgagtcactgctcccagccttcactcctgtttagtattaagttatatagataatagtttgctactggtggatagttgttgttttttttttttacgaatttggtgctactaaagactgttctcatgagcattcttaaacatgtctcctttgcacatatgctagagtttctttctccctaatggttcttctgatttatacttccactggcagtttgagaatgttcttgttctgcagttcttcatcctggtcgatgtttttgtgtagataactgtaatttaatacttaaagtcaaaagcataaggaagcattggtaattatttaagtgaatataaaatgtcagcttatttttctcagtgaatcttttgtaatagtcaactcacattgcctattttttattgtagtgcttctgatctgaataaataaatttaaaatttaacagccatgttatgtatcttattagtaggcagctgcagttatgcaaccaaagaatgtcccatctttaagttccattagcttgaaaaagaaatggcagctttacgtcatggaatactgtgctgccactaaaaatgatgttttagaagaatatttaatgatgcagaaaaatattcacagtatcttaatggaaagaaaagattataaagcagtaaccatttcgttttgttaaaatcaggtctatgttagctttttttttttgagatggaatctcgctctgtcacccaggctaaagtgcagtggcgtgatctcggctcactgcaacctccgcctcctgggttcaagtgatgctcctgcctcagcctccctagtagctgggattacaggagcatgccaccacacccggctaatttttttgtatttttagtagagatggggtttcaccatgttggccaggctggtcttgaactcctgacctcaagtgatccacccgccttggcctcccaaagtgctgggattacaggtgtgagccaccgtgcccggcgagcatttccttacatgcttatctctggatggtcagattgtaggtaacttctattttgcacttcacactttttttttttttcttgagatggagtttcgctcttgttgcccaggctagagtgcaatggcgtcatcttggcccactgcaaactccgtgtcccgggttcaagcgattctcctgcctcagcttccagagtagctgggattacaggcgcccgccaccacacctgcctaatttttagtatttttagtagagacagaggttcaccatgttggccaggctggtctcgaactcctgacctcaagtgatccactcgcctcggcctcccaaagtgctgggattacaggcgtgagccaccgtgcccagcctgtacttcacacttttaatatttcattttctgtagtggatttactattaccagggaaggggaatgcaaggaggagggaagagttcttaacctaaaattttcatagttggaatattattataggaaagaagagattgaatgaggtgtcactgttcccatgtttaaagataagtcaattgggaggccgaggcaggtgaatcacgaggtcaggagttcaagaccagcctggccaatatggagaaaccccatctctactaaaaatacaaaaattagctgagcgtggtggcaggggcctgtaatcccagctactcgggaggctgagggaggagaatggcttgaacccagagggtggaggttgcagtgagctgagatcgtgccactgcactccagcctgggcgacagagtgagactttgtctccaaaaaaaaaaaaaaagataatactttccttctattcaatttcaggcttttcttaagttacaaatggaaccagccaaactatgttattgcttacccattgtttttccagcgttagaggagtttttcaaagaatattttttgatttagagattattttatttattatctatttagagattattcatcatttagagattgccatttaatttcagtaagagttccatttgcatctgatattttttagtttcggagaaaggaaatggtggagaaatggattcatctccaatcctttggaataaaattcagacagtttaagctctagtctcaacttgatttaatttggaattgcatgatgtggtgtcagatttgggttcacatccagttctcttgctgtgtaaccttgggaaatttacccagcatctgagttgtttcttcatgtgtgcagtggagacaataccaagatgaagatttcatgagatgtctagtgtagacatctatttttcagagtggatgcatttaacagttggatgctgaatttataagagtatggatttcataaaaagagcataaatttcatgatatgatgtatatatcaaaagatataggtcgggtgcagtggttcatgcctgtagtcccagcactttgggaagttgaagcggatggatcacttgatgccaggagttcgagaccagcctggccaacatggtgaaacttcgtctctactaaaaatacaaaaattagccaggcgtggtggtgtgtgcctgtaatcccagctacttgggaggctgaggcaggagaattgcttgaacccaggaggcagtggttgcagtgagccgattttgtgccactgcactccagcctgagtgacagattgagactccatcttaaaaaaaaaaaaatgatggctgaataggaacagctctggtctgcagctcccagtgagaccaaaatgtagaaggcgggggatttcttcatttccaactgaggtacccagttcatctcattgggactggttaggcagtgggtgcagcccatggagggtagcagaagcagggtggggcgtcgcctctcccggaagtgcaaggagcgagagatctcccttccccaagccaaaggaacccgtgagtctatgctatccggcacagatactacacttttcccatgatttttgcagtccgcagacccggagattccttagtgtgccaactccaccagccctgggtttcaagcacaaaactgggcatctgggcagacagtgagctagctgcaggagttttttttttttccccctcttcataccccagtggtgcctggaaccccagtgagatagacccattcactcccctggaaagggggctgaagccagggagctaggtggtcttgcttagcgggtcccactcccacagaacccagcaagctaagaaccactggcttgaaattctcattgccaacacagcagtctgaagctgacctgtgaagattgagcttggtgaggggaggggcgtctgccattactgaggcttgagtaggcagttttcccctgacagcactaaggaggctgggaagttcagactgggcagaactcaccacagcgtggcaaagtggctatggccagactgcgtctctagattcttcctctctgggcagggcatctctgaaagaaaggcagcagccccagtcaggggcttatagataaaactcacatcttcctgggacagataacctgtgggaaggtgcagctgtgggcgcagcttcagcagacttaaatgttcctgcctgctaggtctgaagaaagcagtggatcctgacaaggaggattctcctagcacagcacttgagctctgctaggggacagactgcctcctcaagcgggtccctgaccccagtgcctcctgactgggagagacctcccagcaggggttgacagacacgtcacacaggagagctcccgtgggcatcaggctggtgcccttctgggacgaagctcccagaggaaggagcaggcagcaatatttgctgttctccagcctccgctggtgatacccaggcaaacagggtcaggagtggacctttagcaaattgcagcagacctgcataagaggggcctgttagatgaaaaactaacaaatagaaagcaataatatcaacatcaacaaaaaggacccccacacaaaaaccccatcaaaaggtcatcagcctcaaagatcaaaggtagataaatccacgaagatgaggaaaacccagtgcaaaaatgctggaaattccaaaaacccgaatgcctcttctccttcaaatgaacacagctcctctctagcaaggccgcaaaactggacggagaatgagtttgacgaattgacagaactaggcttcagaaggtgggtaataacaaactcctctgagctaaaggagcatgttctaatccaatggaaggaagccaaggaacttgataaaaggttacaagaactgctaactagaataaccagtttagaggacataaatgacctgatggagctgaaaaacacagcacaagaacttcgtgaagcatacacatgtatcaatagtcaaatcgctgaagcggaaaaaaggatatcagatattgaagatgaacttactgaaataaggcatgaagacaagattagagaaaaaaggttgaaaaggaacaaacaaagcctctgaaaaaatatgggactatgtgaaaagaccaaacctatgattgattggggtccctgaaagtgatggggagaatggacccaagttggaaaacacacttcagggtattatccaggagaacttccacagcctaccaagacaggccaacgttcaaatcaggaaatacagagaacaccacaaagatactccttgagaagaccaaccccaagacacataatcgtcagattctccaaggttgaaatgaaggaaaaaatgttaagggcagccagagagaaaggtcgggttacccacaaagggaagctcccagaggaaggatatctgggcagaaaccctacaagccagaagagagtgggggccaatagtcaacattcttaaagaaaaaacttttcaacccagaatttcacatccagccaaactaagcttcgtaagcgaaggaggaataaaatcctttacggacaatcaaatgctaagagattttgtcaccactagacctgccttataagagctcccgaaggaagcactaaatacagaaaggaaaaactggtactagccactgcaaaaacattccaaattgtaaagaccatcgacactataaagaaactgcatcaactaacggtcagaataaccagctagcatcataatgacaggatcaaattcacacataataatatgaaccttaaatgtaaaagggctaaatgccccaattaaaaggcacagactggcaaattggataaagagtcaagacccattggtgtgctgtattcagaagacccatctgatgtgcaaagacacacataggctcaaaataaagggttggaggaatattaaccaagcaaatggaaaaaacaaaaaaaaaaggggtgttgtaatcctagtctctgataaaacagactttaaaccaacaaagttcaaaaaaggacaaagaagggcattacataatggttaagggatcgatgcaacaagaagagctattttaaatgtatatgcttccaatacaggagcacccagattcataaagcaagttcttagagacctacaaagagacttagattcccacacaataatagtgggagactttaacaccacactgtcaatattagacagatcactgagacagaaaattaacaaaaatattcaggacgtgaactcagctctggaccaagcagacctaatagtaacctacagaactctctaccacagatcaacagaatatacgttcttctcagcacatcacacttattcactcaaaaccccacaactacatggaaactgaacaacctgctcctgaatgactgctggtaaataacgaaattaaggcagaaataaagaagttctttgaaaccaatgagaacaaagagacaacgtaccagaaatctctgggacacagataaagcagtgtttagaggggaatttatatcactaaatgcccccatcagaaagcaggaaagatctaaaatgaacaccctgatatcacaattaaaagaactagagaaaaagagcaaacaaattcaaaagccagcagaagacaagaaataactaagttcagagcagaactgaaggagatagagacatgaaaacctctccaaaaatcaatgaatcaaggagctggttttttgaaaagattaacaaaatagaccatgagccagactaataaagaagaaaagagagaagaattaaatagacacaataaagaatgataaaggggatatcaccactgatcccacagaaatacagactaccatcagataatattataaacacctctacgcaaataaactagaaaatctagaagaaatggataaattcctggaaacatataccctcccaaggctaaaccaggaagaagttgactccctgaatagaccaataacaagttctgaaattgaggcagtaattaatagcctaccaaccaaaaaaagcccaggagcagatggattcacagccgaatgataccagaggtacaaagaggagctggtaccattccctctgaaactattccaagcaatagaaaaagaaggattccttcctaactcattttatgaggcaagcatcatcctgataccaaaacctgtcagagacacaaccaaaaaaggaaatttcaggccaatatccctgatgaccatcgatgtgaaaatcctcaataaaatactggcaaacagaatccagcagcacatcaaaaagcttatccaccattatcaagtctgcttcatctctgtgatgcaaggctggttcaacatacgcaaatcaataaaagtaatcaatcacataaacggaaccagtgacaagaaccacatgattatctcaatggatgccgaaaaggccttcgataaaattcaacaccccttcatgctagaaactctcaataaattacgtattgatggaacatatttcaaaataataagagctatttatgacaacccatagccagtatcatactgaatgggcaaaagttggaagcattccttttgaaaaccagcacaagacaaggatgccctctctcaccactcctattcaacatagtgttggaagttctggctaggcaagagaaagaaataaaggttattcaaatagcaagacaggaaatcaaattttctctgtttgcagatgacatgattgtatatttagaaaaccccatcatctcaacccaaaaactccttgagctgataagcaacttcagcaaagtctcaggatacaaaatcagtgtgcaaaaatcataagcattcctatgtaccaataatagacaaacagccaaattatgaaggaactccctttcacaattactacaaagagaataaaatacctaggaatgcaacttacaaggggtgtgaagggcctcttcaaggagaactacaaaccactgcttgaggaaataaggacgcaaacaaatggaaaaacattccatgctcatggatgggaagaatcaatatcgtgaaaatggccatactgcccaaagtaatttacagagtcaatgctattcctatcaagctaccattgactttcttcacagaactaggaaaaactacgtagagccaaaacaatcctaagcaaaaagaacaaagctggaggcatcctgctacctgacctcaaactatactacaaggctccagtaaccaaaacagcatggtactggtaccaaaacagatatatagaacaatggaacagaaccgaggcctcagaaataacaccacacatctacaaccatctgatcttcaacaaatctgacaaagacaagcaatggggaaaggattccctgttttataaatggtgctgggaaaactggctagccatatgcagaaaacagaaactggaccccttctttagagcttatacaaaaattaactcaagatcgattaaagacttaaatgtaaaacctaaaaccataaaaaccctagaagaaaacctaggcaataccgttcaggacataggcatgggcaaagacttccatgactaaaacaccaaaagcaatggcaacaaaagccaaaattgacaaatgagatctaattaaagagcttccacacagcaaaaaaactatcattggagtgaacaggcagcctacagaatgtgagaaaatttttgcaatctatgcatctgacaaagggctaatatccagaatctacaaggaacttaaattacaagaagaaaacaactccatcaaaaagtgggtaaaggatatgaacagacatttctcaaaagaagacatttatgtggccaacaaatgtgaaaaaaagctcatcatcactggtcattagagaaatgcaaattaaaaccacaatgagataccatctcacgccagttagaatggcgattattaaaaaggcaggaaacaacagatgctggagaggatgtggagaaataggaacacttttacacttttggtggaagggtaaattagttcaaccattgtggaagacagtgtggctattcctcaaggatctagaaaccagaaatacaatttgacccagcaatcccattactgggtatatacccaaaggattataaatcattctactataaagacacatgtacctgtatgtttattgcagcactatttacaatagcaaagacttggaaccaactcaaatgcccatcaatgacagactggataaggaaaatggggcacatatacaccatgaaatactatgcagccataaaaaagattgagttcgtgtcttttgcaggtacatggatgaagctgtaagccatcattgtcagcagagtaacacagtaacagaaaaccaaacactgcacgttctcactcataagtgggagtcgaacagtgagaacacatgggcacagggaggggaacgttacacattggggcctgtcaggggttggggggcaaggggagggagtgcattaggacaaatataatgcatgtggggcttaaaacctagatgatgggttgataggtgcagcaaaccaccatggcacatctatacctgtgtaacaaacctgcatgttctgcacatgtatttcagatcgtaaagtaaaaaaaaaaagatatggaagttactatgcgcgttaataaaatatgtttatacctcctcccttaggtgtctattatgtagaacaagtttattacattctaatgataaagtaaacactctgttttcaaaggtggtgttatacgtttgtgtatcttttgccccgggcatgatgatttcatcgtttgtgtaataaatttaatactaccatagtctccccttattcacacgggataagttccaagaccccaatggatgcctgaaactgtggatagtactgaatcctatatacacttatgtttttttcctgtacactcatatttatgataaagtttaacttataaattgtgcacagtgagagactgacaataactataataaaatagaacaattataacaatatactgtaataaaatttatgtgaatttggtttcaaaatatcttattgtactgtactcacccttatgatgatgatgttagatgataaaatgcttatgtgatgtgatgaaggtaggtgaattatgttaggcattgtaatgcagcatgaagctactattgaccttctggtgttacatcagaaggaggatcatctgcttgggtggtcctgaatcatcacgtcctgatgatgtctgttgctggttgtcaggagcagacagtgtccatgactaatgggcaggcagcgtatatagcatgtatacactggacaaagggatgtctcatgtccacggctggacagagcaggagagtgcaagattttgtcacactactcagaatcgtgcagtttaaaacttaccaattgtttatttctggaattttccgtttaatatttttggactgcagttgaccacaggtaactgaattcatggaaagcaaaacaaccatggacaaagtgggattactgtattatttcagattttaattagcatttttcaaaactctgtctagctagtgcttgcattgtagaatttgtctgatttcatttttattgattagggaaataagctttatttttatctggagtgatttgtttctttgtgcttcctcaaaattgagtagtggctactgagtatatatcgaaaaggaaataaattattatgtcaaaaagatacctacatttgtatgttgattgtagcactgttcacaagattaaagatatggaatcaacctaagtgatgaagaaaattggtgtgtgtgtgtgtttgtgtgtatacatacacactgtggaataatactattcagccacaaaaaagaaaaaaaaatcatgtcttttgcagcaacatggatgggactggaggccattatcctaactgaaataactcagaaagtcaaatactacatgttctcacttacaggtgggaacttaaatggttacacatagaatagagtagaataatagacattggagactccaaaaggtgagagggtggcaggggggtgagggttgaaaaattacctattgagtactttgttcagtatttgggtgatgggtacactaaaatcccactttaccaccatgcaatatatgcatgtacgaaatctgcacttgtaccccctaaatatatacaaataaaagttttttaaaacacttagtaaatagcctgtcatagggaataattgaaaccatttcgtatctcactttaaaacctttaggctgggtgctgttgcttatgcctataatcctagcactctgggaggccgaggtgggtggatcacctgaggtcaggagttcgagaccagcctggccaacatggcgaaatcccatctctactaaaaatataaaaattagccagtcatggtggcacacgcctgtaatgccagctccttgggaggctgaggcgggaaaatcacttgaacccaggaggcggaggttacagtgagccgagatcacaccactgcactccagtctgggcaacagagcgagactccatctccaaaaaaaaaaataaaaataaaaataaaaaacctttttagttctgtttcaatgttatcttctttttatttaattatttttggaataagaaataatatttatatggtttgaacaccaaaaggtataaaagatatttttaaaggtataaagtataaaagttagaaatttcccccacttccctgttctctgttcccacagctgccagcagcttaccaccccccagcccaatcactgctactgatgcctaacctatctttccagagttctttgtgtgttcagtagcagttaaccacagatctttaatcattcccctttataccataaaaggtggcatgttatgtacacttgcctcccctttgctttttccacttaatgtgtcttgagaagctttccatatatcagtacatggaaaactttcttatattgttttattttaaatttatatacaataaatgcatggatcagaaaaataattgaatagtgggccccaaattaaatgattactctaatgatttgtagatgggtttagttaaagcactgggatatttagctacaggtataggaatgcatgattattttctgtcaggaaacctagattttgttcttctccccttctttatcaaaggtgaaatcagactcttatttaaaccaggattaagtattctttgcataataatatatatttgctttcccaagttattcttcaggaaagtcttgactctctagcaaactttgtttcttaaaatggaggttagcaggtgttggaaataaggtgagagttttaacacttaaaggaaactatataaagattagatatagtcagaaatttagaaaacattaggaaattcacagagagatggatcccccttttctaccctagattacccctgggctgcttaatggcttgtctttactattagattgtgagctccttgaggtcaggttttatctgttttttatttcaataccaagtgccaagaatatattcagcatttggtgtaaatattataaaatgagtaaatgaatgtgctcttgaatagaagttaactctgattttgggttaagtcccccgccccctttttttgagacagtctcactctatagctcaggctggagtgcagtagcgcagtctcagctcactgcaacccccttctccggggttcaagcaattcttatgcctcagcctcccaagtagctgggattacaggtgtgtgccaccacacccggctgatttttgtatttttagtagagatggggtttcaccatgttggccaggctggtcctgatctcctgaccttaggtgatctgcctgccttggcctctcaaagtgctgggattacaagtatgatctactgcgtctggctgattttgtgttaaaatcctttatgtcagttccagaagaggttaaatggaagttttcgaggcaagagatacttgtgaatttgacatgagtggcctttgttttgaaattttaatgctacacagatgctgtaaaaggattttttcaggccgggcgcggtggctcacgcctgtaatcccagcactttgggaggccgaagcgggtggatcacgaggttaggagatcgagaccatcctggccaacatggtgaaacctcatctctactaaaaatacaaaaattagccgggcgtggtggtgtgcgcctgtagtctcagctactcaggaggctgaggcaggagaattgcttgaacccgggaggtggaggttgcagtagagccgagatcgcgccactgcaactccagcctgggccacagagcaagactccatctcaaaaaaagggtttttcaaaaaatcatgtacaattagaaaattgtgtctcttaaatctatttgcttatgttattaatcccagattatgactgttctttcccctaaggcattagcctgttgaaagaaacagacctataggacttttgttgatgttaaagccagaccagaaatttagaaaatcaggatatttgccattttgataagaaaaccatttaatagttgaatataggaatttgcattttgagagtgtgtactaatttagattctccaggaatagaaccatcatctgaaaataaataagtttaaccagacggacaaggagtgatatgtagttttaggtggtaagactgtgatattgttaggttacatgtatctagggcaagatgctcaaatacaataagtatatacagactaggaactctagttgtctttttttaattaatgaaaagagggttttatgcttcatttctaaacattctcaaaggaatttatgttttgttgatgatctttttttatttatataaatttacgggggtacttgtgcactttttttttaaacatggatagattacagagccgtcaagtcaagcctttagagtttccatcacccaaataacacacattgtattcattaagtaatttctcatgatctcccacctcctgctctctcacctttccaagtctgttatctatcattccatgctctacgtccatgtgtacacatttttcagcatccacatgtgaatgagaacatgtgttattcccaccaacagtgtatgagtgttcccttttctctgcaacctcaccaacttgtgttattttttgtctttttagtaatagtcattctaactggggctggatgatacctcattgtgggtatttttaaaataaaaaaaaatttgtgtgtacataggtatatttatttatggggtacatgagataatattgatacagacatacaatgttcaataactacatcagggttgtatccatcaccaagcatttatcctttcttggtgttagaaacaatctagtttctaatctctaatagtttctaatctctagtagttatattaaaatgcataatgaattattattgactgtagtcaccccattgtgctatcaaatgctaggtcttattcattctatctaactatatttttatacatattagccatccccactgtgccaccatccccattagtgccctggcccccactacccgtcctagcctctggtaaccatcattctactctctatctctatgagttcaattgttttgatttttagataccacaaataagtgagaacatgtgaagtttgtttttctatgtctagattatttcacttaatataatgacctacagttccatccatgttgttgcaatgacaggatctcatacttttttaagggctgaataggactccattgtgtatgtgtaacacattttctttattcgtccgtctgttgatggacactcaggttacttccaaatcttggttattgtgaatagtgctgcagtaatcatgggagtgcagataactctttgatatactgatttcctttctttggggtacatatttagcagtggaattgctggattatatggtagctctctagtttttttttttttttttttttttcatttttgagacagggtctcactctgttgcccaggctggaatgcagtggcggaggttcacttcagcctcaacctcgcaggcttaggggatccacccacttcagtcttccaagtagctgggactataggcgcataccaccatgcccagctaggtttttgttgttgttgttgttgttgttgaggcagagtctcactctgtcacccaggctggagtgcagtggtgcgatctcggctcactgcaacctctgcctcctcggttcaagccattctcctgccttagcctcccaagcagctgggattacaggcgcccaccaccatgcctggctaacccagctagtttttaattgttcgtagagatggggtttcaccatgttgtctagactggtctcgaactcctcgactcaagtgatcctcctgcgttggtgtctcaaagtgctgggattgcaggcacaaggcaccgtgcctggtcagaatttttttttaagggtttctcctttgtaaatttcttattcatatcttgaattgattttctgagtttcttgtattggttttcagacttttcttgcatctcagtgacccttaaaatcaatattttgaatattttatctgggattttgtggatttcattttggttaagatctgttgctgcagaatcgtgttcctttgacagtgtcatattaccttggtttctgatgtttcctttgtcttttcattgatttctgtgcatgtgctgtaacagtcacttcttatctttgaatttactttcatggtgaggggagatttcttcctgaagatgtgactataatgttggttgggccttgcttctgggtgcgtgcagtagtgaagtctctgtatgatttattttgagacagctctgttgcccaggctggagtgcagtggcacattcatagcttgcttcagcctcaaagtcctgggcataagtgatccttctgcctcagcctcctgagtacctaggactacaggcgtgtgccaccatgcctggctaattttcaattttcttttagagatgggggtctcattatattgcccaggctggtcttgaactcctggtctcaagcaatcctctctccttggcctcccaaaatgttaggattacaggcatgaaccaccgtgcccagcctctgtatgatttctttggctataaatagcattaatggtgtctgtggtttccttgatgtcttagcttgagtttatttgtggaggctgaagttgcgctggggattggaatgcctaataggcctgtctttaggtttcaatggtagtgatggtgggctaagcatgtctatccatgtgccctggggcagtgtgtgctggtaactgtgttggcagttccaggcaggctgattcttgggcttctgagtgactttctcagatgcctgttgtaatggtgtaccaggtgggtgagctggctcttgagctcctgggcaactggcatggcatagtttatggtggtagtagttttgttgagatactcttgtgggtcccaagcactttgcatttgtgttagcagtggttacaatgagatccaggccagtaaggtggtacttgcaggcatgaggcagctgaggcggtactggtagggtgttatccctgacctctgtcccctgggagaagtactctggtgtttcagagtgtttcaggtagtgggtttggttgtggaatcccctggtaacctggatcctgcactgtttctcagccaggtcaaagcctggtagagctggactgggaaagcttgcactcaggcccccacagtggtgtaatgtcatgataggcggggtggaatgatcttcaggctgctggcaaaatgcttgggtgagggatgagtgccactgctgagatcctgccatggggaagttgggcctggtcccaggagtgagttgtgttcctttcatgccccagtccaggcggagttccttcctcttgtccctgctgttcagtcagaactctgcagttcttgcctagtccctaaatcatcccagggtcgggtcatataagccccatccagctcaagacttaagcctccagggcaattaatcgtgctcaaatcctgggggtggtgtttgcttctagcactggtggtggctgcatcccacaccaggcagagccaccccatccccgcccctactcacactctgcctctccaaacagcagcccaagtttccctaatggctaggactggccctgttgcttccccgtactgctcacagttatgagctgagatcctgcatcgtgtcttgttacagctgcttaggtttcaaaaatggcatgggacacagaatgtgttccctccctgaaacagttctttctcacagtcttccagtcattccctaaattaattagattcagggcttaagagggtcagggtgctctactgaggactggattgtatggtagtggaccacagaaaaatactcaccctctcccatattggggaatcacttctggttccctgtgggtcccagccacacaggctctctgttttccttttgcttcctagattttggtttttgctgtcgcttttctgttgaactcctgtgttccctctgggataatatatccaaagtgtcattgtctacacaattttagctcttgtacctggatgaggcacgcttgaaattcttgcagtcatccatcttttcctgatcttgtttcttctgccccattccccaggttcctccagggtctcacagttcccctgtatgtgggaaaggcagttttctttctgcccaatcctgcttctcctttgtccacccagatgaggtttccgctagaattgctacttaaagtggttctgtggaacattttgtagcagagaaaatcagggctgagggagcaccataaaggttagaaaagattagaacattaggttagaaaatctgaactactctacctgtcttgattaggaggattagagttgatgttggatgggtttgttggtttattttccacttatctatcagaatgaagaacttactgccttttcttcttagttggtctaatatttatcactttaattatttttaagtgtacaattcagtggcattaaatatatttataatgtatcatgatcattactacctatgcccaaaactttttcatcatccccaacaaaactctatatccaaaaaaaaataaaaccctctatatgtacatggaacaattaagttgggcccctatcttgcaccatataaaacagttaaatgcatcaaagatcttaacgttaacagctaaaattataaaactcttagcagaaaacatttgggctgattttcatgacctgggatttggcaatgatttcataaacataatgtagaaagcacaggcagcaaaagaataagtaagttggacttcattaaaaatttaaaaatttttttacatcagaggtcactatcggctggatgtggtggctcacacctgtaatcccagcactttgagaggctgaggcgggtggatcacttgaggtcaggagttcgagaccagcctgaccaacatggtgaaaccctgtctctactaaaaatacaaaaattagctgggcatggtggcgcgcacctgtagtcccagctacttgagaggctgtggcaggagaatcacttgagcatgggaggtggaggttgtagtgagctgagatcgtgccactgcactagaacctgggcgagagcgcaagactccatctcaaaacaaacaaacaaacaaaatgaagcaatcccccccccaaaaaaaaggtcactatcaagagaataaaaagaaagacaactcagaatgggagaaaatatttgcaaatcatatgactgatgagggtttaatatccagaatgtgtaaagaacttttactgagcagcgaaaagaaaacccaatgaagaaatgaacaaaggccttcaagaaatgaacaaaggccttcaatagccatgactttacttttttaaatttaaatttaaattttttgagacaaagtcttactctcttgcttgggctggagtgcagtggtgtgactgtggctcactgcagccttgatctcccagactcaagtgattctcctacctcagtctctggagtagctaggatgacagactcacactaccacatgtgactttgtgtgtgtgtgtgtgtgtgtgtgtgtagagacagggtctcactatgttgctcaggctggtcttgacctcctgggctcaagtgagcctctcacttttatttttatttgtagtagagatgagatcttgctaatgttccccaagctggtctcgaactcctgagctcaagcaatcctaccttcctcggcctcccaaagggctgggattataggcgtgattcactgtgcctggcctagtttctttgttttaatttttttcctccccatttgtcttttgagtttccctgagaatctgtcttgctgctgtctcagttgtcattcactgttattacactggaaccctattgatgtagtggtaaggaattagggaggggaagtgttttgtaatctcatgattaaatgtcatttcttttttttttaattggtcctgagtccctgaattgtgactctcagaagtgtttcttagcccttgccctcccacttagatgagacaggaaggctataagcctcgggggttttctaattgtctttcctcttggtagataatggtgtgagcatatttgaatatagtttctttcctctcctcctgctcaaggcacaaggaaattttcctcaaatatttgcagtgaaaacatactaaaacccttgtaggattcctggaggtaaaacctaggaaagtgtaggggcccctctaagactgggatgtcaggatttttaaactctcaaactaatccatatttggcctccagaagttgtcagtttctacttgagtgtttctgttctaggaaagctgtgatattctgtatctgtctttctagttttttttggtggtggtttgccttgtgacctcagtttttggattgatctaagataaattactgattttcagttttctcagcgttttttcttgtcaggatagaagtgaggacctccaaaatccttacatattatagctgcctggtgagttttgtttgtttctttttttaaaaattttttttttttttttttttttttgggatggagttttgcgcttcttccccaggctggagtgcagtggcgcaatctcggctcactaaaacctctgcctcccaggttcaagcaattctcctgcctcagcctcccaagtagctgaaattacaggtgcccgccactatatctggctaattttttttatatttttgatagagatggggtttcgtcatgttggccaggctggtcttgaaatcctgacctcaggtgatctacccacctcggcctcccaaagtgctgggattacaagtatgagccaccttgcctggcccgttttttcttacttttagtaaaaataacctcacgtaaactgtcataggtgtctgtgggcttatttttgatgttctcctttgttggaaattcttgtgaaataccttccaggtcttagtctttgtgaggatcaggttctgctttcaattggatgttttaagaattagttttaaaataatttgtttttcttattattagcaccctatgtttagttgctgtacttatttggatagtgtggtaagcacagtggcttaggcatgagaaatataactagagatctcataattttatgtgtttataaagtgttttatttaaaaattaaataattgcaaatgagtggataaagaaactgatatatatatatctgattatatatatatatatctgattatgtatatatatctgattatatatatatgatggaatactacccggctataagaatgaatgaattaatggcatttgcagtaacctggatgggattggagactattattctaagtgaagtaactcaggaatggaaaaccaaacatcgttatgttctcgctcataagtaggagctaagctataaggatgcaaaggcataagaatgacacagtggcttttggggactcagagggaaagggtaggaaggagatgagggataaaagactacaaattgggttcatgtgtactgcttgggagatgggtgcaacaaaatctcagaaattaccactaaagaatttactcgtgtaaccaaataccacgtattccccagaagcctgtggaaataaaaaattaaaaaaattgcaaatgtaaataagacagtaacaaagatggcaaagaacaaagatgaaaaagtatgctgtattacctgaaagtgcttttatggatatcttagcttatccttcgtccatttaaatattgttagttttagccgggaacatgcctgtaatcccagcaccttgggaagctgaggcgggcagaccacttgagaccaggagtttgagaccagccaggccaacatggtgaaacccgtctctactgaaaatataaaaattagccgggcgttggggcgcatacctgtaatcccagctatttaggaggctgaggcaggacaatcacttgaacctgggaggcggaggttgcagtgagacgagattgtgccactgaactccagcatgggtgacagagtaagaccctgtctccaaaaaaaaaaaaaaaaaaaaaagacacaaaagagaaacaaaaaaaacatattgttagttttgatgattatctactagggtaagtacttttctactcattaaattccattagtgactgtgccttgatttccctgaaaggatgcagtatagagtaggcttttgattggagatagacttcctgattttccacttagtatttaggagtgaaaattattattattattatttattgttttttttttttttggagacagggtgtcactgtatcgcctaggctggagtgcagtggcttgatcctgactcactgtagccttgacttcctagggtcaagcaatcttcccacctcagcctcctgagtagctgggactacaggcacgtgccaccacagccggctaatttaaaaaaattctgtagagatgggatctcactatgttgttcaggcttgtctcaaactcttgggctcaaatcatcttcccacctcagcctccctaagtgctgggattataggtgtgagccactgcacccagccggaagtgcaaattatttaactcctttattttattcagcaaataaatgtctttctgagcctcagtttcctgtaataaggttcttataagttttaaatgaggtcagtgtgcattaaatgtacatgttagaatttggtaaggttagtaagaaaaccaaagacatgtggaccctttacaaaaaattccagcatttaccctaagagatgctttttaagtggttgaaatttggtggcatggaggaaatgtatatgggctcgtatcacatttgggagtaaaattaaggcatgaaatttaaacaaaaaataaaattgtgggtacatagtaggtgtatatatttatgggatttatgagattctgagacaggcatgaaatgtgtactaatcacatcatgtaaaatgggctgtccatcccctcaagcatgtatcctttgagttgaaaaacaatccaattttattctttcaggtattaaaaaatgtacaattaatttaatacagtaaataatacattaatttgatctcaaactcctgacctcaaatgattaattagattaattaatgtattatctattatttattatatacaccctgttgtgccatcaaatactaggccccccccccccttttttttttttggagacagagtcttgccctgtcgcctaagctggagtgcaatggtgcgatcttggctcactgtaacctccgcctcctgggttcaaatgattctgctgcctcagcctcccgagtagctgggattacaggcgcccaccaccaagcccagctaatttttgtatttttagtagagacggggtttcaccatgttggccaggctgctatcgaactcctgaccgcgtggttcgcccgccgcggcctcctaaagtgctgggagtacaggtgtgagccactgcgcctggccaaatactaggtcttattcatgctttccaactgtttttttttttgtacccattaaacgtcaccacatcttgccccccctcgcacttctcttttctttctactctgtgtctccatgagtttgttttgatttttagattccacaaataagtgagaatatgcaatgttggtctttctgtgcctggcttatttcacttagcataataacctctagttccatccatgttgttgcaaatgacgggatctcattcttttttatggctgaatagtagtccattttgtgtaactaccacattttctttatccattcatctcttttgatggatacttaggttgcatccaaacctggctattgggaacagtgctgtaataaacatgggaatgcaggtatccctttgatatgctgatttgctttatttctggtgtatacccaagcagctggattgctggatcatatggtagctcaatttttagttttataaggaacctccaaactgttcttcgtagtggttgtcctatttcacgttgttgccaactgtgtatgaggattttcttttctttacatcattgccaacatttgttattgcctgtcttttggatataagccatttcaactcaggcaagatggtatctcatggtagctttgatttgcatttctctgatgatcagtgatgtagaatgctttttcatatgcctatttgcaatttgtatgtcttcttttgagaaatgtgtatccacattttttgcccatttttgattggattattagatttttattctgtagagttgtttgagctacttacatattctggttattaatcgcttgttagatggatagtttgcaaatactttctcccattctttgggttgtttgttcactttgttgattgtttcttttgttatgcaaaagctttttaacttgatgtgatcccatttgtcaagttttgtttggttacctgtgcttgtggggtattgttcaagaaaattttgcccagactaatggcctagagagtttccccaatgttttcttgtagaggattcataaattgaagttttagataaaattctttaatccattttgattttatttatgtatagagcaagagataggagtctagtttctttttctttttttttttttgaggtggagtttcggctcttgttgcccatactggagtgcaatggcacggtctcagctcactgcaacctccgtctcccaggttcaagcgattctcctgcctcagcctcccgagtagctgggattacaagagcccaccaccatgcccgtctgatttttgtatttatttatttttatttatttatttatttatttatttagttttttgagacggagtcttgctctgtcacccaggctggagtgcagtggcacgatctcggctcactgcaagctccgcctcccgggttcacgccattctccagcctcagcctcccgagtagctgggattacaagagcccaccaccatgcccgtctgatttttgtatttatttttatttatttatttatttatttatttatttatttatttagttttttgagacggagtcttgctctgtcacccaggctggagtgcagtggcacgatctcggctcactgcaagctccgcctcccgggttcacgccattctccagcctcagcctcccgagtagctgggactacaggcgtccgtcactgtgccggctaattttttgtatttttattagagacggggtttcaccgtagccagaatggtctcgatctcctgacctcgtgatccgcctgccttggcctcccaaagtgctgggattacaggcgtgagtcattgcgccaggctaatttttgtatttttaatagagaccggatttcaccatgttggccaggctggccttgaactcctgacctcaggtggtctggccgtctcggcctcccaaactgctgagattacaggtatgagccactgcacccggcctggagtctagtttcattcttctgtatatggatatccagttttcccggcaccatttatttatttatttttatttattttatttttttttgagacagagtctcattccatcacccaggctggagtgcagtggtgtgatgtgggctcactgcaacctctgcctcccggattcaagcagttctcctgcctcagcctcccgagtagctgggattacaagctaatttttatattttgagtagagatggggtttcaccatgttggccaggctgatctcgaactcttgacctcaaatgatccacctgcctcggccccccaaattactgggattacaggcgtgagccaccgtgccgggccagcaccatttatttttattttattttacttatttttttgagagtgagtctccctatgttgcccaggctggagtgcagtggtgctatctcatctcactgcatgcagcctctgcctcctgcgttcaagcgattctcctgcctcagcctcccaagtagctgggattacaggcacccaccatgatgcccagctaatttttgtatttttagtagagacggggtttcaccatgttggccaggctggtctcaaactcctgacctcaggtgatccttccgccttggcctcccaaagtgctgggattacaggcatgagccaccatgcccagcctggagtctagtttcattcttccgtatatggatatccagttttcccggcaccgtttacttatttatatttatttattttattttttttgagacagagtctcatttcatcacccaggctggcgtgcagtggtgtgatctaggctcactgcaacctcttcctcctgggttcaagcaattctcctgcctcagcctcctgagtagctgggatgacaggtgtgtactaccaccatgcccaactaatttttgtatgtatgtatgtatgtatgtatgtatgtatgtatgtatgtatgtatgtatttgagacagaatcttgctcttttgtcgaggctggagtgcactggcacgatctcggctcactgcaacctccgcctcccaggttcaagcgattctcctgcctcagcctcctgaggagctgggattacaggtgcatgccaccacgcctggctaatttttttttcgtatttttagtagagatggagtttcaccatgttgcccaggctggtctcgaactcctgaccttgtgatctgctcacctcagcttcccaaagtgttgggattacaggtgtgagccagcgtgcctggccccagcaccttttattttatttattttatttatttttctgagagtgagtctcactgtgttgcccaggctggagtgcagtggtgctatctcccctcactgcaacctctgcctcctgggttcaagtgattcttctgcctcagccttccaagtagctgggattacaggtgcctgccaccatggctggctaattttttttttttttttttttttttttttagcatagatggggtttcaccctgttggccaggctggtctcaaactcctgacctcaagtgatccgtctgctttagccttccaaagttctgggattacagatgtgagccactgtgcctggccccagcatcatgtattgagcctttttcttttccccagcatatgttctcggcacctttctagaaatagaaaatgagttcaccgtagatgtgtggatttgtttctgagttctgtattctgtccattggtttatgtgtctgcttttatgccagaatcatgctgttttggttactataactctgtggtataatttgaagtctgataatgtgattcttccagttttgttctttctgcttagtatagttttgggaattctggaacttttgtagttccgtgtaagttttaggattgttttttctatttctgtgaagagtgtcattggtattttgatagggattgcattgaatctatagattgctttggatagtatggacagtttaacaatattgattcttccagtccatgaacatgaaatatctttacattttttggtgtcctcttcaatttcattcagtttgcttttcagattggtcactgtcgatgtttagaaatgctgctgatttttgtatattgattttttatactgacagtttactgaatttgtttatccgttctaatagtttttttgtagagtctgtaggtttttctaaatataagatcatatcatctgcaaataagggtaatttgacttcttcctttcccttatttctttctcttgtctggttgctgtagctaggacttccagtagtaccatgttgagtaactgctggaagtgggcattcttgtcgtgatctggatcttagaggaaaggcgttcagtttttcccctcagtttgataccagttgtgggtgtgttgtatatggcttttattatgttgaggtatgttcctcctaaacccatttttttgagggtttttatcatgaaggaatgttgaatattatcaaatagtttttaagcatcaattgatataatatggtttttgttcttcattctgttgatatgatgtatcacattgatttgcatatattgatcccctcttgcatccaagggataaactccacctggttacgatgaatgatctttttaatgtgtctgatttgctagtattttgttgaggatgtttgcagcaatatttatcagagatattggcctgtcattttctttttttgatgtgtttttgtcaggttttggtaacagggtaatactggcctcacagaatgtgtttggaagtattgcttccttttattttttggaatagtttgagtaggaatagtattgatgcaggaattttctcggcccctttgttggacttgtgacaggggcgaatgtttactcagcctgccgtgctcaaccccttgttggagggtgcatgtgagtgagtgagtgcgggacctggccagctggtgggggcactgacacagcagcaagccctgtgcagggaccacggccagaccaggcacaagcgagtgagtgtgggacccagctgttctgagcaccagcaggagcaggcctgtgcacagcacccaggttgatggggaggggggtggtgtctgtgaccccgaggcccctgagggggtgttaacagtgctcctttagttctgctgtctgctgatggctgtgtgttaacaagttggcctcttgccttgtcatgtggggtggctgccctccactggtgagggcaaagggctggtgtgacagtcttttttgggtacctgcactcagtgggtcctgagctcttgtctggcatccaagaagaatgaggttgagtggacacttgaaggatggtgaaggtgaagaattttattgagcagtgggaatggctcagtggagaggggagctggagaggggatgggaagggctgatctccctgaagtccggccgtttcttccctaagtcatgctgtctcctttcccaaagtttggccatcttctctccgaaattaagctgtttctctcctctctaccaactgaatctggggtctttataagcataggatcctctttataagcacaggatgggggcggggcaggctgtagaagttttggaaaaggcaacattctattggtaaagagacattattcaaacagaaccaatcgggagagagcggacaaacaggaatagaagttttcactttgggctgtgggtttcaggctttttggcttgaacgtggggtttcaccagggactgcccttgtcttcctagaatttctctgcctcctgcctctatcagtattagatcttctttaaatgtttggtagaattcagcagtgaagccatcaggtcccaggcttttatttactgggagaatttttattatggtgtcaatctcgttatttgttatagctgtgttcaggttgcagatttgttcatggttcaatcttggtagattgtgtctaggaatttgtccatttcttctaggttttccagttcattagcatatagtttttcatagtagccatgaatgaacctttttatttctgcagtattggttatcattgtaatgtctccattctcatctctggtttatatatttggatcttcttttttttttctttttttttttttactctggccaaaggtttttaaattttcttttaacttttacaaaaaccaacattttgttttattgatattttgtattattttctttatttcagtttcgtttgcttcactctgatctttattatttcttctaattttggggttggtttactcttgcttttcttattctttaagatgtgttgttaggttgtttatttgaagtatttcttcttttttcatgtaggcactcacagctataaacttcccttttagtaatgcttttgctgtatcccataggttttggtatgttgtgtttcagtatcatttgtttcaatgaattttccaattttcttcttaatttttgcattgacttactgatcattcaagaacatattgtttaatttacatgtatttgtatacttttcaaaatttctcattattgatttctagttttattccgttatcagaggagatgcttgatattatttcaatatttttaatgtcttaagacttgttttgttacttaacatatgttctatccttgagaataatccatgggctgaggagaagaatgtgtattctgcagcccttggatgaatttttctgtaaatatctattaggtccatttggcctctaatgcacattaagtctgatgcttcattgttggttttctttggaaggtctgtccaatgctgaaagtgggatattgaagtctccaagttttatcatattggggcctgtctctcccttttgctctaataatacttgctttatatatgtgagtgctccagtgttgggtgcatttatgtttaaaatggttacatcctcttgctgaattgactgctttatcattatatagtgaccctctttggcttttcctatagtttttgtcttgaaatctattttgtcttatattagtatagccacttctgcacttttttggtttccattggctttggaaaagatttctcgtaattctgtttgataaggacacatgttaggaggttttcaacacttcagtgagtagtaaacttgtaagtaaagcaggtatgaacagaatctcttgaattagtgaaaagtcaaaatcgttaattactgtttaatttaaaactgaaattataggtattaacaaataactatatgccttatactgtactttatttatttatttttccgagacggtcttgctctgttgcccaggctggagtgcggtgacgtgatcttggctcactgcagcctctgcctcccgggttcaagcaattttcatgcctcagcctaccgagtagctgggactacaggcatgcactggcacacccagctaagttttttgtatttttagtagagatgggatttcaccatgttgcccaggctggtctccaattcctgacctcaagtgatccacccaccttggcctcccaaagtgctgggattacaggcatgagccatcatgcccggccatataatgtactttaaacatgatgattttgaaactggaaacacacgcacatgtgagtaatttcttaaatggaattgaattaccttgaagaatcttagaaaaatgatgtttttaattttaaattagttttgcgtcatacatgtctttatttctcaaattttaaagaaaagtctatgaattaaagaaaataaaacttttcctgcatgaaagcaatgagtgtattatgtaccaaaaaggtagaagaaaaatatcttctgtaatattagctagatattacttactaaagatatttttggggtatatttattagcaatattttaatgcaattttaaacataattgtcatcatacttcatagacagtttatagcctgctatttttggttagcattgtagtatgagctattttccatattatttgaacttttaaaatttaatggttggtatgatattgtatgacttgtatgcatccttgtttacctagtctttattatacactttaattgattacagttttttttttttttttttgcttttgtgagcatctggcagataactttcttgagtaaagttattatgtagaaatattttctttgggccaggtgcggtggctcatgcctataatcccagcactttgggaggctgaggcaggtggaacatgaagtcaggagttcaagaccagcctggccaatatggtgaaaccccgtctatactaaaaatacaaaaatcagctgggcatggtggtgcatgcctgtagtcccaggtactcaggaggttgaggcaggagaattgcttgaacccgggaggtggagaggttgcagtgagccgagatcgaaccactgcactccagcctgggcgacagagcaagactccaactcaaaaaaaaaaaaagaaaagaaaagaaaagaaatactttcttactttctttgtatagataaagggagatagaattactagatcaaagtctcttgatggtttttgccaatttgttttgtaaatgtatgtatcaccacaggctatctatgagagtgtctatttcatggaaacttagcctacaatgaatagtcattttacccctaaatatttgataagttaaaaaatgctatcacatttaacatttcataggctttaagaagttgcagttttatattcatttcttcatgcattttgtgtactatttcaaaagtttctataggggaatgagagcaaagtaatgtgtttttcattatttattttgctaaccaaacatatttaattactaaccaaaaggatgatcctaattaagccaacacttggaattattttcatgtaaaatgtctgtgatagagataattgaatttaataatgaaaaaagtattacagaaatttgctcattaaactgagcttgttttcagctaatccttctgcgaagtgataatgactttttttttttttttttaaataaagatgggggctcgctatgttgaccaggctggtcttgaactcctggcctcaagtgatcctcccatctccgcctctcaaattgctaggaatacaggcatgagccaccacacttggtttaatagtggaatttttattacacttttttatggattcgaggagaggtggcattgtacataacacattctaccgctaattttccatctttcacttttctcattgtgctttccttcccattccgttcctggtgttgaaccaatgcatcatttgtaaatttgtagacagtctgagtttttctgccataatctgttgtttcttcagacttcttctctggtttataagaaaactgttgttttaaaactctcagttttgtattttttatttcttattatactttaagttctgggatatgtgagcagaacgtgcaagttttttacataagtatacatgtgccatggtggtttgctgcacccatcaacctatcatctccattgggtatttcttctaatgctatccctccccttgcccccaaccccccaacaggccccagtgtgatgttcccctccttgtgcccatatgttctcattgttcaactcccacttatgagtgagaacatgcagtgtttggttttctgttcctgtgttagtttgctgagagtgatggtttccagcttcatccatgtccctgcaaaatatatgaactgatcctttttttatggctgcatagtattccgtggtgtataggtgccacattttctttatccagtgtaccattgataggtatttgggttggttccaagtctttgctactgtgaatagtgctgcagtaaacatatgtgtgcatgtgtctttacagtagaatgatttataatcctttgggtatatacccagtaatgggattgctgggtcaaatggtatttctaattctagatcattgtggaatcgtcacactgtcttccacaatggttgaacgaatttatcctcccaccaacagtgtaaaagtgttcctatttctccacatcctctccagcatctgttgtttcctgacttcttaatgatcggcattctaattggcatgagatggtatctcattgtggttttgatttgcatttctctaatgaccagtgatgctgagctgtttttcatgtttgttggccatgtaaatgtcttctttggagaagtgtctattcatatcctatgcccactttttgatagggttatttgtttttttcttataaatttaagttctttgtagattctggatattagccctttgtcagatggataaaaaaacactatttttttaaaaaattttccaattcctcatcggtaaaaaagcagtaaaacattcatggtaatgatcatggcctatagttttttttttttttaagtgacattaggatttaaaactggtatgaaacctaatcatttattttagttagctaatatcaggatttagatttatttttttgacccaattgcagataggcagatcagatctcatagactgccatctgcctcaagctccttttgtagttatgtgaatgtgagcctgaaggctgaacccacttttctctaatggagatttttttttattacactttaagttctagggtacatgtgcacaacgtgcaggtttgttacatatgcatacatgtgccatgttggtgtgctgcacccattaactcgtcatttacattaggtatatctactaatgctatccctcccccctccccccaccccatgacaggccccggtgtgtgatgttccccttcctgtgtccaagtgttttcattgttgaattcccacctatgagtgagaacatgcggtgtttggttttttgtccttgcgatagtttgctgagaatgatggtttccagcttcatccatgtccctatataggacatgaactcatccttttttatggctgcatagtattccatggtgtgtatgtgccacattttcttaatccagtctgtcattgatggacatttgggttggttccaggtctttgctattgtgaatagtgctgcaataaacatacatgtgtgtgagtctttatagcagcatgattgataatcctttgggtatatacccagtaatggggtggctgggtcaaatggtatttctagttctagatccttgaggagtcaccacactgtcttccacaatggttgaactagtttacagtcccaccaacaatgtaaaagtgttcctatttctccacatcctctccagcatgtgttgtttcctgactttttaatgatcgccattctaactggcatgagatggtatctcattgtggttttgatttgcatttgtctgatgaccagtgatgatgagcatttttacatgtgtctttggctgcataaatgtcttcttttgagaagtgtctgttcatatcctttgcctactttttgatggggttgtttgatttttttcttgtaaatttgtttaagttctttgtagattctggatattagccctttgtcagatgagtagattgcaaaaattttctcccattctgtagtttgcctgttcactctgatggtagtttcttttgctgtgcagaagctcttgagtttaattagatcccatttgtcaattttggcttttgttgccattgcttttggtgttttagacatgaagtccttgcccatgcctatgtcctgaatggtattgcctaggttttcttctagggtttttatggttttaggtctgacgcttaagtctttaatccatcttgaattaatttttgtgtaaggtgtaaggaagggatccagtttcagctttctccatatggctagccagttttcccagcaccatttgttaaatagggaattctttccccattttttgtttttgtcaggtttgtcaaagatcaggtggttgtagatgtgtggtattatttctgagggctctgttttgttccattgttctatatctctgttttggtaccagtaccatgctgttttggttactgtagccttgtagtatagtttgaagtcaggtagcgtgatgcctccagctttgttctttttgcttaggattgttgtggcaatgcggtttaaccactctgaaaagatgtatttaaggacttttatctagactctatggtgaggtataacatagtgctggttgagtcagcttcaagtttttgtagagggaggaagagagtaacaaccatgtctggatttaataaaaagtttagcataagtaaatgtgtgctcttttgccttaagaaaatatttttcaatatataaaaaggattaatgagtgctgcctttcagatacttggtttggtgtgtttgaaacatcatttccaaagataggacatacacatttccagggatcatctctatgatatgactctagaaatgatgtagatttttaaaatcaatgtcagaacttatagacacaaatgtatgctttccttctaagtagtcactttgggagcccatatacataacagtggtgtcattcctgatgatatgttgggaactctcattttgtaaccagtttagaagtcatgcaagtaaataaatcttcaggattacttcagatttgggcaaaaaattagttttacccaacttgatcattttgcatttttcaccatatttgactctaagtgaaaactggctatttccaaaaatcatacccatcctgaggatgtgaagatatttttgggctgggcacggtagctcactcctgtaatcccagcagtttgggaggctgaggcagtagggttgtttgaggccagaatttgaagaccagcttggtcaacatagtgagactccctctctccaaaggaaaaaaaaaagtgaagttttttttttctttttcaaatgagtaggcagcattgtttagttatctgtttttttttcttttttttccactgttggacttctgtccattctctttatttgtttatttatttatttgagatggagttttgctctgttgtctaggccggagtgcagtggcgcgatcttggctcactgcagtctctccctcccggctcaagtgattctcctgcctcagcctcccaagtagctgggattacaggcatgcaccaccaggcccggctaattttgtgtttctaggggagacggggtttcaccatgttggccaggctggtctggaactcctgacctcaagtgatctgcctgtctagctcccaaagtgccggggttacaggtgtgagctaccgtgcctggcctgctgatcatactctcttgattttatttttgtactgtggtactgcggttgatggactgcactgatgttatccatatttttaaccttggtcacccacagtgtgaactcattaaatagctgactttgcaatttgattgctatgatttgggaatgagtgtggcagtcataattgtgcaggtttgctatcgtttcatttctagagaacttttctatggtgatctattgatgagataagatatagtatgacattatttattcctctttttgacttttggttctcaggaattttgggtgctgtgagttgacatgtagcatcatttcctcaggtctcattttctatctgagcacgattaaggacacagtgacctgatgataaatttttttgtacatctgactcttatctgaaagaatggttattggccaaatatggaaaccatacccacttggtacctttattctagaggcaaagtttgtttcaaaattttgtaaaacaaccctctccaccaaaagaaaacaaatacccacacaagatctctagttacggtgtctgttatatctcatttcttttccttccctaaatatactgagctattcttaactaaatacaggaaaattgtgcagaggaacacttactaagtgttcagtaaatgttttcatttttcttatgtgtatatctagaagtagaattgttgggtcattgagtaactgtttctgcgtaaatatctatacacgtgccatggtggtttgctgcacccatcaacccgtcatctacattacgtatttctcctaatgctatccctcccccaacccctaacaggccccagtgtgtgatgttcccctccctgtgtccatgtgttctcattgttcaactcccacttatgagtgagaacatgcagtatttggttttctgttcttgtgttagtttgctgagaatgatggtttccagctccatccatgtccctgcaaaggacataaacgcatccttttttatggctgcatagtattccatggggtatatgtgccacattttctttatccagtctatcactgatgggcatttgggttagttccaagtctttgctattgtgaatagtgctgcagtaaacatgtgtgcatgtgtctttatagtagaatgatttataatcctttgggtatatacccagtaatgggatggctgggtcaaatggtatttctagttctagatccttgaggaatcgccacactgtctgccacgatggttgaactaatttaccctcccatcaacagtgtaaaattgttcctatttctccacatcctctccagcatgtgttgttccctgactttttaatgttcgccattctaaccggcgtgaggtggtatctcattgtggtttttatttgcatttctctaatgaccagtgatgatgagttttttttcatatgtttgttggccacataaatgtcttcttttgagaaatgtctgttcatatcctttgcccactttttgttagggttgtttgcttttttcttgtaaatttgtttaagttctttgtagattctggatattagccctttgtcagatggatagatcacaaaaaagttctcccattctgtaggttgcctgttcactctgatgagatatatatatatattttttttttgctgtgcagaaggtctttagtttagttagatcccatttgtcaattttggcttttgttgtcattgcttttggtgttttagtcatgaagtctttgcccatgcctatgtcctgaatggtggtttgcctaggttttcttctagggtttttatggttttaggtcttatgtttaagtctttaatccatcttgagttaatttttatataatgtgtaaggaaggagtccagcttcagttttctgcatatggctagccagttttccaaacaccatttattaaatagggagtcctttctccattgcttgtttttgtcaggtttgtcaaagatcagatggttgtagatatgtggtgttatttctgaggcctcggttctgttccattgttctatatctctgttttggtaccagtaccatgctgttttggttactgtagccttgtagtatagtttgaagtcaggtagcatgatgcctccagctttgttctgtttgcttaggattgtcgtggccctgtggggtattttttggttccatatgaaatttaaagtagcttttttttccaattctgtgaagaaagtcagtggtagcttgatggggatagcattgaatgtatacattactttgggcagtatggccattttcatgatattgattcttcctatccatgagcatggaatgtttttccatttatttgagtcctctcttatttccttgagcagtggtttgtagttctccttgaagaggtccttcacatcccttgtaagttgtattcctaggtattttattgtctttgtagcagttgttaataggaattcactcatgatttggctctctatctgttattgttgtataagaatgcttgtgatttttgcacattgattttgtatcctgagacttcgctgaagttgcttgtcagcttaaggagattttgggctgagatggtggggttttctaaatatgcaatcatttcatctgcagacagagaatttgacttcctcttttccggattgaataccctttatttctttctgttgcctaaatgccctggccagaacttacaatactgtgttgaataggagtggtgagagtgggcatccttgtcttgtaccgggtttcaaagggaatgcttccagtttttgcccattcagtatgatgttggctgtggttttgtcataaatagctcttattattttgagatacgtttcatcggtacccagtttattgagagtttttagcgtgaaggagtgttgaattttattgaagtccttttctgcatctattgagataatcatgtggtttttgtcattggttctgtttatgtgatggattatgtttattgatttgcgtatgttgaaccagctgtgtatcacagggatgaagccgacttgatcgtggtggataagctttttgatgtgctgctggattcggcttgccagtattttattgaggatttttgcatcgatgttcatcagggatattggcctgaaattttctttatttgttgtgtctctgccaggttttggtatcaggatgatgctggcctcataaaatgagttagggaggattccctcgttttctattttttggaatagtttcagaaggaatggtaccagctcctctttgtacctctggtagaattcagctttgaatctgtctggtcctggacttattttgatcggtaggctattagttactgcctcaacttcagaactttttattggtttattcagggattcgacttcttccttgtttagtcttcggagggtgtatgtgtccaggcatttatccatttcctctagattttctagtttgtttgcatagaggtgcttatagtattctctgatggtagtttgtatttttgtgggatcagtggtgatatcccctttatcattttttattgcatctatttgattcttctctcttttgttctttattagtccggatagtggtctgttttgttgatcttctcaaaaaaacacctcctgaattcactgatagtttgaagggtttttcctgtctctatctctttgagttcttctctgatcttagttatttcttgtcttctcctagcttttgaagttgtttgctcttccttctctagttgttttaattatgatgttagggtgttgactttagatatttcctgctttctcttgtgggcatttagtgctataaatttccctgtacacactgctttaaatttgtcccagaaattctggtatgttgtctctttgttctcattggtttcaaagaacttctttatttctgccttaatttctttgtttacctagtagtcattcaggggcaggttgttcagtttccatgtagttgtgcggttttgaatgagtttcttaatcctgagttctaatttgattgcattatagtctgagagactgttatgatttccgttctttttcatttgcttaggagtgttttacttctaattatatggtcagttttagaataagcacgatgaggtgctgagaagaatgtatattctgttgctttggggtcaagagttctgtagatgtctgttaggtctgcttggtccagagctgagttcaagtgttgtatatccttgttaattttccgtcttgtcggtctgtctaatattgacagtgggttattaaaatctcccactattattgtgtgagagtctaagtctctttgtaggtctctaagaacttgctttatgttctgggtgctcccgtattgggtacatatatatttaggatagttagctcttctcgttgctttgatccctttaccattatgtaacacccttctttgtctgttttgatctttgttggtttaaagtctgttttatcagagactaggattgcagcccctggttttttttgctttccatttgcttggtaaatgtttctccatccctttattttgaacctatgtatgtctttaatttgtttttaaaattattatatccatcctacttagtataaattggtttcttgttgtggttttgatttgcatttccctgatatgactaatgatcttgagcattttttcatgtgcttattggccattggtatatattcttttgagaagtgtatatctaagtcttttccccatttaaaaaatagggttgtctttttgttgtttaattgtaagaagtctttatgtattctggttaccagaccctcatgagatacaggatttgaaaatcgttttctctcattgtgtttgctgtgttttcactttcttgatggtgccctttgacatgcaaaagttttgacttttattaaaaatggggctgggcatggtggctcacacttgtcatcccagtgctttgggaggctgaggtggaggatttcttgaggccaggagtttcagaccatcctgggcaacataactggaccccatctctacaaaaaattaaagaaaaaatttagctaagagtatagttgtgtgctgcacttcctcaactaagaacataggtgtgtgccacaggtactcaagatgctgaggcgggaggattgctttagcccaagagttttgagacctcagtgagtcaaggtcacgccactgtgctcaagcctgtgtgacagagcaagaggctaactctaaggaaaaaaaatggggtaaacttatactttccttatttaaagttttaactccttaaaaccctgttgaattacagatacatctattatataacttaagagttgatgctataggctgggcacagtggctcacgcctgtaatcccagcactttgggaggccgagatgggtggatcacgaggtcaggagatagagaccatcctggctaacacggtgaaacctcgtctctgctaaaaatacaaaaaaattagccgggcgtggtggcgggcgcctgtagtcccagctacttgggaggctgaggccggagaatggtgtgaacccgggaggcagagcttgcagtgagccaagatcacgccactgcactccagcctgggtgacagagcaagactccgtcttttaaaaaaaaaaaaaaaaaaaaagagttgatgctataaaacttagttaatgaaatatttccctgggcgatggagctcttgcaagtcctgttgtattttttgttcatctttatgccagtcagttagacagttcttctatgtcaagcagaggatggaataataaaccaaaacactgcttagggctttcagagagtaagtgttcagtaaatatattcgataaattactgaattatttttttaaatgatggaaaggaaaatcttgccctctctttttctgggtgttggctagtataaatctttcttgaagtgataatctacatctatgttttgatttctaaggatttcccaaatataagctatatataagtgagaggaaataataacttaggtgcctaatgataatatgacaagataagtacaagggtcagctatttgttgtgaaatagcaatggatataatttaaatatgaatacctttttgctgtttaatcccccaaattttcttttgatttcttttaaaattcttttgtggtaggtaggtttattgtttcttaagaattaacttaagggtagtattttctgatacatttttaagtaacatgaagtttaacttctgtttaaacacatcatatagagtacattgaaagacctcagtattttcgaaatgtttagtaagtaatatcagcagtttccttaaatgatattttaatcctaggtaagtgtacaggtaggttgtgttactcatatttttatattcttagtgaaatagaattcttttttttttttttttttgagacagggtctgactgttgccttggctagagtgcagtggcatgatcttggctcactgcaacctctgcctcacaaggctcaagccatcctcccacctcagcctcctgagtagctgagaccacaggcatgagccacccatgctctattatgagccaccacacctggcctaaaattcgttttctttaatattttttctttctacacccacaactgtaacatttcccttagtttttactttgaatgtgcatactcttacacgacttacagtatggctatattttcagtttgctagagctttacaattaatttaaaacatgaaaggctaattaagggaattctttaaattttgttttaatagtgaaagcaagttgaatacattggtgcagaagcttcatgacttccttgcacactcatcagaagaatctgaagaaacaagttctcctccacgacttgcaatgaatcaaaacacaggtaaattgaaaaagaatgtgctataccttctagtcttttttctattttttttttacacttatggaggtaaccatttattttattcagagagcagcttttaaaagagatttcagtttgtggaaaatgacagattagcaagctttatagaagcccctattatgtatcttagctatatctgatacaggagattttaattttggtaagtatgactatagaaagcttagaaaaggaagcatttatggttttatatgtaatggaaatgtgttatagaatggctagtgaatgttgactgtgaaaaaatagtattagaagaggcaggagtagtataggaatgttttgtcctagcaatcattcatgtattaggagttaaatttttatttttatttttgtgatggagtctcgctctgtcacccagtctggagttcaatggcatgatcttggctcactgcaacttccgcctcttgggctcaagctattctgctgcctcagcctcctgagtagctgggatcacaggcgtctgccaccatgtttggctaattttggtatttttagtagagactgggtttcaccctgttggccaagctggtctggaactcaagtgatctgccctcgttggcctcccgaagtgctaggataacaggcatgagccatcacacccaacataagagttaaatttttatgttgtttgataatatccctgagtagatttggtgtatttattttttaaaataaaaccacttaacacctcctctctacctccctgtctctctcttttaaaaagatatatatatatatatatatatatatttttttttttttttttttttttaaagagacgaggtcttgctttgtcacccagactggagtgtagtggtgtaatcatagctcactgcagcctcagacttcttgggcttaagcaatcttctcacctcaccctcccggtagctgggattacaggtgtgtgccaccatgcctggttaatttcaaaaaaaaaaaaaaaaaaaaaaaaaaaaaaaaaaatttttagagacatggtcttgctatgttgtccagactggtcttggacttcctggcctcaaatgattctcctgcctcagcctcctgagtagctgaaattataagcatgagccattgtacctggttcccttttttaaaaaacattttgtatcatgtgacagttagcattttcaggttttcaagggtaactacaatacacatgcacacagacacacacaatatgtacaaaaaaagtataagagagttatagtgaaaagttcaaccatatgtgtaattagagttctagaaggaataaagagacttggttaaaagtcctatttggagagatacgggctgagcattttttaaaaagtgatgaaaaacatcagactagagattcaagaagttttgtgaaccctgaacaggataaatataaagaaaactacagctaggcatgtcataaccaaactcctaaagaacataaaccgagagaaaaatatcttaagtagccagaggaaaaaaatacattattttcaaaggaataacagtaacactggcagctcacttaacaacagaaatgatagaaggcagatgacaatgaaattatttctttaaaatgtcaaagaaaagtgcagtcatgcatcacttaactatgggataggtttttttgagaaagcattgttgggtgattttgtcattgtgcaaacattatggagtgtccttacataggctactacacacctaggctatatgttatagcctgttgctcataggctacaaacctgtgcagcgtgttcttgtactgaatacggtaggtaatcggaacacaatggtaaatatttgtgtgtctaaacacatggaaacatagaaaaggtacagtaaaaatacagtattataatcttatgggaccaccgatgtatatgtggtcagtcattgagtgaaatgtctttatgcagcatgtgattgtaattgccagcatagaactgtatattcagtgaaaacatccttcataaatgaagggtggaataaggccatatctgggcaaacaaaaagtgagaacttgatgtcaacagacctacactggagtgaataactacactagaggaaattacaagttttctgaaatgagaaagaaaataatttgaaatggcaacaccaaaatacaggaagtaatgaataagaatgggaaagctaaataggtaggtaaactaaataacataaagttatttaagccacagtccctattcttatttcatcaattaccccagtagtgttcacagataagtttttcccccttaaattcaggatccagttcaagatttagtagtcctgtttctttggttttttaaaaatctgaagcagtttgtctgccttttgggactatgactttttttgaaatgtacaggtgtgttactttgtgaaatggccctcaggattatctgtttagttatggttagattcaggttatacatttttggcaggaatactacataaagtggtgttctgttctccatgcatcctgttacatggcacatgatgtgatttgcccctttactggtgatgttaacttaggttgtttggttatggttgtgtttgctaggtaaacccagtctaaagttatgatttattccattgtaactaataactaatttaatggggggcactttgagattactaaggtattctttttattatcaaaacttaatatgttttcttttgcaaatgaccacaaagtttgcagcttaaaacaacccaaatttgttattttacagttctgtaggttcggagtccggtgggccttgctggacccttctcgggctatcacaaggtcaaagtcaagatgttagtaggactaggttcctttctggagactgtagaaaaatccattcctaagctcattcaggttgttggcagaattcagttctttatgataatcggttagaggtccttctttctcactcactattggccaagaccccctcctagttcttttcaggtgtcttcatttcttctcacgtgatgccctccatcttcaaatccagcaacagcacatcaagtctctctcaagctttgaagctctctgacctagctttttgcttgctaattctgctgccacctgctaccagctggagacatttttctgtttttaaggattcatgtgattagattaggtccctctccctctcatctcctcctgattatctcttgagtttaagatcaactgtgccatattacataacacagttatgggagtgatatgtcatcacattgataatttctggggatttgcggtgtagaatcttgtgggccattcctagaaggtctgtttatcacagcatacatttgtgattcttagctgaataatttattcctatgatgggttcaaaatggtgatgttctaacttgtctttccttctatgtttattagttgatattttattgtaagggaggggttcatgttctaacctattcaattatttgtatcagtatatacttacaattttttccatgaatattctctgtcattatttattttgatcctgaaattgtatcagttttggctagtaggagcctcacctggatggctcctgctgacctttttacaaatccgcatcatttcttgaacactttctttctgtcccttcaaagtattcaaggcttgctttccattctctgttccccagccctacaatcagttattttttgcaagagttctgattccttttagtgggatatagtgtttagaaatcaagatcagggtgtgtgatgtgctcattgccaccaagatgtctttgtttccaagctctttcacagagaaagccaataatatgttttatattttcatgagttgatactgatacttttaattcaattccagtcttctttctagacttccccttttcatgtttttaacttctttctccaacagaaagaaacctggttcctattatccccaatttatttatttttatttatttattctttttgagatggagtctcactctgttgccaggctggagttcagtggcgtgatctcagatcactgcaacctttgcctcccaggttcaagcgattctcctgcctcagcctaccaagtagctgagactacagtcatgcgccaccatacccagctaatttttgtatttttagtagagacagggtttcaccatgttggccaggatggtcttgatctcttgacttcatgatccgcctgcctcgacctcccaaagtgctgggattacaagtgtgagccactgtgcccagcctatccccagtttatttatttatttttatttttatttttttgagatggagtctcgctgtgtcacacaggctggagtgcagtggcgccatctcagctcactgcaacctccgcctcctgggttcaagcgattctcctgtctcagcctcttaagtagctggaactacaggtgcacaccaccgtgcccagctaatttttgtatttttagtggagacggcgttttgccatctctggatggcaggctggtctggaactcctgaccttaggtgatccacctgcctcagcctcccaaagtgctctgattacaggcgtgagccaccaagcccggcctttccccagtttatttgtattcatttttctagtcctcattgtacccacagtttcagagttgttaaccatatcatcgcattaaagaaacgtaactatagttcagtatttctttaaagttctttttgtctttagaatgatgttacgttgtcggagtcctgtgttcactagttgaggaactccttcagtagtggtatctccagttggacaaacagatgtcactcacaaataccaattgtaaattctgggcagcatactgaaggctagatatcaacaaagtagataaactggaggggagtcaacacatggaagaagaagtggcaatggctgaattccccattgttaatcctttttgcttcagccaaggatcctcttagctccatctgtggcctttaagacttggataaaaatctacagtcttattggatgtgaaatcaaggaaaaaatttagggagaccacagcagctgtaacatgagtagagagatcccatctagaaaagagccacagaatgggaaaaccagattgcacgaaaactctcccaatagctctggtcctgttgcctaagtgcactccagattccaaccagcctggttaggactaaaagaacagaacaaaagctttgagttgtttggtactacagggtggaaagggtttggagtttcatttcaagtaagttaactatctgtttgtttggttggttggttttttttgagacaggttctttttctgttgcctaggctggtgtgcagtgatgccatctcagctcacagcaacttccacctcccgggttcaagtgattcttgtgcctcagctttctgaatagctgggattacaggcacctgccaccacgcccagctaatttttgtatttttagtagaggcagtgtttcaccatgttggccaggctggtcttgaactcatgacttcaggttatctgcctgcctcggcttcccaaagtgctgggattacaggcgtgagccaccacacccagcccagttgactttttatgttggccttgtatcctgtgaacttgcttaacgtacttattagttctaaatagtatttttccccctcttgtagattctttgggattttctacttagacagttatatcacctgcaaatagggatagttttattttttcctttccatctgtataccttttaatttcttttcttgcttcattatattagctaggattttctgtattttccagtattacattgaagaatgatgatgatagcagacatcctcttagtgttaccaattttagtgggaaaacattcagtctttcacagtgaaggatgtttgctttataggtttcttgtaaatgccctttatcaagttgaggaagttcccctctattcctagtttgctgagaatttttttaagcttaaatttctatttgatttctatttgtaattataaattcacatgcagttgtaataactaatatagagagagctcttatgcactttggcagtttccctcaatggtaacatataaaactagaatacaatatcacaaccaggaaattgacattgataaaatctattaatcaagattttgtcagttttactttgtgtgtgtgtgtgtgtgtgtgtgtgtgtgttaaagttctatacattttttttttacctgggttgattcatgcatctaccaccacagttgagatacagaatagttcatcaacacaggattcctcatcttggcattttataatcacacccacttccctccgcctacctctgcctatgcttaacacctggcaaccactaatctgtcttccattttgaaaattttgtcatttcaaatatgttaaataaatggagtttatagtaaataatcttttggggttggagtgttttcacttggcataattctgtggagattcattgaggttgttgtatgtatcaacaatcctttccttttaattgcagggtaatattccatggtatggatgtacagattgagtatccttaaccccagaatcagaaatctgaaatgttccaagatcggaaacttttgagtgctgacatgacactcaaaggaaatgctcattggaacatttgggattttcagattagggatgctgaatccctaatgtgaataaaccagaatagtgcaaatatgctagaatctgaaaaaatccaaaatttgaaacacttctggtcccatgcattttggataaggaatacgcaacctgtaccacagttgtatttgtattgttttttttttttttttattgaaatggagtcttgttttgtcacccaggctagagggcagtggcatgatcttgactcactgcaacctccgcctcccaggttcaagtgattctcctgcttcagcctccggagtagctgggattacaggcaagcgccaccacacccggctaatttttgtatttatagtagagacgaggtttcaccatgttggccaggctggtctcgaactcctgacctcaggtgatccacccacctcggcctcccaaagtgctgggattacaggtgtgagccaccgcgcctggcctgtaccacagtttgtttaaccatttatttgttaaagcaaatctgggccgattcctgatttcagttgttacaattaaagctggtggtgaatatttatatatacgtttttatatgaatttatgttttcatttctttgcaataaatgccaggagtgcattttgcagttcatatgatggttacacatttatttttattaaattaattaaactacatttacattttattttattttgggtagagacagagcctcactgtgttggccaggcttgttatgaactcctgacctcaggtaatcctcctgccttgtcctctggaggcccttggattacagacatgaatcactgcacctggtttgcattttttttttttttttactccattggactctatcagtgcttttatttatttattggtatttatttatttatttattttaacttttaggttcagtggtacctgtgaaggtttgtcacataggtaaggtagcatcactggggtttattgtttagattatttcatcacttaggtattaagcccagtacctaatagttatcttgtctactcttacatgttcatttttttaaaagaaactcctgaactgttatccagagtggttgtactgttttatattcccacagcaatgtatgagtgatccagtttctccacatccttgccaacactgggtgttaatactatttttaaattttagccatttgatatttatggtatctcattgtggttttaatttgcatttacttaatgagtaataaattctttttaaatagaaacaggatattgctctgttgcccaggctggagtgcagtggtgcaattatagctcactgcagcctcaaactcctaggctcaagtgatcctcctgcctcagcctctcgagtagctgagactgcctcagcctgtcgagtagccaagactacaggcacatgccaccatacccagctaattttttaatgttctgtagagacggggtctggctctgttgcccatgctggtctcagactcctggcctcaagcgatcttcccaccatggcctcccaaagtatttagattacaggcatcagccactgcatctggctggtaataaaacattaaacatctttattgaaatataatttacatgccatacaattaacccatttaaagtataaaattcagtggtttttagtatattgaatatttacacatatgtacaaccatcaccaccatcaattttaaaatatttttatcacctcaaaaagaaactccataccctttagctatcaccccctagctctaagaaatcactaatctagtttcttgttttgagttttttatttttatttttatttttattttttttttgagacagagtctcgttctgttgcccaggctggagtgcagtggctattttggcttactgcaacctctgcctcccaggttcaaatgatttttgtgccttggcctcccaagtagctgggattataggcgtgcgccaccacacctggctaatttttgtattttttagtagagacagggttttgccatgttggccgggctggtctcaaactcctggcctcaagtcatctgcccacctcaggttcccaaagtcctgggattgcaggcgtgagccactgcgcctggcctatttccctattttggactttcatatgaatggcatcatataatacgtgtttttgtggctgatttctttcatttagcgtaatgtattcaagatatctgttgtaacatgtcttagtactccattcctttttatggccacataatattccattatatgtgtataccatatttgtttatccatttatccattgatggacatttgtcttgttcccatgttttggctgttaggaataatgcggctgtaaatattggtgtacagttttttgtgtgtagccatatatttttgtttatcttgtgtatatacctaggaatctaattgctggatttatatggtaactatgttaaattgtttgaggaaatgtcaaactgttttccaaagtagagatactattttacttttccaccaggagtatataaagattgtgagttcttcacgtccatgccaaccattgttaataacagactttttgattctagccattctagtgcatgtgaagtagtatctcattgtgattttagttttcaactgcctgaagggtaatgatgttgaacatcatttcatgtgcttatttgtagtttgtatatattccttggagaaacttctattcaaaccctctgtccagtctttttctttttgacagggtcctgctctgtttcccaggctggagtgcagtggcatgatctcagctcacagcaccctcaacctccctggctcaaatgatcttcccacctcagcctcccgagtagctaagactatgggtgtgtgccacagtgcccagctaatttttgtttattttttatagagatggggtcttaatttgttgaccaagctggtcttgaactcttgtgcttaagcaattcacccgcctcggcctcccaaagtgctgggattacaggcgtgagccaccgtgcccagcccctttgcccatttttaaaatgggtatttatgctttcattgttgatttgtaagaattctttatatattctaaattttttattgtaaaatatgcataacataaaaattgccattttaactaattttaaatgtacagtcctgtaacgttaagtaaaattgttgtgcattcaccaccaccatccatgtctagtactttttcatcttccccaagtgaaactctgtacccatcacatactaactccccaatcttccctctccttagccttgcaaacaccattctacattctcttcctaggaatttgactactctaggaacttcatatacgtataatcctacaatatttgtccttctgacatattttacttagcacaatgtgttgaaggttatccatgttgtagtatatctcaaaatttcatttcttttgaagtctgaataccattccattgtatgtatataccacattttgtttatctattcatatttcaatggacacttggataagatatataatttggaaatattttcccctattctttgagttgtctttatttatttttagagacagggttttgctctgttgctcaggctggggtgcagtggcaagatcatagttcactgcagccttgaactcctgggtacaagcaatccttccatctcagcctcccaagtagatgagactatagttgtgtgccaccatgtctggctagtatttttttttttttattttttagagatgaggtcttaccatgtagcccaggctgagcttgaactcctggcctcaggcgatccaccttggcctcacaagtagctgggattacaggcgtgagacactgcacccagttgggttgtctttaattgaagcacaagttactaattttgatgaacttttatttatctgtttttccttttgttgctcattcttttggtgtctttaagaatccattaccaaattgaaggtaatgaagatttacccccatgttttcttctaaaagttttatagatttagttcttaaatttaggtctttgatctactttgagttaatgttttgtatatgttgcgaagtaggggtccagcttcattttttgtaggtttctaaccagttgtctcagcaccatttattgaaagacaattctttcttcattgaatggtcttgccacccttgtcagaaatcagtgggactgttgggcatggtggctcatgtctgtaatcccagcactttgggaggccgaggtgggaggggtactcgggcccaggagttccagaccagcctggacaacacagtgagactccatctctattaaaaaaaaaaaaagccaggcgtagtggtgtgtgcctgtagtcccagctacttaggaggctgaggcagaaggatcacttgagcccaggagactgaggctgcagtgagccatgattgtaccactgcaccctagcctgggtgacagagtgagatcctgtctccaaaaaaaaaattaaaaaaaaaatcagctggtcatagatatatgggtttatttctggactcttaattctgtttgtccttttaccagtactccacggtcttgattgcattgttttacagttttgtgcaaagttgcaccaaagttgttgtgtagttttgcaaaactggcaatcaagtctgtgcagtactggcaaaattaggaagtgtgagtcttcatacttttcatttttcaaaattatctgcctattctgaatgttttcaattccctatgaattttaactctttgttttttcttggtagagatgaggtttcactatgtttctgaggctgttcttaaacttctgtcctcaagtgatccttccaccttggcctcccaaagtgctgggattataggtctgagccaccatgcctggtccatatgaattttggaatgagcttgtcaatttttacaaagaagtcagctgggattctgacagagattgcagcgtgtctgtagattagtttgtggagtattggtgatggcagcggtgggccgtctggagtggctgctgccatcacactggctgcagcagggagacgtggccagggctgcacggtctatagagttggtgggagccaggggcaagcaggagccctgccccttccaagttggagctccctgggtcctgctgcagctgcctaagcatggctgtagacctgggcatccctgtgctcttgagtcttgggagcaggctggagccccaccctcccaggtgcaactgcagctggccaaaccgtggctgcagtcccaggcctctcattccatggagcaggcaggagacccaccctcccgggtgcagctgcagtctcccaaactgcggctacagaaccttgccttctgctccacgagcaggcaggagccctgggtgcagcaggagccccgggtgcagccgcagccacccaaaccatggctgcagatctggtcctcctgctttatggagcaggctggagtcccaccctcctgggcacagctatagctgcccaaattgtgggtatagacctgggcctcctgctttatggggcaggcaggagccctgccccactgggtgcagctgcagccacccaaatcatgggggggctgcagacccaggtgtctctgcactcttggggcctgggaaggccccccttgctctcataggcttgggagtgcctgctcctgctgcctggcttcaccctgctattggcacctgctctgatcttgtggcaaagttggggccgagcctgggtgctgtcgtagcctggccaggtatccacatgcttggggaactgctgacatgccagccttctgctgccttgaccccctctggactttgggtactgacaaacatagggaagctgaggcagggctgagggcagttcagcactggcctgcaggtgcccccttgcatctacagcctgggcaccatgaatggcagcaggaggtagacaggttcctcagtggaaggtggcaggtccctggtgaggacccaccttcaggccagggaaagcctgaaggctggaggttgggctgccagttgcatggatcagagtgggaacttgtggtgccttttctgggcctgcctgtggaccaattggcatgcacatcctcccctctgaggcccataaaaaccccaggctcagccagagctgaacagatgtcaggatgaccagctgcagagaggagcaacccactctagggcctcctctctgctgtgagctgcagaggtgacaagatgaccttcctgcaaagaggtgccacacattctagggcctcctctttgctgagagctgcagagacgatgggtcgactttcctgcagagaggtactactcatactagggcctcctctctactgagagctgcagagacgaaggagagatgatggggagatgatgggatgacctgcctgcaaagagaagccacccactctcaggcctcctctctcctgagagctgtgcagatgacgggataatcagctgctgagaggagctaccctctctgctgatagctgaacacttgtagtaacgacttgcctagcagagaagaaccaccctctctgctaggagctgaacacttgtagtaatgacttgcctagcagagaagaaccaccctctctgctaggagctgaacacttgttgggataccttgactgtggaaaggagctgccccctttgggtttcctctgagctgttctattgctcaataaagcccctctttatcttgcttactctccacttttctatgcacctcattcttcttgggtgcaggacaagaacttgggacctgccagatgaggctaaaatagctgtaacacaaacagggctgagacatgccccttgctcaccttgttgcaggtgaagagaaggaaagaagagctgcagccctctggggagcccagacctgggagctccccaagccagggctgtgactccctctttggggccctgcctgcggttcctggtgtctccaaacttctgggtgccaccgtgttccctggtgccagctgtggatgctgcttgtggtgttcatggtccagctgcagcctcacagagaaagagctgatgcccatgctggcacctggagctgcgtgccctgctgcagctgccaggatgtctgattgcgcagtgaccggaccccacacttgctcacataccccttgctgcttcatccagtcttccttggctatcataggacacaggccagtagcatgagccgagtgtagccggccaggccaaataggcgggacaagcccagcaggcctgagcaaaactctggcacaggtgccaccagccgcagatgtttctggccagaaaagtgacaccccaaagattctgtaacactggcatcataagaatgataaatcttatggcttggcctggtggctgaaggaattgtgtactttaaatgggtaaattatatggtgtgtaaattgtatctcaaggatgtttaatgttttatcactggcgaggtgcggtgacttatgcctgtaattccagcactttgggaggctgaggtgggaggattacttgaggacaggaatttgagaccagcctgggaaacatagccagaacccatctctacaaaacatttaaaaatcagccaggcatggtggcatgtgcctgtagtgccagctaatcaggatactgaggcaggaggatcacttgagcccaggaatttgaggcggcagtgagctataattgcaccactgcactccagcctgggcaatagggtgagactctgtccctagtaaaaaaaaaatgttatcttctaattcatgaacatgaagtgtttttccattgatttaggtctttaatttctttcaatagcgttttataattttcagagtatgttttgtacttctttttttttcaaattatttccttctaattctgttataaatggaattcttttcttaatttcattttgagattattcattgcaagtgtatagacataacattgatttttgtttattgtccttgtacccatcaatcttcctgaactaattttattcccatagttcttttattattattattattattttttgagatagtcttgctctgttccccaggctggggtgcagtggtgcgatcttggctcactgcaacctctgcctcccaggttcaagcaattctcttgcctcggcttaccgagtagctgggattacaggcacctgccaccacgcccagctaatttttgtatttttagtagagacagggttttgccatgttggccaggctggtcttgaactcctgacctctggtgatccgcctgcctcggcctcccaaagttttgggattacaggcgtgagccactgcgcccagcctattccaataattctttagtggattccttaggatcttctatgtatgagataatgtcacattctaataaggatagttttattttttatttttttttgagacagagtctcgctttgttgaccagggtggagtgcagtggcatgacctcagctcactgcaacctctaccccctgggttcaagtgactttcctacctcagcatccctaggagctgggattacagggatgcgccaccacacccggcaaatttctgtacttttagtagagatggggttttgccatgttggctaggctggtcttgaactccggacctcgggtgatccacccgcctcagcctcccaaagtgctgggattacaggcatcagccaccgcgcctggccctctaataggaatagtttcataccttcattttaaatactgatgactttcaatttttttttttaacatgcatgctctgagtagaatccgtagtgcaaagttgaatagaaatggtgagagcagatttccttgccttgttcctgatcttaagggtttcggaaagcattcagtctgtcgccattaagtatgatattacctacctgtgggtttttgtagattttaaaatttcctttcttccttaatttattagaaaaaagatttttttttttttttgagacggagttttgctcttgttgcccaggctggagtgcaatggcacaatctcggctcactgcagcctccacctcctggattcaagtgattttcctgtctcagcctcccgagtagctaggattgcaggtgcatgccaccacgcccagctaatttttgtatttttagtagcaacagggtttcatcatattggtcaagctggtctcgaactcctgacctcaggtgatctgcccacctcagcctcccaaagtgctaggattacaggtgtgagccaccacacctggccagaaaaaaaagatatttttaaagagctgttttaggttcatagcaaaattgagcaaaaagtacagtgagttcccatatgtccctgcttccacacatgcacagcatctcccactatcagcattccgtaagagagttgtacatttgttatataacgttgatgaacctacattgacatgtcattattaccccaaatgcatagtttatgttaaggttcactcttggtgttatacattttaaagatttttgacaaatatataatgacctgcattcaccattgtggtatcatacagaatagtttcactgccctaaaaagattcctgtgctgtgcctgtttcttcatccctttctcccctgtgagcactggcagccactgatctttttactttctccatagttttgcctttttcagattgtcatagttgtaatcatatgtatgtaacctttccagactggcttctttcacatagtaatctgcatttgtttcctccatgtctctttgtagcttgatagctaatttatttctagtgctgaataatattccattgtctggatgtactacagtttgtttatccattcatcttctaaaggacatcttggttgcttctaagttttggcagttatgaataaagctgcttataaagatatttatataagtaaatgaagatgtttacataaaataaagacatttataaatatctccatgcaggttattttgtggatgtatgttttcagcttctttggataaataccaaggagtgtgattgctgctttatatatggtatgcttagttttgtaagaaattgctgaactgttttcctgagtggctgtatcattttgcattcccaccagcaataaatgatagtttcttttgctccatatgcttctcagcagttttgatgtagtcagtgttctggattttggctattctaataggcatgcaggggtatattgttttaatttgcaattccctaatgacatgttgagcattttttcatgtgcttatttgcgtctgtatatcttttttggtgaggtgtctgttcacatatttctttttttttccttgctttaaaatcatgttgtttgttttattgttgagttttaagcattctttgtatagtttggataattgtcttttatcagatgtgtactttgtgaagattttctcccagtctctagcctgtcttctgatttgaagttttctaatatttttgtggacttttgcatctatattcataagtgatacttgcctgtagttttctctatttgtgatatattttttatatcagggcaatactgttttcataaaatgagttgggaaatgttgcctccttttctgttttttagaagagtttgtgaaggattggtattagtccttttttaaatgtttgttataattaagtggtgagaacatttgggccttttctttatgggtagctttttttattgctaatttaatctcatcaattgttacaggtctgttcacacctgtttcttcttgagtcagttttagtagtttgtgttttggaatttgttcatttcatgtaagttatttagttttttggcacacagttgttcatagtattcctttataatccgtttatttcagtaagattagtagtaatgtcctctttttcatttctgattctagtaacttgagtcttgtttcttttttttcttggtcagtctaccctaaagtttgttcatcttttcttcccccacaggtaagttgttacacaatccctagcagattccaactttcatggccaaggtcctctttgatcatctttttaaaaaattagtttttggccaggtgcctgtggctcacgcctgcaatctcagcactttgggaggccaaggtgggcagaccacttgaacccaggagttagagaccaggctgggcaacatgacaaaaccccatctccacaaaaaattagccaggtgtggtggtgcgcgcctgtagtcccagctacctgggaggcttagaggggaggatcacctgaacccgggaggttgaggctaaagtgaaccatgatagcacctctgcactccagtatggacaatggagtgagaccctatctctaaaaaaaaaggaggaaaaggaaaagaactactctttggttttattgattttttttttctattgcttttctatttcctatttcattagtttcatgaatttctgccataatctttattatttccttctccttgattttggtttagtttgctcttattttcccagtattttatggtaaaatgaaatatactttattggtagtatgttttttatttttagtgtaatagtttaaattttcttctgctgggaaatgtcttgcaatatttataaactacaacaggaaatgtttttataccaaagtaatctttacagagatttcatgctttataaggaggggttagtatgcaaaaggagagtgattctagtgaaagaacacttctaggaatattttaatgtgagtagtatgttaacaatactgccagacttcatagtgtgagaatgggtttgtggagttataggtattgatgttctgtttgataatgcatcgaagagataaataatgttctttatttcttcttttttagataaaatcagtggttctggaagtaactctgatatgatggaaaacagcaaggaagaggtaaggataattatttagagatatttgttagttacgattaaccaagtagagcatatgtctttagattgcttctggacacatgtatgtgtcgaaggctactgatacccagttgtcattatacttcagtttcgttgttttccagtttgagaacaggtgttcattgtttctgttattgttgtggttcacttcagtggtttacctaaagtcagacaactgaagacttccaacagatagatattaaactgtctttatattgccccaaaggtgtttgaggtggatgttaagggcatgaactccatggttgtgaaatctctcaaaacttggtatctagagtctgctaagcattattatagcaactcataacaaggtcctttgcctgatacacaggtccacaactgtggttttgggaattttttgacctactgtaaaaaaaaactgaatccagtaaaatatattgattatactggcaaaatgagggtaagtttagtatctcaaagcaagttgtagaagttacttcatgccatatgttagcttagagaagaatgaaacatatttagatccttgaaactccctacttctcttgagatctgattacttctgcatctttgttttgtctttgttgactggggccatgatcattttgcagcagtgtattccccgcagcatgccacagcaaccatgtaaaaaacgagaaatttaatcttcagccaaggaaacctggcagtaaatgagaattagttttaatttttatttttttgcatctgtgttccttatgtggtagagaattagtttttgaagttccttttagaaaaatattctaggcacataaatagcatctcattatatcactgtattgaagttgctatagggaaatagctaattgtagggatgccgtttcgagaattttattcacttttatatttatgtctcacatctagggaactagctcttcagaaaaatccaagtcttcaggatcgtcacgatcaaagaggttggttgatgttgaagggacaaaaagttattttctttttcaggttattttctgtttctaaaaccatgtttttttctgaactcatgtcaaccactattctgagttaactattctatacaaatatacatatttgaaaatgattagcataatataatgaatccctttgtatctatcacctgatttcaacaattattattcattctaactttgaattctaaagggtttttaaggatttattatatattagtggcccttgcaatatgtagtttatttcattagacaatatatgtccttgaaaaaggacaaaataattgttgaatgcctatgaggcagtgggttttttgggttatatgaaattgtctaggatgggaagttagtcatcatagttgtaagttataaggagaaaaaagagtggtaaaaaacacttttttctgctaaattgtcaactcaagtcatacataaaaactgaaacttttctaacataatgtagtacccaatatactatgcagtataattgttattagaagtttgccgcttagtctattggactttcattgtttctaaccagtgggaatgtctcttaaaaaccaagcttgtttgatattaatttattctctgaagtagtgattcttaaagaagagtgtcctccagggtctccctggtagctttttcagaatgcgtatgccttggtcctgctccagacctactgaatcataatcttcagtgatatggtatagacatacatgcttccctaggtgattctgatgtgcttccttgttgagacccactgctcaatctcaacatgttatttatgttctttgggtattgttccagttgtcagaaacattcataattctatgaacttaattctttcataggaaaccttcaattgtaacaaagtatgtagaatcagatgatgaaaaacctttggatgatgaaactgtaaatgaagatgcgtctaatgaaaattcagaaaatgatattactatgcagagcttgccaaaaggtaatgtgtgttaatttttcatgaagttaaagttgaaatgaatttttaaacatcatttttataaaattggaacttgattactgttaactatgtacaaacgaccaaacatggcattttcctagtggttgtctagaaatatatttgtatgccaatgataatatgtgttattgaagttaaaaatttggaatattcagttggttttgtaaagaatgaaatctatttttttctttcctttgagttttagacaaggggctttagtttccaaattatacttcagtgtgtaagcaggtttaaaaatttaatatattaggttttggttcagtcaatgttaatgtgcttgctttatacaaaaatgtaatgactgttcctgaaaacttaaaaatcatgtacagtctagtttagtcttattgcattcttaaattccctaaggctaaaagctgaagttaactatcatagatagatttagttgtatttcttgctgttatcttttttaaaaaactttgtcacatacctctcaactgttgaagttctaaccataaaaccttgttaataagaatagggaacaatagccaaatgaatatcttggactcttcatagctcaagtctgagagcaatataattggatgatgagaatgacagggaacttggttcaaagagtcaaattttagattttttttctttgttaaataatatgttgtagtctcttggcacatttttcaaattcattctcatagatcttttacagcagtgcttattaaaccttgttccctgtctatgtttttatgacatattttcaaattatggaagtttaaaaaatacagtaggtaggagggatgggactttccttgactaggataaattagaagttacaaaaggtgataaatgaaatgaggaaaggaaattaatgaaagaagagagataggggcctaccgcttacttagttttgcaaatcatttatgacaattttatgtaatggttttggtggccaagggcagaaacaactaacatgggagtctaagtcccataggtggtgacttactttggatttttacattctcagtggttgtcactgggagtgtttatgatgtaagaaataggaattcaaacttttgttttaattgtactgtggaagaaagtcagcatatgatgttactaacctgaactatgcctaattctgtcagaccaaaacaaaaacagacccgtttcataaggttaaatttgggtgtttatattattgttgtaatatttattgagtatgtataagtaccaggctcttacagaattaactcctttaatcctcaaaacaacactgtaaggtagttattattttgcttgtagagataaaggaacaaattcagaacccaaggaactttttcagctttaaattgagaagctaagatttcaacccaggtctgcttgaatccaaagcctagtgagtgctcttttcactctgctgctttgcttccaattctccctagaagaaatctagggagaattcagtttttttttttttttgtcgttgttgttaatttaaaatctttagttcttttcaaatgctggggcttctctgagtgtctacatgcaatgattgctgtgaataacttttttttggtggggattatttaattttactacaatctgtaaaatctcaatcatctgtgtcctccccccccccaccctttcagagactcagaaactcatttaacaactagatgctataacttgtcaaaatttgcttgttgaataacatagagccatatttcagagaaagcccctggtgactacctgcttttttttccttaattgttgccaatgatagccagttactaagcccagcaatgtaggtaaacattgaaacctaaaccctttttactatgcctgtcttatttgctcttgagagaactaatgaaaacttaaattgacagcctctctcttcaattcacatgttttatagttaaggaaggacattctttctaaaatattaacatagggatcaacaaatgatctcattctacaatttattgttagggtacttcagctaaagtatcttaatctgttaaaactctttaaggactttacagagtagtgaaactttgacataccagttgggaaatgctgcagtatagatacaggagtaatagaatgaacttcatttcccccaccaatacccctcccttgcaatataaaactacccttaaaaatctttctgagtttatgatttggattatgaaaataggatgtctttaaaaattttttccctctgaaccacacatattttatgaattctttatggaacttagcatagatgttcatattcataacagcttttgtgataggcactataaaaattcagaactgggttgaggctttctgtttgattcacacatttgttttgtaatcactccataatacctccctttcctgtttttatgaactatatttcaacaaataaactgttgacacctggcccttttactatttccctgttttatttacttttgtgaggtccttacaccaatatctaaagcttgaaagaaacaaactatgtaccagcaatgttggctttatctgaactgaagtcttgtacttcacttgcacatttaatatgtgtaatggttttttaaatgaaatcattctaggtacagtgattgtacagccagagccagtgctgaatgaagacaaagatgattttaaagggcctgaatttagaagcagaagtaaaatgaaaactgaaaatctcaaaaaacgcggaggtaaatacaagtgaaaatgaaacatgaatttaaattgctgtttatgaccatattggaaaatcggatgtgcttactaaaaatacctccacttttctgccttttgtttattaaaagcactacttaaatataacttctgtttctctctgagctctgaagcagaaaaggttaagcaccatttatcgaaacacctttgccttcagtggctattaagttatctcaagaagcgtagcatttccttcttccacatgttctataatacatatatgccataatactatgttttccccccaaccctaaaataattttagattcatgcaaaatcttgtctgtggcctacaggtaactttatatatatttagagttggatagagtgacgtacatctgcattagtattagttggggtattataaatgcaagtcccttgactccactcctcacaaattagaatttctgttgatgaggtcaagaatgtactccagtttgttcttgtgtacactgaagtttcaaatccactaatctaagaatggcaacatggacataagtaggaaggagtagggagctagagctgataaccctccctctgtcttccagaggcacctctccctttgtctgtctatcttcccttaaacacacaaacggtggggagtggtggctcacacctgtaataccagcactttaggaagccaaggcaggagaattacttgagtcctggagttcgagaccagcttgggcaatatggtgagaccccatatctacaaaaaataaaaatatcagctggacatagcggcgcatgcctgtagtcctagctattctggaggctgaggtgggaggatcacttgagcccaggtgatcgaggctgcagtgagccgtgattgcaccactgcactgcagcctggatgacagagtgagaccctgtctcaaaaaaattaaaacacacacacacacacacacacacacacacacacacacacacacactctaatattggctaaccatctataaaaagtttgcatcagaaggattcatttagaaataatagtggactatgtgtcccacttgtttgtgtgtgattcttaaatggtgcctatatatattttggggcagcttaataaagccagaattcataactataaaaggaatgaatctccaaatgatagaacatgacactaaatttctaagtagaagtgtagtgaaagcatatccatttaatattgatcagattatataattgtgaaattatagtgaagttcttatattggtgaaattttgtgtggatttttattttaatgctatgattatcttgctggaaccagtaaaatatatctatttttataacatattttatatattcattttccgattaaataatttgtaaggttgttggcaaaaataaaggaaatattatatagtcttttgtccacaaaggggtagtcaactccttttgagcataaggaatctttctgagaatctagttcatggtagggaaactgccattgcagcaacagagctcattaaagctaaggtagtagtcttaaaatttaagagaatcctcaattataaagtgatggtaaagatcagtagtaagagtttctttcctctgatcataggttctctagagaagacaaataactaagtgttctgcattgtgtacacttagtgtacagagtgtctaaatggtgttatttttgggaagggaccctgtagcagtcagtgtctgaaatgtggataagggctgaaagaataaaagaaccactgttgttgacgagggtattcctagtgccactttggtatgctgctgacatttggtctcagctgataagtttcaggaacattttattgaatgatctgtgtaggaatgttttggtatcacgcttaagggaatacatgcatttatagccatcagtagcacttaaatctttcacatctattttcatcttaatgatttgttacatttttaagctgtcagaaatcacacaggaaatttaacactaggtttactttatatacacatatatagataaattggtgatctgaaatactgaattggtgtagttaatatttaaactttttaagaaagctggttccaaattgaagcctaacttaggaaactgtcaagaatgtaaactttcttgtattacaagaaatgtaagacattacaagaatgtaagacaatatataaagtcttatattgatttggaataatattataacacaaagatacggttaaagttaacatttcaggagctgattttttaaaaaattttcagtatcataccctattttgacattctcttcccagtttaattgttagaaagtatattttacacctaacttttttacatgacacaataattttgttctatttaaaaccattaaaatctattgagctcagaaatgaaaatgcctcttttccatttataccctgtgttacaattttaaatatatttcataattaaaaataaaaaatttaaacatgtatacagcaacaagtacataaagtaacatttcaacattttaccatatttgcttcagatctcacttaagtaaaatattggttcagtcctactctcatccatttccccttcttcccaccccacaggtaatgattatattgaagttttatgcatgtgcatgtgtgtgcatgtttttctatgttttttatatatgtattcataaaacatttttcatttaaaagtataacaaaataatatgctgtatatatcatttgggaacgtttttcatttaacattgtttttgaattgtattcatgtcagtaaatgtacatctagtttgtttatttttcactgctctatagaattatgttatatcaataagccactattcatttcccacataggaagttattcccaatttttcattttctaattttctaattagtgctgtggtgaatatccttatatttgattccttgtgcacatgtgggagaaaatctccaaagaattacctagttttgtttaattcttgagcgatgtatgcaccaaagcacatagaagatacttagtaagtattacttaacactggatgaacattcagattctacattttatttatcttgttagtttatctgaatgaaatcattgtttgaaatgaaaaagtatggtgtggtgtatttgtttctgttaaaacaaatacagaatatatgaatacccaagatcaaactggtgtttgtaaataatgtgattataatacattaggcttgtaatgcctgctattaggtaggttgagataggaggattgcttgaactcaggcgtttgaggctacagtgatttataattgtgccattgtactccagtctgggtgatggattgagaccccatctttaaaattaaaaaaataaataaataaaaatattagcaacataaatagtaaaccttcaagtttacttttctaaaaaagtatgatggtgttcttatacattaacgtttttagcttctggctaggtgtggtggctcacacctgtaatcccagcattttgggaggctgatgccagaagattgcttgagcccaggagttggagaccagcctgggcaacacagtgagacccagtctttaaaaagaattagctgggtgtagtggtgtatgcctatagtcccagctactcaggaggctgaggtaggaggattgcttgagcctgggaggtagaggctgcagtgagctgaatttgcaccattgcattccagcctaggtgacagagtgagactctagctcttaaaaatttttttaaagtttctacaaataaaaatattcatgataatatttgggtccatggcgctttggaccttaaacctaacagaaacccaaaagagaaaattaaaagggtgaaaaatatatgtgatgttttgttttttatttaaggatggagccaatttgttttttagttgtctcctttttatttgtgaatgtaagcattttgagtgacttctgaattataatctaccatcttattttgatcaaggtcttggttgcacatcaggatcatctttgaaactttaagaaaatgcctgagagattttaattcagtggtttaggggtgggaatggctgtttttaaaaagattcttcagatgactctaatgtttagctcagggtgtgaaacactgccttagcagaactagggacaagagggaggctggagaggtttctgtaggttttcttcagtctgtttatcaggagacagtacagaatgggactctgcctttttcccccagtcgttctgatgttttgctgccaaaatagatatacctgcaatgtcttgtttgtctttatttggaaatagtagacagtattgatatggagtggatagtggagtacacatagaaaaaaggcagtttaatgacaatttatgtatagtgttgaagtaaatattagcaaggaaattggtaatatcataaaattaccaagtttttacataccatattgataggatctgtgcagacaattccaatgagaataaaaacctttatggcatacttaagtgtaggattgcaaaagaatctgttccgtatatgttacttacttccccattctttaaggactgatactgaatttatttgcaaagcaataacaaaataagagctcttggcccctagttttagaactttttatgggttctcttaatgttatttcaagttgtaaaaaatggcatttgcatctgtaaaaggaaacaattaggatttgtaacttggaatttgccaaggttgtcatgtgcttagtaagtcgataaaatattaaccttttttacttgtgtccaatatgccatttttctaaggattatgaggtatttcatgtctaatacaaaagttacaaaatgctgactaaagtaagtatctttttctgtgtataaatgtgtgaataatagccactcctttctcctagaagatgggcttcatgggattgtgagctgcactgcttgtggacaacaggtcaatcattttcaaaaagattccatttatagacacccttcattgcaagttcttatttgtaaggtatgtaatgatctgttgatatttcataccgtaaatatttgaatgcttaccatataccaggcctttgagggcacagtcttgaagaaagatgaaaatggtatctgcccttggaagacttctactatagtggggaaaatagacgtacaaagcctaagtgtcatgataggggagatactgtgattatgggagcacaccggaagcctgtgtaaataggatttggatggctttctagtggaaagctgtatgtgaaatatgaataagaatcagcctggtaagtgagattggttcatcatgttctgggaagaggcaacatagtattcagatactggtagttgagggagagcttggtgtgtttgaaaatctcaagagtggatgtgtgtaatgtttgtgttttataatctttccccttatatatcctacttccccaaatgtaaactatctatgtggagcagggttttgacataacttggagatgatagaattaaaaatgttttttatgtgttgattataattttaacagtctgtgccacttttttgttagtaataccttggagttaattttaaatatctataaatgtgggcctggcatggtggctcatgcttgtaatcctagcactttgggatgctgaggcaggtggatctcctgaggtcaggagttcgagaccagcctggctaacatggtgaaaccccgtgtctactaaaaatacaaaaaattagccgggcatggtggcgggtccctgtaatcccagctacttgggagactgaggcaggagaatcgcttgaacccgggaggtggaggttgcagcgagtcgagatcgcgccattgtactccagcctggacaacaagagggaaatttcgtctcagtaactacctacctacctataaatgtcaaggttatggttttcttaactcatattcctgctaagattaatcctatgttagtttgtttcccaataaaaagctgcctttgaaatgcagtggcaggccatgttttccttggaattctagctctagatcttttcttgcatgaatttttgatagattcagacatgcttaaatgaactgtactttgttctttagcaatttgtatccctcctttccttgaattcagttcagccaggggcctatctagggtatgtattagagagtttcattttaaattgtgacagtagaatctaatattgctggatttgtgacatgtatttgcctttctgttttcttatctatgtgattgtcttttttcaagaaccagtctgttgagcctaggccatttcactaatcggtagtttgtatcagtgagcaccttttccctttctgcagtcccactggaaagactttgaagtcagtcaaacttggatttgaataacagctttgcctcttactagttgtatgactttagatttatttacatattaatgaaagttagccttttctctcataatatgtcctaccttgcatggtaggtatttggtatttaaagataatatagattaattgtttagctgtatacatagtagctgtttgtatatggtggctattaaaattgttaagtacccaaatctaatacatttttatgtagagctttagtagctagatgtatgagaccagaaattagctttactaaaatcttttgtaaacttttttttttttttttttttttttttgagacggagtcttgctctgtcgcccaggctggagtacagtggcgcgatcttggctcacgacaacgtccacctcctgggtcaagtgattctcctgcctcagcctctcgagtagctgggattacaggtgtccactaccacacctggctaatttttgtatttttagtagagacggggttttaccctgttggccaggctggtcttgaactcctgacctcaagtgatccacccatctcagcctcccaaagtgctgggattacaggcatgagccaccaaacacccagccaaaaatcttttatacacttttaaataaggaatagtggtacttgagtgtatggaaatctgtttcaaggcattaattcttgagatagttagatgtctggaaaatacagacattgggtagtgggtagcagtgtttattttatttatttatttatttttgaggcggagtgtcactctgttgcccaggctggagtgcaatggcgtgatcttggctcactgcaacctccgcctcagggttcaagtgagtctcctgcctcaacctttagaatagctgggattacaggcgcttgccaccacgcccggctaatttttgtatttttagtagagactgggtttcgccatgttggccaggctggtcttgaactcctgacctcaggtgatccaccctcctcgtcctcccagagtgctgggattataggcatgagccactgtacccggctgcagtagtgcagtgtttttgctttgagtctctgaaacatgcacacatactcccttttttaaaaaaaaattgtttgtatttttaaaatttttgtgggttcatggtaggtgtatatatttatggcatacatgagatgttttaatactggcgtgcaatgtaaaataagcacattgtggaaaatggggtatccatcccctcaagcatttatcctttgagttacaagcaatctaattacattctttaagttatttaaaaatgtacaattaagttgctattgactgtagtcaccctattgtgctattaaatagtaggtcttattctttgtatttttttgtactcattaaccatccccacctcctccctatcccctcactacctttcccagcttcttgtaactgtccttcatgacatccttcattagttcatccatgagttcaattgttttgatttttagatcccacttataagtgacaacatgcagtgtttgtctttctgtgcctggcttatttcacttaacataatgatctccagttccttccatgttgttgcaaatgacaggatctcattcttttttatggctgaatagtactccattgtgtatatgtaccgcattttatttatttacttatctgttgatgggcacttaggttgcttccaaatctttgctattgtaaacagtggcccaacaatcataggagtgccagtatctctttgatatactcatttcctttcttttgtgtatatactcagcaggtggattgctggatcatacggtatctcaatttttagtttttttgaggaatctcccaactgttttctatagtgattgtactcatttacattcctaccaacagtatacaagggttcccttttctccacatccttgccagcatttgttattgcctgtcttttggatataagccattttaactggggtgagatgatatcttattatagttttgattaacatttctctgataatcaatgatggtgagcagcttttcatatgcctgtttgtcatttgtatgtcttctttggagaaatgtccagtctaatcttttgcccattttttgattggattatttgattttttcctatagaattgttggagctctttatatattgtggttattaatccattgtcagatgggcactttgcaaaatgttctcccattctgtgggttgtcttttcattttgttgattgtatcctttgctgtgcagaagctttttaacttgatgtgatctcatttgccaatttttgctttggttgcctgagcttgtgtaatatgctcaataaatctttgcccacaccagtgtcctggagattttccccagtgtttttaattacttaaaaaaataaagtttttgtcctttatgaatgttatcaatttcgaattaaatttccccttcctcttttcttttaatagaattgctttaagtattacatgagtgatgatattagccgtgactcagatggaatggatgaacaatgtaggtaggtaatatagatgagctaacattcagtgtttcctacttttgggaggaattgttacataatcatttatgaggtttgtctttcatagtatcgtcattgatgtctttaatgaaaggttgttcttttccataaaaccctggatttatgtctagtttaagtttctaataaagagtaagcagatgacctaaattaccactaaaattactggcagtaaaatttaaattgcattataacaaagagattaaaatgagttttgttgggaataatgtttatttttatttttttacatatcttttcagtttcctgaaagaagggaataatgttttaatctttaaaacatttcaggtggtgtgcggaaggtggaaacttgatttgttgtgacttttgccataatgctttctgcaagaaatgcattctacgcaaccttggtcgaaaggagttgtccacaataatggatgaaaacaaccaatggtattgctacatttgtcacccagagcctttgttggacttggtcactgcatgtaacagcgtatttgagaatttagaacagttgttgcagcaaaataagaagaagataaaagttgacagtgaaaagagtaataaagtatatgaacatacatccagattttctccaaagaagactagttcaaattgtaatggagaagaaaagaaattagatgattcctgttctggctctgtaacctactcttattccgcactaattgtgcccaaagagatgattaagaaggcaaaaaaactgattgagaccacagccaacatgaactccagttatgttaaatttttaaagcaggcaacagataattcagaaatcagttctgctacaaaattacgtcagcttaaggcttttaagtctgtgttggctgatattaagaaggctcatcttgcattggaagaagacttaaattccgagtttcgagcgatggatgctgtaaacaaagagaaaaataccaaagagcataaagtcatagatgctaagtttgaaacaaaagcacgaaaaggagaaaaaccttgtgctttggaaaagaaggatatttcaaagtcagaagctaaactttcaagaaaacaggtagatagtgagcacatgcatcagaatgttccaacagaggaacaaagaacaaataaaagtaccggtggtgaacataagaaatctgatagaaaagaagaacctcaatatgaacctgccaacacttctgaagatttagacatggatattgtgtctgttccttcctcagttccagaagacatttttgagaatcttgagactgctatggaagttcagagttcagttgatcatcaaggggatggcagcagtggaactgaacaagaagtggagagttcatctgtaaaattaaatatttcttcaaaagacaacagaggaggtattaaatcaaaaactacagctaaagtaacaaaagaattatatgttaaactcactcctgtttccctttctaattccccaattaaaggtgctgattgtcaggaagttccacaagataaagatggctataaaagttgtggtctgaaccccaagttagagaaatgtggacttggacaggaaaacagtgataatgagcatttggttgaaaatgaagtttcattacttttagaggaatctgatcttcgaagatccccacgtgtaaagactacacccttgaggcgaccgacagaaactaaccctgtaacatctaattcagatgaagaatgtaatgaaacagttaaggagaaacaaaaactatcagttccagtgagaaaaaaggataagcgtaattcttctgacagtgctatagataatcctaagcctaataaattgccaaaatctaagcaatcagagactgtggatcaaaattcagattctgatgaaatgctagcaatcctcaaagaggtgagcaggatgagtcacagttcttcttcagatactgatattaatgaaattcatacaaaccataagactttgtatgatttaaagactcaggcggggaaagatgataaaggaaaaaggaaacgaaaaagttctacatctggctcagattttgatactaaaaagggcaaatcagctaagagctctataatttctaaaaagaaacgacaaacccagtctgagtcttctaattatgactcagaattagaaaaagagataaagagcatgagtaaaattggtgctgccagaaccaccaaaaaaagaattccaaatacaaaagattttgactcttctgaagatgagaaacacagcaaaaaaggaatggataatcaagggcacaaaaatttgaagacctcacaagaaggatcatctgatgatgctgaaagaaaacaagagagagagactttctcttcagcagaaggcacagttgataaagacacgaccatcatggaattaagagatcgacttcctaagaagcagcaagcaagtgcttccactgatggtgtcgataagctttctgggaaagaggagagttttacttctttggaagttagaaaagttgctgaaactaaagaaaagagcaagcatctcaaaaccaaaacatgtaaaaaagtacaggatggcttatctgatattgcagagaaattcctaaagaaagaccagagcgatgaaacttctgaagatgataaaaagcagagcaaaaagggaactgaagaaaaaaagaaaccttcagactttaagaaaaaagtaattaaaatggaacaacagtatgaatcttcatctgatggcactgaaaagttacctgagcgagaagaaatttgtcattttcctaagggcataaaacaaattaagaatggaacaactgatggagaaaagaaaagtaaaaaaataagagataaaacttctaaaaagaaggatgaattatctgattatgctgagaagtcaacagggaaaggagatagttgtgactcttcagaggataaaaagagtaagaatggagcatatggtagagagaagaaaaggtgcaagttgcttggaaagagttcaaggaagagacaagattgttcatcatctgatactgagaaatattccatgaaagaagatggttgtaactcttctgataagagactgaaaagaatagaattgagggaaagaagaaatttaagttcaaagagaaatactaaggaaatacaaagtggctcatcatcatctgatgctgaggaaagttctgaagataataaaaagaagaagcaaagaacttcatctaaaaagaaggcagtcattgtcaaggagaaaaagagaaactccctaagaacaagcactaaaaggaagcaagctgacattacatcctcatcttcttctgatatagaagatgatgatcagaattctataggtgagggaagcagcgatgaacagaaaattaagcctgtgactgaaaatttagtgctgtcttcacatactggattttgccaatcttcaggtatgcaaaaataaataaaaaattcataatttgtacttccccctcttgagttactacattgtttaatttcctctgaagctaatcaaatttagggttactacttaggagaataccacttaaaaattatttaggagtttattaaaaaaagtttccctatttatttttatgctgccattggaagatattttgaacattgctagtattcagtatcagggatctcaaatttgttgagtaaatgacaaaatttctttatcaatgtttagtgcttttctctggagtaatgagcagaaggaaaagcggactggtgccagtggttcagtagctatttagttatataatggaagtgagtgcttggtactggtatgacatggtgtgtcaaaattttaactgccatgcatatggctttttaagtttgaacagataactttgtgtctcatgaaatcccctttaattatttttaatttacctcattaaaaccctttgttgatgcttattaactagtttctaatgacatgaacagatgtttttcttttaaaaacactgtcaaaatgaaggaagaaaatccaaacattagctggattagcctaccctgatgaggtagagtactaggaacattaaagtttgggtcagctggtgaatgaaaatatttttatgaattaattaaaatctttaaaatttatgaaaaataattttaaaaataagtttttattattgaagttattttaaaaatcagttgtataataaatgtgtattggtcatttgtctttttttttagtcagtaagacctgtcagttctatggatactcagaatttatttaaaaatgtttataaagtgggttttacataaaattgtatttccaacataggtagaatttaaaaatttttccttccagttcttatgttacagttttcaatttatcccaattggattttaatggaattaatttgaatcttggctattttttaaattttaatttttaattttgtagagatgaggtcttgctatgttacccaggctgatcttgaactcctggcatcaagcaatccttccacctcggccttccaaagtgttggaattacaggcatgagctactgtgcccagcaaaatcttgttttttaataaaactttacatttcttttatggagtacttatgacttgacttgaaaaccacatgtgatatgcagtgtgtgtgtttcaattgaatgctctgctatatcagatgactagatggagctctgtttgtgtggctattgtaacttcaagttcacagtttcttacctgaaattcttggggtctgttgtgtttcagaatttgcaactttttggtttttagaaaaataatagagagaagttactatatattttataaaagctccagtggggcctgatgcagcaccagataatcaaacacatagtatttctgcagcaaaacatttgaagattcacatttaaaggaataagcagtttagaccaggttttgctgccagattgtctttggtaccctcttacagaaactttccattttgagagtgttttagatttcaaaattatatataagggattgtggacttatattaaaaatacagaatctaatatttactttgatgtcaaatcaatgttttagttgttaggttagctgtgaaaatccttattaaggattagagtttaagaataataaattgtgtttaaaaattagttaaaatccattaaaaattatatgtcactgagctaattttatttctggttttatttatttggatcttctctctttttttcttagtctggctatttttaaactttggaaaattggtttctgtgattaaacagtttcactggtgaaatcagtatgtttgatttcaagtattttactacttttcttaagatctcacttgatttattgatacctatgaaagtttctgttatgcacctctcatgttgagaattattaatatttagtgtaataattaatatgaattcattaggccttaagaagggatggtgatatatggcaaatactcaattgatgcatctcttgataattacttatctcagcactgatctagatcactgtgttccattttgatttatttaactttgatctgaaggacaaataggctgatggggagtaaactttttctcaggtgtgtatcaagagaaactttgagaattcgtcacttcagcaaattccaatccttcaactgcttggtgaaataagccttgttgagattttctttaccctggatatttttgggggctaagctgattatttgggatgaaataagaaagaagataaatttgttagggaatttaacctgtgaaaaattgggccttgtcaatagaaacaagtagaatagaatatgagtgccttgaaaataagcgctgtaaaaagttctgtttttaaagataagtttgcgtgtgagccagtgttatgatattccttcagaatttacttacatgcttatgtaagcatgctgaatttatgtactcctctgtctaacttaattttaggtcacagttttagaaggttaaaagaaaaaccctgccccctattgagtttagaggattccagtttattcgcagtatttgggtatcatattacagctacagtattttcctagaaattggggcttggtaatggcatgaataaccaagatgaagaacatggtcctaggagattgcagtttaatgcaagacagacatagagaaatcattaaaaaaagtaacagaagaaagatataaaactagaatggggcctgtaatcccagcactttgggaggccaaggtgggtggattatctgaggtcagtagttcaaaaccagcctggccaacatggtgaaaccccatctctactaaaaatacaaaaaaattagccaggtgtagtggcgcacacctgtaatcccagctacttgggaggctgaggcaggagaatcgcttgaacccaggagatggagattgcagtgagccacgatcgcgccactgcacttgagcctgggcgacagagcgagactccgtctcaaaacagaaacagcaacaaacacaacaaactataatggggctacacaataaatggcaagtgaactacttaaatatttggggaaatatttagaagaatagttggcatttgaacttcaaaggataggtcaaattttgaaaggtgtagtaaagagggagtgacagtactgttactaattatatttcatttgaagattggtctgtttgaatgagatatttattgtgagtttgctgggatattatgaaatctcttctctctctctgtctgtctcttttttttttttttgagttgaagtctcactctgccacccaggctggagtgcagtggtgcaatctcggctcactgcaatccctgctcactgcaacctctgccttccgggttcaagcgattctcatgcctcaggctcctgggtagctgagattacaggtgcatgccaccacattggctaatttttgtattttcagtagagacagggtttctccatgttggccaggctggcctcgagctcctgacctcaagtgatccgcctgcctcagcctctcaaaatgctggcattacaagcttgagccaccacgcctggccttatttagtgtatttctatcctgagcctgtaggtgtctgtttcctttatagattttttcctccatttcccttcaacattttattgtgaaaaacatttaagtatacaccaaagcatctaccattaatattatactgtattttcttgataacatatctatatatccttctgtctatccatcagtatatcttttttttgcctttttagctttttattttgcataattataaatccacagaaatttgtaaaaaaaaaaaaaaatacagggaggtctcagataacctttacttagtttccctcaagggtaatatcttgtaactctagtacagtgtcaaaaccagaaaactgaagatttattcagatttcaccagtttcacatgcactcatttgtgtgtgtataagtatagttcagtgcagttgtaccacgtgtgtatctttgtataatcaccaccacaaccgatatatcaaaccagttccattatcacaaggctcccttgtgatactgctgtccttacctccattcctgacatctggcaactagtaatctgttctttatcactgtaattttgctattttgaaatggaatcatgaagtatataaccttttgagattggcttttttcacttagtataatacccttaaaatctttgatgcatttcagattaaacggtagacatcagcatacttctcctgaaacacttaagcatgcatagtattaacctacagtttaatatttcagtttttcttttgaagtaaaatttatatagaatgaaatgcccaaatcttaacctctttagattttttttttttttttgagagagttgttacccaggctggagtgccgtggtgcgatcttggcttactgaaacctccgcctcccaggttcaagtgattctcctgcctcagcctccctagtagctgggattacaggcacacaccaccatggctggttaatttttgtgtttttagtagagacgggattttgccatgttggccaggctggtctggaactcctgacctcaggtgatccgcttgccttggcttcccaaagtgctgggattacaggcgtgcgccacctcacccggccctctttagatttttaatcaaaatatagaaatgcagctttttataagaaaataagttttactgtactgaactgtatctctgggtaactcaggtcacaaataccatacacattcaactgcattttaaaattacttgctactaccaaaatattaatactgtttttgctattcctcgaagatacagcaccagttaacgtcaaaattaaaatggaccagtacgaaggttattgtggcaagaaacttatgctaatatgatggctgttgatacagaattgttactgagaagggtggactttaaaagccttgtgccctgggaaggaactctgaaatatataaggtccagctatttatcattttactgctggcacttcacaaataacctgttatgttttctataagaatgctttttactcatattttggagtccagagtttagaccccacttagtttgctttaaagtttttggctttcagttttattttacatggttttaattatatagcttatttaaagctaattttaagtacacttttttccctcaaggagatgaagccttatctaaatcagtgcctgtcacagtggatgatgatgatgacgacaatgatcctgagaataggtatgattccatctgtaaggactttaaaaagattataacacaccctaggcatgggcacaaacagcagcaacggaacagcaagcaggttgtaaaaaccaggagtgcctgccttagaaagactcgctcacagtcttcctgcaagtttgaaagaaaggccagaaaatgggctaaaactcagaaaccttaagagaaagtaatatcattatttacacacctagcatagggtgtgttataaatacagaactgtcaattttatgttgctatgtaaactgcagtaatttttttggaataatttattttgacagattattgatgaaagtaaatcatatctcagtaaattggtaacaacagacatctcctctatatttgactattgttaattgccatccaatatggtggtcctatttattaaggcctgttgagaagaaacaaaaagagagattactcagatatttaagattaagaaattgctttcaaaataagtgtcagtttacaaggtatctagactgagttagagtttaaccagttttcaaataaaatagaaatacacggtatgagagcatttactttaataagacttaataggtttaaatgtcaacagtgtagcctatacagatatacttaagtaaggggtggctgggtgaagaaaaaaaaagacactatcagtgtagtgaagaataaggaaaacaacagtattaaagactatagctataatgtttcaacataacttttaaacacttcctggacaatagcataccccatgctcataatcttcaacaagaagacagcatggtatagtgcatggaattttggaataatgggcataagggtatctgatttctaacatttttaacaactgtctgtgtcatcatgggcaagtgactttactttttgtcaaaaatttactatatttaagaagaaaaagttgggcgaaattttctgtaattctagtaccaaaaaatccatgatagatttgagatgatttcattaaagagcactacattaaccattcatttattcctaatagtaagttctaacattaagaaaacataaaaatatacatgtaattttctgtcataattttgtaagaaattaactgacttagtaaatgccctgggttcagctgttagtttcgctcttttgtatcttgctgatgctgttaggtttctctgtttcaaaggtcagcattctgctaattaacagaagaatgtttttattaaggtgaatgaacagttttattttacagttttgaatagagcttaattgtggacacaaatattcagattctgcttgcctacttttttaaattaaaaaatgtatatccatttattttatgggataggtggtaggttccagaatggagtgataagggcatacaatttattcatcagggattttacattatatcatcacagccagatactgaaagcatttaaaattttactcttttttaagatgctttaatttttcttcatttatatttgctatttgattttctatacatcatgaggcctcagatgttactcaaaggctaataatgttttaaacattctatatcttaatttaactgtgaatgatttactttaatttcatatttaaccaccaaataagagtgttgttaaggtataatttttttgtgtgtgttagagcttgtcaaaatataaatatcattttcaacttttaagttacctgatcgtatctctctgtaactggcaagtattttattggaaagtatctttaattccaccttgaatttgtgattaaaaaatacaaccctgttgagtacttttgagaagaattgaattttatcttgagcatgtctttctatactcagtttaatttgtttttataaaatatacaatttattaacttgtttaatattcactataccaaagaggtatctaatacccatgggttatgtagtcatgatggggatacaaatactttcttgcactattttagtatagattatatatttgagcatatttgaatatgcactaagcaacttaaaaaattcatttgcagatcacgattaagtcttagaattatttttctaacttcctaatttttgagtaggttgtattttggtagacagcatattgtaattgtatgtaaatttgtacacaattgtgtgtaaattgtgtataaatcttatatgctttgtctttttagcagtattgtaatacattttcagtgttggtgtttatgaagcgatagtgtattattgcaaatggttaactatttggatgcaataaatttttgtaaaccttttttcttgttcaagcatttaattttaataataatgttacttttttatatcatgagagttgacataatttgttattaaaatatagaggctagtttgtagccaaagaagttttgaaattttgaaatttaggacgtaaatacttttaattcccctaacatatatacttatatatatttgtgtgaaagttttacaacagatttaactactatttactttttctgttttaaagctatgatggcttttgggggcatttaaaaaacttagtcatatcctgaatattttagtaaatgtgaatacatttctgttttagcatgctattatgtagcgtcactcatatttgaaagtaaatgtataatattatgagacagtggtctaacctataaattaatttctatttaattggatttacttaatgaacaaggacagaatattatagattgatcaacacttgtatgtttctggtttagctttttataaaaaaaagtagactaatcatatattttgaattttatataactgaaaatttagagcttaggctttatgtagtttctcaatggcagaataataataccaaataggttgtcaggttttcacatttatacacgtaattttaaagtaatatacttgaaagtgccattagggtagggtttcattggcctttcaaatacctgttagttggattttaaattggttctttctctgaaaagacatctattcatataatttatttcaattcaataattagcctggcattgaaaatacaccataattcctttatatgttcaatataactggggatattttgaccaaacattttctaataatatcatatattttaatttaatatctgtactgggaatgagcctcaagtaatacgatagtagtgtgttcaagttttaacagtattagttttgaggatcattaaactaggcttgtctttagagattgcatactgaacaatcactgaagagaccatttatcccaaaaaagaattatcttttgaaatttctttattcgcttattttgcaggatgtgagaaatatttacaattgagcttttgagagcaaaagaccaaagtgctaggtttttctaaataagcattctttctccctgacaactttgactaagagctgagatttctacatggatgtctgctcccctaacaaacacatttactttattgttgaaatgtgcttaattgggtctagtaatactccacattttttctcataatttctctgtgggtgcgactaaatgctttttttttcatagaagcgaaatttgatgtggagattgctaaaaaaaattgtcccattgttatatttaattatattgggactagaccatagcattttaaatttccaactgttgttgtatcatttgatgataattttgtgtttcaaactagaaaatatgctaatgatttttttttttcctactggcttggtgtgggtatgctgttgatgacggctctgtattgttaatccagcatattttcggaggaaactaatgatttctggatgttatttatgcctaagaagatatttaatgattgtttacctgatttcagcacaattaatggcatggatgtatcacaagtcccttaatcgtttgatgttcactttgctttcattttaaacactttttcaaatgtctgtctcctacacatgttgtctattctctatgcaaatttgctaaatttggaataatttttttctgtgattttttttttgtggtagttctgtttcgttagcaaaactgctttgattctcctttattgtacttgaaaaacaaaggtggcgttttaaattaagtattttacttgtttttccatttgagtaagggttttaaatatctagcaattttacggtaatttttttttcaatttcctttgtctgtatagcacaggtaagtattgcaagtcatttaagtataacacaggtgtccagccagtagataggatctacttgtagatatctgaactggctgtagttgttactggctttcttttttctactagaattcccagtcaggaaagacatatgatgtgtagtggtgacctttgtccttctatggtcaagatttaaacattataaccagtgtttctttcttgttctctgttctttggtgatattgggactttcagaaaataagaaataggtcttcctcaaaaaagaaaaaaaagaaaaagagaaaaaggaagagtttggatttctagtgttaggaaaagtgattcatttttctgacttaatatcctttgtctttaactttgaaatttcaaaataaaattttgaaatttgagatgagtaaattctgtgttttcatttttcaagtataaaaatattgaactagttatttaatatgatcaaatttcccatattaatttgaatatattttttcttgttaaaatgcctctaaaactggtttagatttttgtataaaattagggaatacacatgtaataattcaggcctattgaaacataagtctgtatgaattattaataactgtgggttcttaatttcatagtttttattgttctacctccaagatttttttaaaaagtcatttgatattaattttcctggtaccctcaccaaaaaggatacagagctacttttcattaactacccacattgtaggatttgcgactaaaaaaaaatatttcaaaccattgtttagctttttgattatttggtgacttcattattatctcgtgaattccaccattttggggtacagatcattatgccttagttttatatatatatatatatatatatatatatttttttttttttttttttttgagacagagtctcactctgtcacccaggctggagtgcagaggcatgatctcggctcactgcagcctccacttccctgtttcaagcaattctcctgcctcagcctcctgagtagctgagattacaggcacccgccagcacacctggctaatttttgaatttttagtagagatgagatttcaccatgttggccaggctgctctcgaactcctgacctcaagtgatccacccgcctcagcctcccaaagtgctgggattacaggcatgagccaccgtgcctggccagtcatattttttaatagaaaacttaagatactaattttgaacctgagttgaaatatatactaatatgaattttgaagaattccatattccataactttttttttttttttgagacagagtctcgcgttgtcacccaggctggagtgcagtggcatgatctccgctcactgcaacctccgcctcctgggtacaggtgattcacttgcctcagcctcccaagtagctgggactacaggtgcctgccaccatgcccggctaatttttgtatttttagtagagatggggttttgcaatgttggccaggctggtctcaaactcctgacctcaggttatttgcctgccttggcctcccaaattgctgggattacaggcgtgagccatcgtgcccggccacatgttttgttttttaattcctatcctttaaatatatgacatttattaaaacaaagcctcacaccctactaaaatatttaacattccttggctatactcctttgaattattttatatatcaaactttaaaatatggtgtgatgctttagtactacatatacttaggtacctctaaagagcatgcatttaaacccattatcttatttataattctgtaaattaagtactctattatgatattgtacacaaaaaccaatttttaagcaaattttatcaccttgtttatggatgcccagtattttggccttctaaaaatatatttttttccagcaattttcttcaaacctgttctcagaacctcttaaaagataaaatggtcattgtagaatgtatctcagatgacctatcgtgcattttagagtgcatactggattaaatatgtttaaaactccttttatcatctttaaaaactcaagctggttgcagtggctcacacttgcaatcccaatgctttgggaggctgaggtgggaggatcacttgaggccaggagtttaagaccagcctgggcaacgtagtgataccttgtctctactaaaaagaaaaaattagccgggcatggtggtacatgcctgtagttccagctactcaggataccgaggcagaatgattgctttagcccgggagttcaaggttacaaggatatgtgtttgtgccactacattctagcctgggcaacagagcaagactgtctctaaaataaaattaaaaaaaaaattaaagcttgagttcttgcatttctaaatacataaatttaaaatatgcgaaatacacttatttttaaaaatgggggtcagcgcggtggctcatgcctgtaatcccagcactttgggaggctgaggtggatggatcacctgaggtcaggagtttgagaccatcctggtcaacatggtgaaagcctgtttctaataaaactacaacaattagctgggtgtggtggcacacacctgtagtcctacgtactcgggaggctgaggcaggagaattgcttgaacctgggaagcagaggttgcagtgagcctccctcactccaggttgagattgtgctactgcacttcagcctgggtgacagaacaagactttgtctggaaaaaaaaaaaaaaggcatcatctgtatttgcccaggcactcattagcatacaagtattaacaagtagagggtatagtgctggcacagtaaaattaatagcagattgggatttaggatcttaggttctactcctgactttgccactagttagctttgtttctttggctgagtcatttcctatatctaagcctgtttcctcatctgtagaatgacaaagctgtactctgaggtttgtccttctggctctaacattttgtattgcttttgttaatggctcgaaagctccctggtgcaggaggtccttctcttgattgcattttaagaaactcaacatttcgaattattgatttacctatcagcaagaggtggtttactttcctttcctgtttgagcgtttaaacaagcgacattactcatttcctttctagataggattggagttaataaaggctttcttggctttctcctatgtttttttttttttttccccgattgcttgtttgtcattgtgttgttgggctcacttcttattattttatttgtgctttcttttagtaatggtgttatcttggtgttcattatgtactttggaagacttagtatatgtgggttttggggtcctatttattttctcatgcgccagttccgatcattgtttgtttgtgggtttttacccttcctcccatattgttttgctttctccccctctcccttccctccctttcaggaaaatggaggagtggctccattacttctggctctgcccaggttttctgccacaagagtggcacggcctgtgcctctaatgcttctgatagagtcgtgactgctttggatgctacacctgccccaagatgtaatattgagcattgagattccaggggcagtacatcgtcctggaaagcctcaagaaaggaaacttcagagcaaacagaatcaactagggatcatgactatacatccagcatgatccagcatgggtccagccgaggcctccaaaatgatgctttgccagcctcagctggttctcaagtgatgatatccttgaagtctctgtggcccgtgactccagagttaaggtagtggagtttccctttaaagcatctcacagcaggctttgtagatgggacacatctcacttcaacatgcttgctggctactcaggttgaaggtcagcctcagcccttaggtccgttaaattaagttctaattttgaaatgtaggttattatgttataggctaggtttatggtagactgggtctttgacatattggacttcagtaataacttatgcaaaatgattcaacttattctttttagggcttaatttacatagctataaattaggttttcctttggacaaaaggtgttagagggcaaaaataaaacctttagccaggtagtctccatcactctgtatataatttgtgatttggagaaaaatgacctgaagtttgtaattttttggcttctgaatgtactatgattgttctatatgttatgatcttactgaaagttgtcgctaagttgtacttctacagtatgtggatctgatttcactttatatgatttattaataggtatacaattgtattttatctcatgtacatcatatttcttagtctaatgacaatccagaacttgagaatgcattaagtaggtttatgtattgtgactttccgttttttagtagacatattctttggagactgggatttgaaagaagaaaaattgtgtgatttcctacaattaacaaccaaatctttatagttaataggaattttttaaagactttttttgaacttgtaaacacaaactgaaatcaggttgttgaactaggctttcaagtaactagattaggaattgtatttttgttggctgtttagtgttcaacccaaatgatggtatgagatcttgtacttgcaagtaaactgtgtttttccatttctaatccagtattcaatgcttcacatattttatacacacacacacacacacacacacacacacacacacacacacacacatatttattcgtcccaaaattcattattcagattagtttgaggaagtttttctggtccatgagaaatgacagtgtagtattactaaagatggttttaatatataccaacagaaaaaaaaagtgctgtgccagacatagaaatttgctgctaacattttattttagtatcttctagtcttttttagggacatacaaattttagaagttttttttttttaaatagaactatattgtggtttataaattactttttcactgaatattaataaatattttctatcttaatcttatttagaatatcattttaatttctatctcttatggataatcatgtgaaaatactatttaatcagtttctgatattgaatgtttaaacgttttctcaccctttgctattgcagacaacattataataaacatacatgaattttttttttcttttgagacagagttttgttgctcaggttggagtgcaatggcatgatctcagctcactgcaacctccgcctcccgggttcaagcaattctcctgcctcagcctcctgagtagctgggattacaggcatgcgccaccacacccagctaattttcgtacttttagtagagacagggtttcgccatgttggccaggctagtctcgtacacctgacctcaggtgatctgcctgcctctgctttccaaagtgcagggattacaggcatgagccaccacacctggctgaaattttttttaaaaagatgattttagagaatttttccagaaagatgtatatcttcaatttaaagggtttccctttattctgaaactgtttcctaatttggggagggtatgttgtaaatagtctttattttataaatgatgaaagtaaatggaatttgggtttaaatttctttttttggcaaaatgaaaagttggcaaccctgtatttgtcccattttaagaaagcttacagtgtgcaaaccattgatctagaaatgtaagagcaaaactttatagctcaactttagtaagatttaaattggtgtgatctaatcttcactttattgaaatacaaatcagggcagaaatcctcagaaaagcaaacccatctgtggcttcctttagcaattgatgattctgtgtgttgtctaaatattcctgatccatctgtttgagggagaaagcaccaaaaggcatataataaacatttatggaagtgattgcctattttgcttcagtctatttagatgcctttgctatgcatctttgaatatgaatagtaatgaacaatctgtcaaataaaatttaggaggcagctaacatgcattaatatctcctgccattgaatgaattcttcattgaaatgtgggtgcgtgctaagaagtgtaaagaggggtttcaaatccagaaataacaaatgttccatcatctcagctacaagtttttgacttagagagtcagtcttgattgcagagaacatgtttatcccatacagattagctcatggcagactgtcaggatcatgccatcttctttttgaacttttctataagctattttcttgttaccgtgatttgtgaatttatattgaaaggatacccagacttatcaaaacatcttgtcttgcacaaaagctgtatgattgctttaatcttacattttcagttatttttcttgagtataaacatggagatttcctaggaatatattttattttaacatatgatggtaggagtaaaagtagtgttttcttatgcttttagtaattgatttttccattagcaaattggtctttgaggagcatcttgagaaattttgttgtgagtgaagcaactgcactattttttttaaagtaacccatttatggtaattcgtgttctttttaccatgtatgtaattaatagcactcatgtcccttctttcccctgtcttgaatattattagagattatttattgctgtaatacttaacatttgtgtatgctttcatctggttcacagcatttatgtagtacattgaaattaaggtccaaaactatcatcctctagtttgaagcaaggtgtcattatatagtggtttattacacattggttttccaagaatatattttgctgttgaataaaacctctcgtggagttttatcttggaatgccatttatctgaacaagttcatttactgttgttgacctgtctgactttgtagttgtaggatggtgtcagcaaagcaaatagaggattggaaggttatgcagcatcaaattgcaattggtaaaaatagtcaatagaatatgtccttcagagttttcaatatattgcagaattgtatagaattgagaaataataagtgtaaagaacatttttaaaagtttttgtttatagcttaggttaaaacatggttttgctagttgtttatttacaatataaaatctattggcacatttatttctattttgattcaaagaagtctgtttttatttttaatttggtgtatttcacccccagatatatagttctttttttattgttttttactctcaagaattgccaagaagatgcttttagaagaaattaaagccaatctttcctctgatgaggatggatcttcagatgatgagccagaagaagggaaaaaaagaactggaaaacaaaatgaagaaaacccaggagatgagggtgagctccccagagagaagtttataatgtcataatttgattccttgactaattcagtctttgaagaatatctgaccaagaaatatcttaatatggcccggcgtggtggctcacgcctataatctcaggactttgggaggccgaagcaggtggatcacttgaggttaagagtttgagaccagcctgaccaacatggtgaaaccctgtctctactaaaagtagctgggcgtgatagtgcgtgcctgtagtcccagctactcaggaggctgaggcaggagaatcacttgaacctgggaggcagaggttgcagtgagccgagatcacgctgctgcactccagcctgggtgacaaagcgagactccatctcaaaaagaagaagaagaagaagaagaaaaaaaatctcttaatacttgtatttagagttcatggaaatgtttaaaactttattaccatgacttctcttgaatatcttgtaataattatggaagttactctaattttgtcagttactgccaataaacagatgattttttttttttttttgagacagagttttgctcttgttgcccaggcaggggtgcaatagcgcaattttggctcactgcaacctctgcctcccgggttcaagcgattctcctgcctcagcctcccgagtagctggaattataggcatgcgccaccacaccctgctaattttgtatttttagtagagacggggtttctccatgttgatcaggctggtcttgaactcccgaactcaggtgatctgcccacctcggcctcccaaagagctgggattacaggtgtgagccactgcacccggccctaaacagatgattttcaaagcaaaatattttataccttacaaagggttctataaatatataggtgatatttagtcaatatttaataatagtaatatgtcaagtctgatgtgtgagattacctgataacaccaatgataccaaagtatgtgtctaactctgatttttttcataagttgcagtagttgtcaacaggcaaaatagatatacgaggcattttaaaggctgaagaaggttttattgatttatttccttcatttagaagcaaaaaatcaagtcaattctgaatcagattcagattctgaagaatctaagaagccaagatacagacataggcttttgcggcacaaattgactgtgagtgacggagaatctggagaagaaaaaaagacaaagcctaaagagcataaagaagtcaaaggcagaaacagaagaaagggtaagatgttttaattctgaatgtaaagaacatattggaccagacagtggcttatgcctgtaatcctagcactttgggaagctgaggtgggcagattgcttgagcccaggagtttaagaccagcctgggcaacatagggaaacctcatctttatgaaaaatagaagaaatagctgggtgtggtggtgtgcacctgtagtcccagctacttgggaggctgaggtgggaggatcacctgagccccggaggtcaaggctgtagtgagcagcgattgcaccactgcattgcagcctgggcgacagagtgagaccctgtctcaaaaacaaaagcaaaaacaaaaaaaatactggttttgtaaactaattatagtaatgaaatttaagtgtatggccaggcacggtggctcatacctgtaatcccagcactttgggaggccaagtcgggtggatcacaaggtcaggagattgagaccatcctggctaacacggtgaaaccccgtctctactaaaaatataagaaattagctgggtttggtggcacgcacctgtagtcccagctactctggaggctgaggcaggagaatcgcttgaacccaggaggcggaggttgcagcagtgagctgagattgcgccattgcagtccaacttgagcggcagagcgagactctttctccaagaaaaataaaaaaaaaaaaatttaagcatatctgctcaaacagttgaccacttatattaagcaaatgtcagtacactggcaacaagtatactatcacatgagattaaaattaataatttagagtgggaagataacccagaaactttagatgacacaaagaatatttttaacctttagattataaagagaaataaatatgatttaataaataaaacattatgtagaaagtataagattgcatacaactgcagaattagtgctttcctgtagaagggtagaaaatgaaattaatttgggtaaatttatgcaagcttatatgcagaacttgactggcatatagtcagagtagatttccatttcattaaaagcctgagtccttttgcattgagggcttacatgtttccagcagtatggtgggcattgaggatacaaaaatgaataaaaatgtatctcagtgattctgataggtaactaggtttggcagtcactggtttagtaagaattattgacctttgtattataaaaaaattatagcaccatgagggacattttgtgtaacgtaattatataatgtggcacaaagaagggcttctttagcttcttgaggggtaggagttaccccagagaaggcttcacaaagaaggcttttacccaacagattaaattcaaaatgtgggagcacgtagattgttgtgaagatttacaacacaagcagggaaaaaaattttaaaacctgtgtaaaatgttggcacatgatggatgggatacaattaatatagtataagctgctctatagataggagtagggaaaggaacaacaggggatgaagctgggcctgtaaaacagagaccagatactggagatctttgtaagcctgtgtttttcacactggagtactgggtggtataccaaggtgtacatctctttggtgtctctatttataatttgaggtttggggaaggtcattttatgttaaataatatatattgggtaattaaatgtgatatttgcctgcgaattttgggtaacaaaaagttcaaagaatttttttgttgttgctgtggtgggctttttgatgactaggggtaaattttgaagactgttgttagtacccaacccatggatggcagatgaactcttctttgccaactgggaataggaacgcatttttgcaagtgtttgggaaatataataggctctaaaggatgcagagccattgaaaagtttttttttttttttcaattactgtatttatttttgaactctggacctctggttatccacctacctcggcctcccaaagtgctgggattataggcgtgagccaccgtaccggccttatttttaaattttttgtataacagctatattgagatataactcacaaaccacacagttcaccatttacagtatacaatttagcagtttttagtataatcatagaggattaccaccactttaaaaaatgttttatttgaaatgtatgtacaaagaagtgcacattatcaataagtagacatcttgatgaaaacgtagggcacccagatcaaggaacaagatgttgattactaacacccaagaatcacaatctcagcatgaccacttttttccctattgaaagattttaatcaaagatatcatatgatcagattagttccttactattcagtgagaatgaaggcactgaatgtttggaaggtattgctgtagttgatgacaaatggggttgttggagaagaggaagattgacttgagtcttataggaggttgaattgttaggtcttcttaattggtatgaaagggaaaagtctacaatgagtgtcaggtttttagagttgtcatggtgtatgtacaatatcacagaaatagttgaggttattcagtggagttgtaatgttttacaaatggaaagctaaggacatagtcttggaatcctaaacatttatagggcttttgggcaagagttattcactaaagatgagggggagaagttcttgccacacacatatacaattaatatgtcatggacattttaatgttaataaataatagtacatcattttgtgactacttgtcttataaatttcttttttattattattatttttttatttttattatttatttatttatttattttgagtcggagtcttgctttgtcgcccaggccggagtgcagtggcgcgatctcggctcacactgcaagctctgcctcccgggttcatgccattctcctgcctcagcttccctagtagctgggactacaggcgcccaccaccatgcccggctaattttttatatttttagtagaaacagggtttcaccgtgttagccaggatggtctcgatctcctgacctcgtgatccacccgcctcggcctcccaaaagtgctgggattacaggcgtgagccactgcgcccagcttgtcttataaatttctttgcaatatggctgcaagctcttacagattctataaaggaactgtgtgatttagcatgttatatatcacaacatggattcctgtgcctcttcaacaaaaggggcaatattgattttgcttctgaagcttagttcaatatatagacccttttaatatatatgattacatttgagatttgctttattaaaacctgagttttctgtgatctgtgtttctacagcctgattctgtgggtaatttattacccaagtggttttgttgttgttgttttttgtttgtgtaggagagagtaaacttctaaaatctcatcatatttgtgtttctaatatggattgtgatcatagtggttgatatatagttgaagttgcatgattttctgagttttgtaaattctaatgttcctatattatttggaaatttgaattgagagatgggaaaaaatcagtagtgaatagtctgcttattaaatctagttgaattaaattgaaatgcattgaagaggtataagaacaaagtgcaacatgtgaactctaattttctcctaaattagaaaaatgttacaaaattattttagtgacaatttgaaattgtaaatattgccttcatattagatgatagtaatttttttttcagatgtgataatggtatttagttatgtagggcagtatccttatgcttaggggtaaagtgtcatccgcgcttaatatcacatggttcagtgtaagaaaagttgtgtctgcctgtgtgtgtgtgtgtgtgtgtgtgtgtgtgtgtgtgtgtgtgtagagagagaaagaaaaaaagcaaatgtggtaaactgctaacaataagtgaatttaggagaagggatacaagtgttcattcaataattctttcaaatttttggtagatttcaaaaattttaaaatgctgggtgaacaattaatactaggcttaaaattatacttaattacaggatttttttgtgtcagtgtgtgtgtttttggtattctcccagctttccagttgcttagctattctttttttttattattgtggtaaaatatatgtaacataaaatttaccattttacccatttttaagtgtatgattcagtgacattaagtacattcacatttttatacaaccataacttctgtctgtccctaaaacgtgtcgtcattccaaatggaatctctttaaccattaaacaataactctttgttcccctctcccccgacatttctttatagcatttatgttctcccatttatagcatttctgttagcatttatgttctctcattttttaaaaagctggaatagatctttgattctgatctcaggttatgatagatttttttaaaaaattattttgaaacaattcttgatttacagaaatgttacacaaatagtgcagagttctgtgtatctttcacctagcttccctgatttaataccctatcatagtaccatgatcaaaaccaggaaattaatattggtacaatactatcaactaagccgggggtttacaaactgcacctgtgggccaaatctgatcctctgcctgtttttataaataagcttttattgaaacacagccatattcattaatttactgttttcacatatgtacaatggcaaagttgagtagagatgagtagttgcaacagagaccatacggtccacaagtcaaaaatatttactatcaaactttttacataaaatgttttatgacctctgaagtaaactatagatcttattcagagattagttttcccactaatgttttctttctgctctatgattcaatccaggatctcacattgcatcgagttataatgtctccttaatctacttcagcctgtgacaattcctcagtctttactttgatgaccttgacacttgtggagtgttgattccttattttctcaactgttccttgatatatatttgtctaatgttttctcatgatcgaattgagattattatgcattttgacagaataccacagaagtgatgttgtgtcttcagtgcatgatatcaagaatagatgatgtcagtatgtctttttttttgagagaagacctcgctctgttgcccaggctggagtacagtggtgcgatcatggctcactgcagactcaacctcctgggctcaagtgatcctctcgtctcagcctcccaagtagctgggaccacaggtgtgtaccatcatgcctggctaatttttaaattttttttgtagagacagaatctccctatgttgcccaggctggtctcaaattcgtgggctcaagtgatcctctcaacttggcctcccaaagggctgggattacaggggtgagccaccatgcccagccgtcaatatgtcttattactctcacggttaacttttgttacttgcttaagttggtgtctgctggtatttttccactgtaaagaagaaaatattatttttctatctatatttagtattttgttgggagatactttgtgaccatgcatatatcctgtttcttatcatacttaagcccactaattttagtatgcatcttgggtgaagcagttagtactgtggtatttgcctagttgtaattttctatttatttcattacttccacatttagtaattgtaagggagatttgttttcccctatttatttattgcattatttatatcaatatgacttatagatttttattttaccagttataatcaaatagtatcatttattttattgctcaaattgttctagctttggttgttgggagctccttcaagttgaatcttgtgtcctttcaacatgtgcctgcccatgtttgaacactgctttgttttctggcactataagatgttgtaagcttatcttgtatttttttctgccctgcttcctctggccagaaagaggttttctcctggaattttatatgcttccattactgtgttaattgtgagaaaaagaaaattgaggattccacatgtagagcctgattttcctggtgttgtggctagaaatagggatttttcttcacagtcttgttgtcagtaccgtctgcatacctttggaatttagcctgccttctggtcaaaaccaggaaacaaagaaagaaaataaccatacgccctcacagctctctcccctccaccaattgtagaggggtcattattcaagttttgatttcagtctccaatctgcctattattgtttccctttccgagttcttcggttgtgtcatcattggtggagacaatctgtaatcttactccatcttggccagcctaccttgcttgttttgaatagccaaacttctttttcattaatttacctttggtaattacatatattttattgacaggtaatttattcttattctgtcaattcatatacaattgaatacttatattttaatgtacaaccacagttttataattacattagaaatacatctgaattttatgtatatcatgtaaagcattaactggtatattctatattatgtattatccattcacatatatacctctgatgttcttacaatgctctgttttaatgtcgagtcagtggtaaattaagtgaattaggtttctattgaaaaataattaataattttatgtattttttaaaattcaagtgagcagtgaagattcagaagattctgattttcaggaatcaggagttagtgaagaagttagtgaatccgaagatgaacagcggcccagaacaaggtattataattggtttttaaaaaattttaggaattaatctgaatgaccatgccttcaaatgatttatatggttactgttaccaataaagttaagttagtgtgatatataatattttgatttgaaactaattgttatacttaatagtttaaaaagaatctaagcatattttatgtgtagttgaattatgtattctaacctgggtagattttcagtctgcaaaaccactcgtgtctgcagtgttttattgttacgggggaaattgtaggataatagtaaagaggctttatagaaaaactgcctcagtctaactttgggcttttctactttctgtttgtataaataatctatgcttcagtttcctcatctgtaaagtgggggattacaatatacttgactgactattgtgggcattaaatgagacaatacgtgtacaaggtttataatagtacctacctggcaaatagtaagtgctcaatatataaattattggtctcagtagtactacagtaataatgatatgcttgttcttgtaacacgaacagtcactgatctagattacctgtaatttaaaatttggcttccttcttagtatggtatgttagataatactactactacaattttcttatttcccccagaataacataatctttctacagtttatcaaatgaacaatctgtgtgtgtttgtgtatgtatgtctacaaaggtgtctatctgcatttgtaagttttagaacattcgaggtttttttaggttaatacttaccaggttgtgcttagaatatagcaatatattatactttaagtcaatataaaatgaaaatgataagatatgatgagaggttttttttttttttaaaccaagatacaattcagcatgttatactgtggaatacagtggtcttcagaatatttgcaaagttgtgcaacaaacaccactctataatttctgaacatttccatcatccaagaaaacaaccctgtacttactagcagtcattttccattccccatgccctcgtactctaataaacactaaaatctactttctgtctctatggatttgcctgttctggatattttgcatgagttgattcatataatgtatatccttttatgaatggatttttttttcacttagcataatgttttcatggttcatccatgttgtagcctgtatcagtacttcattctttctttaatgattatttttaatagtggtaaaatgcacataacatttaccatcttaaccattttttttctttcatggtattactgggaatttttattttcatcttaacgatttttaagtgtatggcttagtagtgttaagtacattcactttttttgaaccaatctccaaaaccttttccccttgcaaaattgaaatgttactcattaaaccactctctttttcctcttccctgaagcccctggcaaccaccattctattttctgtctctatgaattttactactctaggaacctcatataagtggaatcatacagtatttgtcttttttgactggcttatttcacttagcatcatgtgctccagcttcatgtatgttgaggcatgtttcagaattttcttccttttaaagacttaatgttccattgtataccacgttttgtttatcaatttatttgttgatggacatttgatttgtaaccttttggctatcatgaataatgctgctttgaacatgggtgtagaaatatctcttcaagtccttgctttcatttcttttgggtatatacccagaaaaggaattgcatggtaattctatttttaattttttgacgaactgccataatgtttccatagcagctgcaccattttacatttccattaatagtgaacagggtttcactttctccacatccttactgacagtggttattttgtctggattaatgtagctttgtgtaccaatttctaagcccagaaatatttttctcaccaaaagttgttacttttttttttaaatctctgtgacctgttatgaagaaaacagtattcaaatttgtaatctgcttttttttagtgatgatgaatgttttttagtatgtctattggctgtttgtattttatactagaagaatagtcttaatgtccttttatgcatcttcttactcatataacaaacctcccctcaggatactgtaaaatgttgatcattggattaaaatgaagggttaggctgctgctggaatatccattttgaacctattgattttttttctgtttgtttttaggaatgcatacagaggtagaacagttttaaaatagtacataacttattgatggaagtttatcatgaaatattttattttgtgttttaaattttcgtcaggtctgcaaagaaagcagagttggaagaaaatcagcggagctataaacagaaaaagaaaaggcgacgtattaaggttcaagaagattcatccagtgaaaacaaggtaataatgacatttaccacatgcttgaattataaccagtacagtagactatggtaattatgctgttacctctctgttccattcattcattgtattgtactggcttatttacattttacacttgtggaaggattggttattgaatatatatatgtaaaagtattgatttgacattatcatttttttctattccttaatttctaatggaattttatttaagccattctaattcattattttacatttgtagtgatgtgagtgttctattttctgaagacaaaatactatcctgaatgatgactcatatatgaataaatttcttctcatagtgaaatcagccaatttgaatttttgtatttaagcaggcttacataaagtaaaaggtgtctgtaatatgtttgattctgtcaacacaatgctcttcagagggatatttgtcttttgaaaattaacttttaaaatattttaaaatgtacagttcagtggccttaattatattcacaagcagaaactcttcactcattaaacattaacaccatttccttctatcccccatcccctggtaacctctattttcatttatgtctccaagaatttgtgtattttaagtacctcatatatataagttgaatcatgcaatatttgtccttttgtgtctggcttatttcattgacataatattttctaggttcatccatgttttagcatatatcagaatttcattccctttttaaggtgaataatattccattgtaagtgtgtgccacattttgttagcccagtcatctgttgatggacatttgggttgtttctacctttcggctattttgaataatactgctatgaatatgggtgtttacatatctgagtccctgtttttaattattctaggtatatatggaaaaatggaattgctacatcatatagtagttgtatgtttaacttttggaaaactccacactgtttttctctggtatctgtaacatttgacgttcccgttagcaatgtaccaagattccaatttgtctgcatctttgccaacacttcctttgtttctttctttttttctttttttctttttttttttttttttaacaagaaacatcctaatgagtgggaagtggcatttctttgtggttttgttttgtattttcctaatgactggtgatattcaacatcttttcatatgcttatatcttcttttgagaaatgtttattctagttggtagcccatttttaattgagttgtttgttttttttaataggtgttgaagagttgttttttttttttgagacagagtctcgctctgtcgcccaggctggagtctgatggcacgatctcggctccctgcgagctccgcctcctgggttcacaccatcttcctgcctcagcctcctgagtagctgggactacaggcgcacactgccatgcccggctaattttttttttttgtatttttagtagagacggggtttcaccgtgttagccaggatggtctctatctcctgaccttgtgatccacccgcctcggcctcccaaagtgctgggattataggtgtgagccaccgtgcccggccgaagagttgtttttttttttttaatactactctattgctgaatataattctaaaggttttcagcatgttttcttccaccttttcctgctgtgttaattaatggaatatgaaatggataaattaaatgactttgtactgtttacctctaattgtttaaattctgtagagtaattctgaggaagaagaggaggaaaaagaagaggaggaggaagaggaggaggaggaggaagaggaggaggaagatgaaaatgatgattccaagtctcctggaaaaggcagaaagaaaattcggaagattcttaaagatgataaactgagaacagaaacacaaaatgctcttaaggaagaggaagagagacgaaaacgtattgctgagagggagcgtgagcgagaaaaattgagagaggtaactaatttctttcttcttctttttcttttgtagctacagggtcttgctctgttgcccaggctggcctcgaactcttgggctcaagtgatcctcctaccttggcctcctaaacttctgggattacaggcgtgagtcaacacacccagccttaatttatttctattaatgatttattttatttggtatatgacttcaatatatttcagcattttaagagtagaatgttgtaatctaccacagatttcttttttttagacggagtctggctctgttacccaggctggattgcagtggcatgatctcagctcactgcaacctttgcctcctgggttcatgtgattcttgtgcctcagcctcccaagtggccgggactacaggcatgcactaccacacccagctaatttttgtattttttagtagagttggggtttcaccatgttggccaggctggtcttgtgctcctgacctcaagtgatccacctgcctcagcctcccaaagtactgggattacatgtgtgagccaccttgcccagcctcaaccacaggatttctagttgcaattgatttttcctactgtcactatttcatgcaacttaaaatagtcattaagctttattaatttaattaagtgcatggaaagcattgagattcttgaatgatcaccaaaatggttatgttgtattttgggtagagaaatgtttcaaaattacttcttaaatccataaaagatttcagttttttaaatggactttatgttacaaaagttttcaaattcacaggtggagagaataatataataattctccctggatctattaactcagtttcagcagttactaacacaggacgagtcttgtttcatcttttttttttttttttttttttttttttttgagatggagtttcactcttgtcacccaggctggagtgcagtggcccaatctcggctcactgcaacctccacctcctgggttcaagtgattctcctgtctcagcctcctgagtatctgagattacaggtgcacgccaccatgcctggccgtttcatctattctttttccttcagattatttcagagcaaatctcagaaatcatattctgtttataaatagttgggaatgtattgttaaaagataatggtattttaaacattactgcagtgccattattaaactgaattctctcattgcctcacatagtagttttaaaaaatagttggtatgggcctggcgcggtggctcacgcctgtaatcccaacactttgggaggctgaggcgggtggatcacctgaggtcaggtgttggagaccagcctggccaacatggtgaaaccccgtctctactaaaaatacaaaaaaaattagccaggtatggtggtgcacgcctgtgatctcagcctcttgggaggctgagacaggagaattgcttgaacctgggaggcagagcttgcagtgagccagggttgcaccattgcactttagtctgggtgacaagagcaaaactctgtctcaaaaaaaaaaaatagttggtttgaatcagggtcttaacaagggccatctgcatattctgttgtatttggatgttacatctcttacctaattttaacctagtttctctttggttctttctttttctttacccattcttacagttcatttgcttaagaaaccagattatttttgtaaaattttctatattctgagttttgttatttgcatccctgtggtacagtttcactggcttctatatttcgtataaattggtaataagatctagagtcctgatcagatttagattcagttctctttttggtagaaatactcatgggcagtaatatgtacttccttttggatctcattaagaggtactttaaaactgcttgtccctttttttgtggtacagctcctctaactttgttccactttttcagaatctttttggatattctcagttctttgcatttccacatagtattacgttgttggtttttacaaaaatccctgtggaatttctgttggaattttgttgaatctttcttgtaatgtggccagaagacatcttaacagtgttttgtctcctgttacatgaatatagtgtacttctctatttatttaccttctctttaatttctcttaggaatgttttgtagttttctctgtacaggtctagtacatattttaaaaaatttatccccaagtaattcctgatttttgatgttacattgtattagtccattttcacgctgctaataaagacatacccaagactgggcaatttataaaagaaagagttttattggacttatagttccatgtggcttggggaggcctcacaatcatggtggaaggtaaaaggcacatttcacattgtggcagacgagaagaacttgtgcagggaaactcctctttttaaaactatagatcttgtgagacttattcactatcacaagaacagcacaggaaagacctgcccccgtgattcaattacctcccactgggtccgtcccacaacatgtgggaattcaagatgagatttgggtggggacacagccaagccatatcatatagtaaatgtagtttcacgtaatgttggcataatgaccttgtgtcctaagctctaaatttacttactcgttatagtagcttttttgataaattctttgtgactttcatgtatacgtttgtgttgtctgtaaagaaaaactattttgctaattccattccaatctgtcatttatttttttaaaattataaatggtgaatttcttcaaatgcttttcattgcatctgttggagtgacctagaaaatgtcttgtattccttgaataaaccttgcttagtcacgttatattactccttttatatattgtattgcatttgctgatccttccttccttccttcctcccttccttccttccttcctttctttctttctttttctttctttcaagatagggtcttgctctgtctctcaggctagagtgctatagtgtgatcatagctcactgcagcctcaaactcctgggctcaagcaatcctcttgcctcagctttccaagtagctgggacaacaggcatgtaccaccatacctggttaattttttattttagagattgggtctcattatgctacccaggctggtcttgaccccctggcctcaagtggtcctctcccatcagcctcccaaagtgctgtgactatagtagggagcctccacacctggcatattccatttctttaatacatgtagaactatttagatcttttctttttctttaggtctgttttggtaaatttcaaacttaaggaatttttccatttcatttaagtagtcaaattatttatgtaaatttgtttatagtctttcattatactttgtaggttctgtcatttattgtttctgttaggaatttgtgttttatcattttttccttgattaatctgtgcaaaaagttcacaattttactatctcaaaaaaaaaaaaaaacgcagctttggatttcattaattttttttctattgtttgacccttttctatttcattgattttcattcttctttttactgtgtttatccttctttggacttattttctgttctttttctagctacttaaggtggattttggatcttctttaacgtatgcatttttaaaggtataaaatttgccactgtgcatactgtttaaacactgcatcttacagattttggtattttgtgttcatttttactctgctctgaatcttttctaatttctgtgagccagaatatgatctgtcttggtggatgttcaatgtttatattctgctgttgttgggtgacatattctataaattttgatcagattatattgatggctgattatattcacatcttctgtagttttaatggtattctctccaatcagaggagtgttgatgtctccaactataattgttaattcatctctttctccttgtaggtctctcagattttgcttcatgtttgctggaagttgttttgttaggtacatatacatttaggattacatctttctggttaattccccctttaacaacatgtaatgtgactctgtattatctggtaattttctttcacctgaagtctgctgtatttgataataatggtaacgacatcatcatctttcttttccaacatcttaggaaaagtttcatttatacagccaggttgaaagtatttcattgatttcctgtaaacttacttcctagatttttttcattgtcatatttttcattttcatgtttcctttattacattcctatttatgtactaatctttatctatcagtacatctttttatgcatttcatagtaaattgcatacatcatttcatttatctcaaatgctttagcaggtgtatcattagctaaagttcaatatttatgtgttttcctttttatgtaaaaggaaatttacttaaaatgaaaggcaaaaatcttgtgtacatttgtttttgaataatatgtggtgtatattttctcattatttttttctagtaattttgttcccccacaattttatcgtgaaatttgtaaatatatggagagaattgtaaacatgaacacgaatgtacctaccatgtagcttcttcatttcttaacatgttgctgtatttgctttattacatatctgtcttatctatgcatccatcaaccattttattcgtccctgctctaatctgtattatttccttttattctctagctagggtttagtttgtgcttccttttctggttccttaaggtgtaaagttaggttcttgattgtgatctttcttcttttctactgtatgcctttatcgctgtaaatcctcttcttagtactgttttctctacgtcccatatgttttgtattttgtgttttaactttcatttgtctcaaagtgttttctaattttccttgtgatcttttacttgatcctttagttacttatttaatttccacatatttgtgttctttccagttgtcttctgttatggattttttgttgcattcccttgtgactggaaaagatacttcagtctctttatatttattaaggcttttttgtgcctgattatatggtctgtccttgagaatgtgcacttgagagaaaatgtatagtctaccattgttgagtggagtgttctttatatgtctgttaggtctattttttttttttttttaaagacacagtgtcttgctctgttgctcaggctggagtgcagtgacgtgatcatagctcactgtagcctcgaactcctgggctcaagtgatcctcctgcctccgccccttgagtagctgggaccataggtgcatgccaccaccccagctaatttttttaaactgttttacagaggcagggtcttacagtgttgcccaggttggtctccaactcctggcctcaagtgatcctcctgccttggcttcctaaagtggtggaattaaggcatgaaacactgtggccagctccaattggtttatagtgttattcgagtcctatatttccttaattatctttgtctacttgttttacgcttttattgatattgggctatttatgtctccaactgtttctctctttttttgttttagttttcccctactacactgatgtatatttctccttttagttctttcagtgctttcttcatatgtcttggtgctctgttgtttgttgtatttatgtttataattacattttttgagaacctggctttattatcaatacataatatcctatttgtctcttgtaacagtttctgacttaaagtctattttgtctgatgtctatatagtcatctcagctctcttttggttgttatttgcatggaatgtcttttactattctttcactttcagtttatttgtgtctttagatctaaagcgaaccttttttagataaccagtatttggatcattttttaaaaattattatgtccatctatgtctttttgatccaggagtttaatccatttacacttgaggtaagtagtgataaataaggatttacttctgccattttgtgttttcctttttcattttgttcattattttgttcattatttcctccattactgctttcttttgtgtttggttaattttttgcagtgacatattttgattcccatctcactttcatttttgtatattctatattttctttgtggttatcatggagattacatataacatcctaaagttatgagagtcttacttgaattgatgtgaacttaacttcagttgcatacaaaaattctactcttccacagctccattcccctgtatattatgtggtgactctgttacaattattgatatcacaaattacatttttatacatgtcgtgaatggtaacatatattcataattgtattttatgcttttgtcttttaaatcctaaagaaagtaaaaagtgaggttatgaaacaaaattttgtgatactaggttttatatttgcccctgtatgtatctcttctaggagatctttatttctttatatggctttgagttacttctagcatcctttcatttcaacccaaagacttccctgtaggaagcattttttatagggcaggtctagttttaacaaattcatttggcttaggagtgtcttaacttgttcctctattttgaaggataattttgctgggtatagaatcctcagctgatgcctggcacagtagctcacccctgtaatcccagcactttgggagaccgaggcgggaggatcacttgaggccaggagcttaagaccagactgggcaacatagtgagaccttgtctttacaaaaaattaaaaaattatctggatgtggtggcacacacttgtggtctaagctacttgagaggttggaggattgctttagccaggggttcgaggatacagtaagctatgattatgccattgtactatagcctggatgacagagtgagatgctgtgtctattttttaaaaaagaaaaaagaatcctcagctaactttttttttcattcatcactttgaaatatattgtcacactgccttctggcctctaaagtttttgatgagaaattaggtgatgatcttattgaagtttttttgtatgtgttgacttgcttctctcttgctgctttcaatattctctttgtctttggccttcgacagtttgtgtgtaatgtgttttgatctatacgtatttgagtttatcccagtttgagttcattcctgtatttgtagatttaagtctctctccttcaatttgggaagttttccacaattatttcatcaaataattgttgcttctttctttttcttttctccttctgtgactctcgtaatacataagatgttcttcatgatggtttccctcccatccctttttgtttcttcactttagtttttttttttccctttttgatcttcggacttgaggatttcagttaatatcttcatattcactgattcttctgcctgctcaaatctgctattcatcctcttttgattgggccatattttcctatttggctgtatctttgtgattttttttaatactttaagttctagggtacatgtgcacaatgtgcaggtttgttacataggtatacatgtgccatgttggtttgctgcacccatcaactcgtgtgattttttaaaattgcatattgtgtatttgactgttgtaacttggcaactctgcatatgaggttctctcccttttcaagggtttgctgggattttaaaatatatataaattgtagtagacctattgttttaagactcccccacattattttttcaaagagtgttcttgttgtgtgtcatcagtaaagtctctgtccctttcattcatgttcaactaatgttttgaaagatttttttgaacgtctgctgggtgtggtggctcacgcccataatcccagcactttgggaggccaaggcaggcggatcacctggattcaggagttcgagaccagcctagccaacatggtgaaatcctatttctactaaaaatacaaaaaatttagccagacatggtggcacgtgcctgcaatcccagctactcgggaggctgaggcacaagaattgcttgaacccgggaggcagaggttgcagtgagccaagattgcgccattgcattccagcctgggcgacagagcaagactccatctcaaaaaataaaagaaggctttttttttttaatgcctgctctctctgtttgtagattgattgtgctggtgcactcctttaatccataactaggcttccactaaacctaaagataagcctgaggggaaaacttaagattttaataaagatcttttctgagcatgtattttacctggacacacatatggctttctgaattatcctatatacctggttgcttttgagtgtcccaaatttaaaagtagctgcgtgtggtggctcatacctgtagtcccagcaactctggaggctgaggtaggaggatagcttgagcccagttgtgtgaggccagcctgggcaacattgtgagaccctgtttctacaaaaataaagactagttgggcgtggtggtgcacacctatagtcccagctacttgggcggttgaggtggctagatcggttgaggtggctagatcggttgaggtggctggatcaattcaacccaggagttcagtgctgcagtgagctataattacaccacagcactccagccttggtgacaaagcaagaccctgtatcttgaaaaaaaaaattccaaaagtgtcctatctctagctatttgggccttaggtggtgttttgggagtgttcccctgtaatgccttgccccaggcctgtagtcacgttgcagttgttttgtgtgtgtgtgtgtgtgtgtgttttaaagctgttcttgttgtccttctcaccagagctctgagttaggtgaagaaatgatgagagccttatgtcagtccttcaagtatccttcagacaggttagataaaatttacacaataatttgtaaataacatctgctttgctccctctggtttgtgggaggatactgggaaacagggtgctgctgctttgagactaaaaccttcaccttctggtaggtggtggggcaaggacaagtaaaaatgctgtaaaacgttcctattgtattgaaggtgactttttttctttttcgttattttagagacagggtcttgctatgttgcctgggttagcctcaaattcttgggttcaagcgattctcctgtctaggcctagttgtttgtactacaggcggtcaccaccatgcctggctaagatgttgttttcttgattgggtatttgcttggttgctgtaaacctttgactgtgttccagagctctgacaaagttggttcagaaagtttctacttgtttacaaaatagttctgtgtgggaactggagtttggagcttcctaatctattgttttgttgatatctacattttcccttcttttttttttttgttttttttttggagacagtcttactctgtcacccagcttggaatgatgcagtagcatgatcactgtagcctggaattcctgggctcaagcaattctcccacttcagccttctgagtagctagaagtacaggagcaagctaatctcttcatttttgaaagttgttttccctgggtatagaattctaaattgatactttaaaaaaatctctttaaagatgttacttctttgtgacattttgtttgttatctttctcctttttccttcatctttgctcctctgcatgtgccttttatttcttggaaagatagtcttaaaagatttttcagtattttaagattttctgttaatgtctggctttcggaaattgaagatttttattttctttgtttatcctgctctgggttccttgaacttgttggatctgtgagtttatagtttcatcaaatttttgttggtttgttttagagacagggtcttactctgttgcccatgctagagtgcagtggtacgataattggtcactgtaacctcaaactcctgggctcaagagatactcttgcctcagcttctggagtggctaggactagaggcatgccctattgctaatttttaaacttttcgtagaaacaaggtcttgctatgttgcccaagctggcctcaaacttgtgacctcaagtgatcctcacaccttggcctcccaaagatcttggattacaggtgtgagctaccatatccagcttccatcaaatttttggaaagttcacatcattattttttgaaataatttttttctgttctatttttctttgggacttatatattatgctctttaatattgttccataggtttcttattttcccccctctgtttcattttggatagtttttcttgctttgtcttcaattttgttgatcttttcttctgcactattatgatattaatccacttagtgaattacagtgtactataattttcatcactaggaattccatttagttttttgaaatatcttctatttttgttttcattgtgttcatgttttcagtgtttgggcattttttttttttttttttctgagatggaggctcgctctatcacccaggctggagtgcagtggtgcgatctctctgctcactggaacctccgcctcctgggttcaagcgattctcctgcctcagcctcctgagtagctgggactacaggcgtgtgccaccatgcccagctaattttttatatatttttagtagagacgaggtttcaccacgttgcccaggctggtctgaaactcctgagctcaagcgattcacctacctctgcctcccaaagtgctgggattacaggtgtgagccaccacacccggcctatttgggcatttttaatcagctgtctcactttacttgtctgcctatttcattatttctgttacttcttgtcccatttttgttgactcttttttcccctggttattcttcatattttttttcttcttgacaaacctagtaatgttttattaaaaagttcagtttaattttgaagcttttaaaaaagcctggttaatgcgtttcttcaatactctttaatttatgaattgctttgacccactgctaagatttggtctcttcgtggtctctactgaatgccctgggttataaacgaagaggctactgtgcctcctctgaaatcgaatgcctcccagcaccatgtgatcactgggagctgtttagctcacagcttcttggtcatgctctgcctggcctcacaaagtttcactcctcatgtgtgcattttaatgttcagctatgactcaaagtgaatcctgtcttgattttgagttctttttgtgtagctcttttttctttgtagttctgccccacaacttcagtcatctcagcctgacctttgtttcttcaacttgatatatctccagtgctctccttgggaatcccttttccctgatccttcaggcaccaattcaaggggaatataggggtcttgttggttttcctactctgagggatcagggtcccgtggtgtctttatttaatgactgaaaaaaatttttttcatatattttgcctacttttctacttgattacagcaggaaggtaaacctggttcctaataaaccatcatgactggaagcagaagtttggctcaaccttttaatattttggtcatatgattttttttcctttattttcccttcaattcagatatgggagatatttcatgtctgtatttatttttactacaccttaagtgattatttgtcctaagtttttctcctatttcattgctgtgtatttatcattttttaaaatttcagcttttagtttagatacggggtgggggggtacatgtacaggtttgttactaggtatattgtgtgatgctcaggtttgggatgtggatcccatcaccgtggtagtgaacatagtacccaatagttgttcagcctatgccctcttccttccctccccctccagtagttcatagtgtctattgttcccatgttgatgtccatgtgtgctcagtgtttagttcccacttgggagaacatgtggtatttggttttctgttcctatgtgaatttgcttagatttatagcctccagctgcctccaagttgctgtagaggacatgattttcttctttatggctgcatagtattccgtggtgtatatgtaccacattttgtttacctaatccaccattcatggtcacctaggctgattacatgtctttgctattgtgaatagcatggcaatgaacttatgagtacttgtgtcttttttggaagaattatttattttcctttgggtatatacccagtattattagttaaataaagtttccttatattatagcttgagtgcataaacacatctacttagtcactaataggcagatgatttctttttaacttatctcctcctacatttaggatgaagatacactaatcctcaatcctgaagacaacacttaataacaaaagtatcatcaagtcactgatgaacatatggttcagaaatcttaattaaagccttgtatattagttttttttattgtggcattaaaatgtaccacacacttaacctcttaagacaaacttatttgtctcacgggtcaggaagttgggaatagcttagtgagcgtggctctactgggttttctgcttagtttcccaccaagccgaaattaagatgttaactagagttttgctttcatctaagactttgtatccttttccaactcacttgttggtagaatttagttcctttcagttattacacttaggtccttagctactagagttctctctccacaacatggcagattgtttcatctttgagatcaatagaaaagcatttcagtcatttaaagggctcactttaattaggtcaggctcacctagaatatctcccttttgattaaatcagagtcagcttattagtgggccaattatgcgaatgatagcccaatcatatttacaggtctcaaccatactcagaaggtgaggggattatgcagggtgtttatatcagatgacggtaattctggggccattttaggattctgtgtaccacaccttgtaaacaggacaagacatttagggaattttccatttttatataatggctttaccccagtgatatgaagctactacatatccaggctaggacacagtaataatttagtgaatacttagcctatgccagatactttgcatacattgccttattcagtctccagaacaaccttgtggaaactattgataatcattcccagtttgcagattcagacacagaagctaagagggtttaggtagcttgatgaaatggaatttgggtctgaatggcctatgctatttttacttcaccacactgtttctcagcgttaatcttggtttgtatatcacaattttatgtaagtacaatatctattcagataatttactgcaaatctgtgacttatttgtagttttttggatgtgacaatgatcgtatggttttacaaagaggaagtgtccttttaaagagacatttacaaacattttatagatgacattgcatattttcttgtgttcgcttcaaaatgatttgtgggatctggggaactggacaatgggtaaaatgctgtcagtgaaacaaaactggccttaagttgataattttctttttcttttgagacggagtctcactctgtcgcccaggctagagtgcagtggcgcaatcacggctctccgcaacctccacctctcaggttcaagcgattctcctgcctcagcctcctgagtagctgggactataggcgcgcgccactgcgcttggctaattttgttgttgttattgtatttttagtagagatgggatttcaccatattgaccaggttggtctcaaactcctgacctcatgatccacccaccttggcctcccaaagtgctgggattacaggcatgagtgaccgtgcccggccttaagttgataatttttgaagctgagtgatgggtaataggatttattattctcttccatctacttttgtgtatgtttgaaaatttctatattgaacattaacaaattcatttgttaactagttttaattgtaaataagaaaaaagtgcctaaaattttatttcttcaccattgtaatttttgttttttaatttttttttaaagttttttttgtttgtttgtgttttttttttttttttttttgagatggagctttgctctttcacccaggctggaatgaagtggcacgatctcggctcattgcaacctccgctgccaggttcaatccattctcctgtctcggcctccagagtagctgggattacaggcgcccgccaccagcctggctaatttttgtatattttgtagagacagggtttcaccatgttggccaggctggtcttgaactcttgacctcaggcgatccatccccctcagcctaccaaagtgttaggattataggagtgagccaccgtgcccaactgcgtaatgtttttatgattttaaaatcacgagtttctatttttttttcatggaaccataaaactgtttatcacaagcatttattttactaaactagtattttgtaatgtttaagagcatggactcgggggatcaaccctctgggtaaatctcagtgtcatgatactcaatagtcgtatgaccttgtgcaggttactttacttctctgtccctcagttttttcatctgtcaaatggtaatacttgtacctatcttgcgtagttactgaatatactatgtaacggatagagattaggataagacagcaaaaaatatatgcacacacacacttgttacctgtgtgcatatattatatctacttaagttttattctaaataaggagcttgtgataattgtttccgttttgtaattagaaggtattatatgttcctatcatgatttttgagcctgtggttctgaaaccagtgtttctaaatatttttttcttttcacatcatgtatttacagtgtttttcagtggtagtcatgttgacatcctgagtcgcacagttcttgtttgggactgtcttcttcctcctccttccttcttcctccttcttctttcttcttcctcctccttcctcctccttccttcttcttcctcctccttcttcctccttcctcctccttccttcttcttccttcttcttttttcttcctcctccttcctccttcttccttctccttcctccttccttcttccttcttccttcttcttcttctttcttcttcttcctcctcctcctccctcctcctccctccttcctcctccttccacctccttcctccttcctgcttcctcctcctcctccttcttccttctccttcttcttccttctttcttctttttttttttttggcatagcaaccaacaacagggaacactgcttttttcacaactctgtgtaataaatgttgttgaaatatccagggtgagatctgttgagctaaattactgacattatcagagtgatttaaaattttttggagagttttgattttagaagacataaaaccctgggctctgtcctggctttattgaagcaaaatagtagtgtattagttctgagattgggtaatttataaagaaaagagttttcattgactcacggttttgcaggctgtgcaggaaatatagtggcttctgcttccggggaggcctcaggaagcttccaatcatggcagaaagcaaagggggagtgaggcacctcacatggtgggagcaggagcaagagagtgagggagaggtgctgcacagttttaaacaactggatcttgtgagaactcgctcactgtcacaagaatagcaccaaaggggatggtgttaaaccattcatgagaaatccaccttcatgatccagccacctcccaccaggccccacctccaacattggggattacaattaacatgagatttggtggggacacagatccaaatcataccaattggatttgtggtgtgggagtaaatgtgtctatattttggaaaatctcccttggtaagactgaccattgcttgaatgatttctttgagcttaactatcaacaactccttttcttgtaggtgatagaaattgaagatgcttcacccaccaagtgtccaataacaaccaagttggttttagatgaagatgaagaaaccaaagaacctttagtgcaggttcatagaaatatggttatcaaattgaaaccccatcaagtagatggtaagaaactattagatgattcaataatttttagttaaatttttaccaatatttgggtgtgaggcagctgcctcacatcctgctaagtcctggaggtaaattggtgagtggggtggggaatccacaattcccctgcctttatggagctcataaacaaatgaggaagaacaaaattgggtgatttcaaacacaatgagcgttataaaaagagaaagaagtgctacttacaaatgggtagatatagcaagtaggtttcacctaattagcaaagactggcctaagggcagctaggggttgggaagagctgtagctagctaaaagcctttttcagaaaatgctatttcagcatttttaggtatgttttctttattagagttgaatcagtaagtcagttttgagtgtttatgtgaattaatcataagggaggttctgtagttcctaccttttgagttgctagtcccctttcttgctcagtgtttactatcgaataaaggaaaagatgatgaaattatctcatgggtttttttttcctgattgactcaataaactcaaaggtatttttgataggaagccattctctttttggataaagttgctctctttttacaaaaattattattattattttttgagatggagtctcgctctgtcactcaggctggagtacagtggtgctataacagctcactgcaatctctgcctcctggcctcaagtgattctcccaactcagcctcctgagtatctgggactacaggtgcacaccaccaccacgcccagctaattttttgtattttagtagagacggggtttcaccatgttggccaggctggtctcgaactcctgacctcaagtgatctacccgcctcggccttccaaagtgcttggattacaggcgtgagccactgtgcccggccacgtttctcttttagagtattcttatgtttctttgaaccatctcagggaatacagaacatctactgtggatagcttagagaagatgaaggaaagtccccctgttctatgtttgtgttaacttgtttctgctttagtttggtgggaaaaaatcccatttagatgtaagaaattatttagctaagtgtttttttaatgctgtttcttagaagttttggttatgtttttgatgtgtttatgtaaaggaagtttttaacttggacctttaaatttaacttaatgaagctgttatttttaggtgttcagtttatgtgggattgctgctgtgagtctgtgaaaaaaacaaagaaatctccaggttcaggatgcattcttgcccactgtatgggccttggtaagactttacaggtaagagctgaagaatatgaaggtatcctgtttttgtggattcattaatatatattggattctattatgtttcaggcacagtcgtaggggctgaagataaagcagtgaacaagaataacaagatctgtctccaaggagcttatattctagtggaggagagagctgctaatcaaataagaaatatgtactttcagaaaatgaatgttaagggaggatattgagttaggaaaggcatcttttaggaggtaatgtttgagcagaggtcctaatgaagcgaggctgtggggtttcaggtatggccaacaacaactgcaaagattctaaggtagaaattaccttttttttttttttttttttttttacaacttttaacggtttatgatgttaaagtaatgacaaagtaaagtatcttttactattaaaattgctgcatttctaaatggcaggagttgtagcagagatgtaaaattggtgaatgtatttgtacttttaaaccataaagtaattatagatttaatgggtcagaacacattaaagtggaaaaatattatgtaacatgattctcttctaaatgagcgatggtattttttgaaagactatagggacattctgtggagacctaggacttagtattggtatgggatcattttatactattcacattgatcatagaatcatggagctttagagttggaagagcctgatacatcatctagttgaactttggcattttactatctctttccctgtgccttgcctggtttggaaattctggccgtttattgtttaagcaaaacaaagctataatattgtaagattgcttaatttattaaatttttttgtggatatttaaacgaaggtgacaatctgttttcttataggtggtaagttttcttcatacagttcttttgtgtgacaaactggatttcagcacggcgttagtggtttgtcctcttaatactgctttgaattggatgaatgaatttgagaagtggcaagagggattaaaagatgatgagaagcttgaggtaacttattttaaatgttttctattattaaaatagtcacatgaaattcatatagtaaactatttttaattttttttaatttttaatgttttttaaccagtgatgcatatttcagtgggaatatttaatattcacatgtttttagtagctacttaaaaaaatctttatttccccacaaaaggtttctgaattagcaactgtgaaacgtcctcaggagagaagctacatgctgcagaggtggcaagaagatggtggtgttatgatcataggctatgagatgtatagaaatcttgctcaaggaaggaatgtgaagagtcggaaacttaaagaaatatttaacaaagctttggttgatccaggtaaggtattaatagacagtgacataaagaagcaagttgaataaaaaatgtgtttatattttaacaaatagtaattgcacagctactaagtatctggtctttgttgtggttatccttcaggtttttgccttttagaaaattcttagtatttcaatagaataaaatcacccttaatgtcgccagctgttcagaatttatttgctgagtctgaaagtgtttagggttttaggggataccttgtaaacacttaaaaatgcatcaaatgcctgtgttgcaatcaaagattcttccagctatccaaatattaggtgataacaagagctctctccatatcctgaaaacagtttgtgtctttccaaacttcatgtcattagaagaattgctgcttgcttatctccttttaaggggccatcagtatgaaaggttaatattttcaatactgttgatccttatgtgatagtaatctgatgtgagagccagatgttgatatatttgccacttggaaaagcaacacgttgtactgtctgcaaaactaaaattattttttaatctacgattattaatttgtgcaactttttcttcatatgtttatcttgtcatatcatatttaagacactattgaggttttatttttgttgagaaagtctgggtaattgtcattgtcaaagtgatagtaatctttagaatccttggctttgcctcttttttaaagataatgaggtagttaatacatagcaaaataactgccatcacaaatctaaggcctaataataagtttatctctttcccacgattaaataggtgtttataaatcttgtggctggtttattgttgaaaaattataagctagtgtctagtatcattgtagcagattttttccacaagatttccttgaaactgtttaatacaacagtttcaggtgcttagtgtacttatttgttcatgaaaaaaatgaagaaaaaaaaaattaaagcttctaacatgaagggtaacatttgtcattgccatattttatcatttagtgacatttaaaaaaaatttttggccgggcatggtggtgcactcctgtagtcccagctactcaggaggctgaggcagaagaatcgctcaaacctgggagctggaggttccagtgagccaagattgtgccactgcactcccatctgggtgacagagcgagactccatctcaaaaataaaaaacaaaaaaacaaaaaaaaacttttcattttggaataattttctgtttacatgaaagttgaaaaggtagtgcagagagttcccatataccctacatctggttcctcaattgttaacatcttacattgccatggtagatttgtcaaaactaagaaattgacacattattattaataacttcaaactgcatttgtattgcaccagtttttctatccagggttctacattgtatttagctgtcatgtctctaacagtcttctggtctatgacggtttctcaatctttattttttcattatctcatcagtcttaaggaggaccgtccaggtagatatcctgtagagtgttctctgatctgaatttatagtttttcttgtgattagactgagattagactgaggttttgaaagaatataccagaggtgacataccctttttgtcacatcatatctcatatcgggggtacatgataagcacttgctgttactgatgatgttaactttcatcacttggctagggtagagtttgtcaggtttctctcctgtagagctgctacttttacctgtccctcatctgttcattggaatccagtcactcaatctagcccacctgaatgggaggatggtggaaattaagctgtatctcctatagtgggtaatatctacacataaaatttggatttttttaaagaaaaaattatcttttcttacccatttatttagcctttgatttatataattatatactcatctatttttagttcgtgcattggactataaaccattactgcattttttttttttttttgctcaaattgtttcactttgaccattgggagctttttttaaggtgaggtcctctaccctttgatatgtccctatccttttggctttgagcactttattactttctggcattacaggatgctccaggttcatgttatattgtcctggccccagaatcagccatttcttgaagacatcatggttccttttactgaaaattgacatttacaaatgtaaacacacccatataatttgcaaatatatccttccattctgtgagttgtctttttacttttttatatcatcttttcagtactaatctttaaaattttgattacatttaatttacctatttttttcttgtgttgcttttgcatttagtgcatatccaagtattcattgcttaatcgaaggtcatgaattttttcacctgtgttttcttattttatagttctagctcttgtatttatgtttatgatctattttcagtttatttttgtatatggcatgaggtgggagtccaacttcattttttgtattttgatatccagttgttctaacaccatttgttgaaaagactattctttcttcattgaagagtcttgacaccattgttgaaaatcaattgaccatagatgtatgtgtttatttctaggctctcaatattattgtattgatctatatgtctgtccttatgccagtgtgacattgttttaattactgtagctttgtggtaagttttgcaatcaggaagaagtcctacagctttatttttctgtctcaaagttgttttgctatttgaggttccttgaaatttcatttgaatttgatgattggcttttatatttcctcaaagaaactagctgggattctgttagatattgcattgaatctgtagattaatttgaggaatattgccatcttaacaatattaaatcttcccctccatgaacatctaatttctctccgtttatttaggtctttaatttcttttaataatgaaatttgatttaggtcctttaatttctttagtgtaaaagtcttggacttattttcttaaatttattcctaaatattttattctttttgagccttttggaaataaaattgttttaattttattttcagataattctttgttagtgtatagaaatacaacagatttttgtatactgattctgtatcctgcaacttagttgagtccatttataagttctaatagttgtatgtgtgcgctcacgcgtgtgtgtgcgcgcgcacgcacgcgatttagttttctattaagaaaatcatagtctatgagtagaaatagttttactttttcctttccaatatgaatatcttcaacttctttttcttgcctaattgcccttcttagaaatttccatacaatgtcgaacgtaagtggtcagagcagttggttgtcatgtttttgatctcagggaaagctttcagttctccaccattaagtatgacattagctgtggatttctaataggtgtcttttatcaggttgagtaagttctacattgggttatattttttgtttgttttgataattaaaaaaataaatacctagattacccttgttaaaacttaagaggggctggtttctccattaggttttactggatgttcttcaggaaactgaagctctacttttattttcttttccagagtatatataagtattagagatagttcctctgccatagctgggtaaccatctgcaacaagaatattctaatatccatcatgtataacatggaatatattaaaactgttgttaagttttaaggtttagtgatagtatctagatataattttctttgccacctaagtctaaagtgtcaggatctgttcagtacttctaaatttattagaagggatctgttcagtataacacttaattttccagtacatgttttccattttatgcccaatttatcttctctgatttggaacaaattagtgatagtgaagaatcatataaatggcagcagagtatgtgaagactgaagtttgggtgtaatgttaaagaaaagtctaaattgaagttcaagatggaaacaaaatgtcagaaccagacagttttgggtatgagattcttaaggatgagctgaggttgtaaacttataaggtaggctattagatcagaagcctggaaaattgggagtatgtattaggattggaaacagtgtttagagctgaccagagttaagatagtagtgttcatctttcaacttagctgctctggttatctcttcctgcgtaacaattatcccaagccttagtagcttaaagtgacaagaatcagctgggtgcaatggctcatacctgtaataacaatactttgggaggccaaggcaggaggattgcttgaggctgggagtttgaggccagcctgggcaacatagtgagaccccatatctacaaaaaaataaaagaattaaccaggtgtggtggcacacacctgtagtctcagctattcaggaagctgacatgggatgattgcttgagtccaggagttcaaggaagcagtgaactatgatcactgagatcataatcatcacagagtgtgagacccagtttcttaaaaaagaaagtgacaacattttgttaactttcctagttttactgggtcagggatttaatagaggtttacttggacagttctaaacattttatcaacttttctctctaatatctttatggttttttatgtaaaaaaattcaccaataggtggcaatgtaacactgaaaaataatttgcatttgttactattataatagcatgtgacaaaacctttatttgacctttcttccctaacttaccatttgttttgaggcatatttttctacttaatgtacttaaacaatctggtggagttttctaattcacattactgtttttagaagaatgttccacattttgtagcttgagaggacataatttttatgtgtgtgcatgaatgtgcatatgcacaggattaactcaaggtactgtttgctttaagcaataagatatatctatgtaattttataaaataatgacaggtttccatagtgtattgaaccatcttaagttaacagactcttttagtcaggcttgaatttttgaacagaagaaattttcttcaagtctttctctaaattcctgttcttctgctctccagagcctcatggctgccattccccctgtagtttctgtataattatttataagtgtaggtattttgaaaccctcctatctgatatatatatgtcattgtttgggaattaagttttctagaaagtatataaggtaacaaacatttcattttatgtaagtatgtatgtatgtatttagggggcagggagatggggatctcattctgttacccaggctggagtgcagtagcatgattatagctcactgtagcttcaaatcctgggctcaagtgatcctcccagttcagccttctgaggagctaagactacaggagtgtgccgccatgcccaactacatttttttttttttttttggtagagacagggtcttactgtgttgcccaggctggtctcgaactcctgacaacacctagataattatttggagatgaggatctcactatgttacccaagctggtctcgaactcctgacacacaactaattttttggagacgagggtctcgttatgttgcttaggttagtcttggcctcctggcctcaagcaatccttctgcctcagcctcctgagtagtagctggcattacaggtgtgagccaccaagtccagctaaaacttactcctttcgaacattaaaaatacttatttttaattttttatgttagtaaatgttatatacatttctatcttataattcatattctatttaatatgatgaataacatgtttaatatatgaataacaattttaactttttcattgactcagggttattaatgagtgcatttacttttatttttattttatttaatttttttttttgagacggagtctcactctgtcacccaggctggagcgcagtggcgcgatctcggctcactgcgagctccgcctcccgggttcacgccattctcctgcctcagcctcccgagtagctgggactacaggcgcctgccaccacgcctggctaatttttttttcttgtatttttttagtggaaacggggtttcaccgtgttagccaggatggtctctatctcctgacctcgtgatccgcccgtcttggcctgccaaagtgctgggattacaggcgtgagccaccgcgcctggcttacttttattcttaattcttctagttcttcagatatccgtactaaccatagggctaccactctccttccattgccatgccaacaaatagttcttttaagttaaagaaattataaaagtaatacatatccttaagcaaaataaaaacagaagaaaatgttgtatattgaaaagtaaaagttccctacctcctagtctcattattgtttcatttatatccgtataggaattttttgtgcttacagaagcatgtattctccttatttggtattgcaacatttaggtggtcctcaaagccaccctcaggcttggtaactcataagaaggactcacagaactcagaaaatccattagactcatggttatggtttattacagcaaaaatatacaaatgggatcataatatggataactattctgcaacacactcctttttatttagtaatatatttgtcatatctttcaaggtttgcacatagagatatacatcattttttcagattatttatttttctataagttattggggtacaggtggtatttggttacatgagtaagttctttagtggtgatttgtgagatcctggtgcatccatcacccgagcagtatatgctacaccatatatgttgtcttttatcccttgccctcctcctactcttaccccaaagtccccaaagtccgttgtgtcattcttatgcctttgtgtcctcatagcctagcttccacatatcagtgagaacatttgatgtttgcttttctattcctgagttacttcacttagaataatagtcccaagtctcatccaggtaattgcaaatactgttaattcattcctttttatggctgtgtagtattccatcatatatatatatatatatatatatatatatatatatatatatatatatatatatatgccacaatttctttatccactcattcattgatgggcatttgggctggttccacaattttgcaactgtgaattgtgctgctataaatatgcatgtgcaaatatcttttttgaataatgacttcttttcctctgggtagatacacagtagtgggattgctggatcaaattgtggttctacttttagttctttaaggaatctccacactgttttccatagcggctgtactagtttacattcctaccagcagtgtagaagtgttccctgattgctgcattcacaccaacatctactgttttttgattatggccatgcttgcaggagtaaggtggtatcacattgtgtttttgatttgcatttcactgatcattagtgatgttgagcattttttcatatgtttgttggctatttgcatatcttcttttgagaattgtctgttcatgttcttagcccactttgtggtaagattgtttggtttttttcttactgatttgtttgagttcattgtagattctggatattagtcctttgtcagatgtatagatagtgaagattttctcccactccgtgggttgtctgtttactctgctgactgttccttttgccatgcaaaagctctttagtttaattaggtcccggctatttatctttgtttttattgcatttgcttttgggttcttgaccatgaaatccttgactaagccaatgtctagaagggtttttccaatctcatcttctagaatttttatagtttcaggtcttaggtttaagtccttaatccatcatgaggtgatttttgtataagatgagagacgaagatgcagtttaattctcctacatgtgggtagccaattatcccagcaccatttgttgaaaagggtgtcttttccccactttatgtttttgtttgctttgtcgaagattagttggctctaagtatttgggtttatttctgagtcctctattctgttccattggtctgtgtgcttatttttataccagtaccaagcttttttggtgactgtggcctttacagaatagtttgaaatcaggtagtgtgatgcctccagatttgttctttttgcttagtcttgctttggctatgcgggctcttttttggttccatatgaattttagaattgttttttctaactctgaagaatgatggtgttattttgatggggattgcattgaatttgtagattgcttttggcagtatggtcattttcaccatattgattctacccattcatgagcatgggatgtgtttccatttgtttgtgtcgcctatgatttctttcagcagtgttttgtagttttccttgtagaggtcttttgactcctttgttaggtatattcctatctttcttgtttatttatttatttatgtatttatttatgcagctattgtaaaaggggttgagttcttgatttgattctccacttggttgctgttggtgtatagaagagctactgatttgtgtacattaatcttgtatccggaaaccttgctgaattcttttatcagttctaggagctttgtggaggagtccttagggttttcaaggtaaacgataatcgtcagcaaacagggacagtttgacttcctctttactgatttggattccctttatttctttttttctttttctttttctttttttgagatggagtctcgctctgtcgcccaggctggagtgcagtggtgcgatcttggctcactgcaagctccgcctcccgggttcacgccattctcctgcctcagcctcccgagtagctgggactacaggcaccggccaccacgcccagctaattttttttgtatttttagtagagacggggtttcactgtgttagccaggatggtctcgatctcctgacctcgtgatctgcccgctcagcctcccaaagtgctgggattacaggcgtgagccaccgcacccggcccagatcccctttatttctttcgtctgattgctctggctaggacttccagtactatgttgaagaggagtggtgagggtgggcatccttgtcttctttccgttctcagagggaatgctttcagcttttctccattcagtattatgttggctatgggtttgtcatagatggcttttattacattaagatatgtcccttgtatgtcgattttgctgagggttttaatcatatagggatgctggattttgtcgaatgctttttctgaatctattgagatgatcatgtgatttttgtttttaattctgtttatgtggtgtatcacatttatttacttgtatgtgttaaaccatccctgcatccctgatatgaaacccacttgatcatggtggattatctttttggcatgttgttggatttggctagctaatatttttgttaaggattttagcatctatgttcattgaggataatggtctgtagttttcttttttggtcgtgatctttcctggttttgctattacggtgatgaatagggatgaattagggagggttacttctttctctgtcttgtgggatagtgtcaaaaggattggtaccaatgctttgaatgtctggtagaattctgctgtgaattggtctggtcctggacttttttttcttggtaatttttaaattgccatttcagtctcgctgcttgttactggtctgttcggggtatcaaattcttcctgatttaagctaggagggttgtatttttccaggagtttatccacctcttgtaggttttctagtttatgtgcgtaaaggtattcataatagccttgaatgatcttttgtgtttcagtggtgtcagttgtactatctcctgtttcgtttctcagtgactttatttggattttctctcttcttttcttggttaatcttgctaatgttctatcaattttattttatcttttcaaggaactagcttattgtttcatttatcttttgtattttttgttttgttttgtttcaatttcatttagtactgctctgatcttggttatttcctttcttctgctgggtttgggtttgttttgtttttgtttctctagttcctagtgaccttagattgtctgtttgtgctctttcggactttttgatgtaggcgttcagggctatgaactttcctcttagcactgcctcagctgtatcccagaggttttgataggctgtgtcattattgtattcaggtgggtgtattcagctcccacgcaaaccgaaaggctggtcttgtctcactcccatggtgtaccgcaccccctacccctccagcgccgaaacagccccgagtgtgtttgagtctggcttgaaaacttgtccccggctttccacctccaagctgcaaaagaaaagggctttagttcatcccccacctgtgaagtctgcaatctggatttgcgccctccccggagttctggccaggaggcttcttgccccattcaaattgttaaaaagttcagctagagaagtccttctccctgtggagttttaccctctgctctgatggccatcctcctgatggatccctgtgttgccaggcaggaatgggctgcttggggatccagcaagctcccagtgcctttctgctacttcctctacccctgtatttcgctcggcttggctttctaacttgactcaactccagctaaagtcaggaatttctccagcaaacagaccttcagcttctccagtgggggtgtgtctacctcattaattttaactctgtgacttattccattatcccatggtttaagccccatttaccagatcccctctgacaaatttttaggttgttttcaattttcctccgtaacaaaccgtgctgcagagaacattcttttatgtatctttgggtgcctgtggaagagtatctttgggaccaattcctagaaattgaaatatgggtcaaagggtttacacattttgcattttgataattattgtaaaattgacttccaaaatttttgatactaatttagactcccacagagtgtatgagagtacccatttcaacgcatcctcatggataccgaatattaagtggtaaaaccatttaaatcactgctgtaaaaggcatttttttctctgtagaaaatgttttcagattcaaagtaagggatgcataatttttaaatacaaagctagagattttagttttacaaaatattagtttttttttgttgttgttgttgttgtttttttttactatttgtgtagccccaactgaatactgaataacagttgttattatttgatctgtcatactgaagctgttacttttgaagtcatgtaaaagttgcattttctctaatgcttaccagatgggagatagtttgacagctgctttgttgaaatcagcaattaagtaatatgtgtgtatatgttaaccagcaagcaaatagagtatgtattatgccctggaaaaaatatatatcagctgggcgtggtggcttatgccggtaatcccagcacttgggaggccaaggcgggcagatcacttgaggtcaggagtttgagaccagcctgaccaacatggtgaaacctcgtctttactaaaaatgcaaaaaaattagccaggcatggtggcgggcacctgtaatcccagctactcgataggctgaggcaggagaattacctgaacccgggaggtggaggttgcagtgacccaagattgtgccactgcattccagcctgggcgacagagggagactccatctcaaataaaaaagaaaagaaaagaaaaaaaatatgtatgttattttaacaaataagcctttagtatttcttctaaaagagtccacagatgctgtggaacatatttgttcaggtacaaatgcattccatagtaataaaatgttgttattttttatattgcaatcccaaatattttctgagtttaagcttttaagatcttttatagcttaaaagctgttctccctaccctccatacccatgtaacaaccagtttcactttcttttatcagttaaaatttttccccagcaatgaatgttagttatttggactaagtgggaagtattatatggtctgttgtgacatatattattcttaaagtgtaacttttgaaatttgtcttttcatgtatatatacattgctcttagtctttgctgatagtttaagttgatatactaatgctgaaatagctttaaagacttttcaattttaaaagacatttttaaaaataggctatgtctgttgggggaactttttccctcttgttgtttttatttttgcttatttttgtaaactcagaggaccctgactaccatttatagtggtatttcaatgctctaccatttggatataattaatatagttagtgctgtattaaccaaatacgggagcagataaaatatgtttatacttacaacgatgtcattttatcttcctgtaagatcagcactttaaagggattaactttatttacttaaatggatcacattttcagttttattatatattaattgtgttatttttctgtttatttttgtaggccctgattttgttgtttgtgatgaaggccatattctaaaaaatgaagcatctgctgtttctaaagctatgaattctatacgatcaaggaggaggattattttaacaggaacaccacttcaaaataacctaattgagtgtgagttaatatctctgattatgcagtagaatattggtatttcctcagatatatttttgtaacgttaccatttacctttcttctacttattctagtatagtcctagaccatgatctacataggttcatcttagtctgctgtgaaagaataacatacttttcaaatgagatgctttataaatgagtggtaaaatacagttaagagatacgctattgtgaatgttcatatataaatatggaatgtgaattattgcaagagtatcagaagtcttaatgattgctttagaaagtacataagcatatgtgattactccagataattttaaggggatattccagttttggggcatgtactgtcaagaaatcagaaagaaatgggaactgtgaacattttagtaaagtggagatgggagaaggagaggtttgctgaatccatggcaggacagtttgctgaggctaaaggtagttgatgtgaacctagggaaatgacttgtgaattaccctcattttcgtatgtctgtggtgacactaaagaagggaacatgagattattcagcaagtaactaattgaaatttcctgttataatctctcactttttttctttttcccactgtaatggctttttgttatttttctctgtgttacattcctttagtgtatttatggtaactttttgctattttattatttgtaatactagtcatttcactttagcctatactttatgtttgtttttatctgttccagttttcctcttttctattctgttaccctatttatagaaatgctgtttcatattgtggtcctatatagtatgggacaagtgatggctctgttaatttttacaaaatgggttagtcttacaaaatacattagtaattaattttttttttttactatttgtgtagccccaactgaatactgaataacagttgttattatttgatctctcaaatattatttggttattctggaaatgaatcagttaatataaattaacttgcttagtagcttattacctcctatttattgttttgacttagtatctcctttcttcacaagatagcctcactgaccataaaatcatggttagattaatggaccacttgttttatacttcatatctcttataaagaataatagtgagtttgaataaactgtccttaggtatttttaaaaaacgttcatgtctagtatttagggatggtttttacttcaattttctctctcgttttggtaattcacttgtagatcagacttataaccatgtttattctatacttagcttgatattctttctttatagcttaattctaatgcatgtgtttttgacatgagcatttcattggggaatttttctaagtctttttaacgattgttaatgttgttaatgaataatgtcttctctcttagatcattgtatggttaattttatcaaggaaaatttacttggatccattaaggagttcaggaatagatttataaatccaattcaaaatggtcagtgtgcagattctaccatggtagatgtcagagtgatgaaaaaacgtgctcacattctctatgagatgttagctggatgtgttcaggtacaaatatgttccatagtaataaaatattcttacttttttatataacaatcccaacatattttctgagcttaaagtttaataattttgtgttttctttcccgctctttcagtagatagttttacagttatatctccttgcgttgtcttaaaaaatttctgctgcattcaacttttaaaaaagaagttccgctgagtttaaaacatagttgattcatttgccaggtgtaaagcctcatatcttattatgttaatgtttagatttttcatccttaagatagggagttccttaagaggaacatagctactatgatgaagttcctatgctcaccctaattctgtagtacagtattataaatctcacttttttgaaatggttataggagaggccagtatgaattaagagaggagccacttttaaagtaatcctggagaaacagttttgttactttcaagtatatataataacctgaacagactagtggtgtcgtttacatacagattttcagtgaatctatattaatgaatggataagtgtctagagactgagctggcagttaatagatctcaagatacgcactttctctgtagatgttaggtactgatgatagcctcaaagatgttttaacaaatgagacaggctattcttttggttggatatacagtttgccctccatatctgcaggttctgcatccatggattcaacctaccatggatcaaaaatatttttttaaaaaatagataaaatggacagaggctaggtacagtggtgcacacctgtaattccagcactttaagaggccaaggtgggaggatcacttgagcccaggagttcaaggctgcagtgagctaaaatcatgccactacactccaggctgggtgacagagcaagaccctgtctctaaaaaaagttttaaaaaattagccagccacggtggtgcgcacctatagtctctgtcacttgggaggctgaggcaggaggattgcttgagcccaggaattcaagactgcaaggagctaagattatgccactgtacttcagcctcaatgatagagtaagaccctgtctcttaaaaaaaagaaagaaaataattaagaaaaaaatggatgattgtgtctgtactgaacatgtacagacttttttcttgtcattatttcctaaacaatagagtatagcaactatttacatagtatttgtattgtgtgaggcattataagtaatctggggatgatttaaagtatatgggaggatgtttatatgttatatgcaaacactacattatttatataagtgacttgaactttcatggattttgctatctgtggaggtggggtgggttctggaaccagtctcccatagatactgaggcatgactgtacttgccatcattataaggagtagttgttccgtttggtcaggttggctacatgtgctagcaagtaccctgtttctgtattgctgctactacccaggcagcatttttctttctggtttaaggagtaatttctatttagcacattggtgttctgtttttctactcttacaataaaatggtttcaagagtgcttgtagaggggttgctttcttaattgggcaaatattccctctaaaattatatgttattgtttgacatattagcatatctttctaagaagccaactcagactgcattagactttgattcctaggttttattacatgattaaagcaaggcattttgctcacactacctactacatcccctccataccttttgttatttttttttctgtacagagaagactattttgaaaacttaaattgctcacttggtaatgtgattgcttcaatttaaaacctacctggtgtgttgcagtgtctttttaccagtgtaccatattgtatagtcatatgaaatacattgtgtagataattgtgggtttagaaagggtaaatatatttaagaaaatgttttcttatatgtttagtgcctatttatttatgtgtatatttcagttataagcaatgagaacttgtagttcattcctgttaaatatttagattaattttcattctctttcttgttaattacagaggaaagattatacagcattaacaaaattcttgcctccaaaacacgaatatgtgttagctgtgagaatgacttctattcagtgcaagctctatcagtactacttagatcacttaacaggtaaacaatacaccttgttgatttcatcttctctataaagacattctttttccaaagaagattatttcagtcatcttactatgtctgttgttctttttcagttttgcatttgaataaaatgggtatgcttaaaagcataaaatatttctaattaaaacactgatgctgtcaaaattaaaatcaagaagcaaattgatgaaaaagatatacagcacatatgaataatgcccttaatttgtaaagagcttttatttcagaaaaattatgaatgtgaataaatccataaaagaagatatacaaaattccagagtatttttttaaaaagtatttacccacattaataataaaaggtgtataagttaaattcatgagtttgtttctcagttatttaattaacaaaggttgaaggcaaaagtaaaatagaaggcaaggcatgtagtatgcctaaaatacaccaaaatgctaacagaagttgttttctgggtgcttttgttatgaagaccttctagtttatttcttgtatttttctatgctttaaaataatacaatgaatagtttttgttttaccatcaataagctttttgtgtgtgtgtgtgtgtctgtgtctctctgtgcctgaagatgtctgtcttcacacaacaaaacctaatctttggactggagtgagatttcttacttgttgatcacttattctggtacctttccccaaatgatattactgatttaattaggagatacaggttagagggtgctctttggccaattgtgaatacagtaattgatcaaaaaaaaaaggaggatggaagtacgtacacacatattaacatgataattatagctaaagtggtactcttttttaatagcagtgcatcctagagagtaaaatatgatggttctcaagaaacattctgctggggaaaacagtgtttgaatcttagtattttatggaactgcttttttgcttttataaaagcaatttttgtattgacttttggaagaaaatcagttccaataaagcacacattttcatttgtatatctgtcagaagctgatagatttactatactattctgttttgaataataaaaattgcaggcataattaaataaccaaatagttatcccaatgagagagttgctgtatagtttaagagacagatgttcagatctgtctttaattaatctctgagtaataaggagtaataaatttggtcatttaatattttttccttttaaaatgttttatattagggaaaatgctcacaatagtgttttcaggttttatagaattagttgtctttaataaccaatcataggctgagcatggtggttcatgcctgtaatcacagcactttgggaggctgaagtgggaggattacttgagctcaggagttggggactagcctgggcagcatagtgaaaccttatctccacgaaaaatcaaaaaattagccgggtatggtaatgcacacctgtagtcccagctacttgggaggctgaggcgggaggtttgcttgatcctgagaggtcaaggctgcagtgagacatgattgtgccactggatttcagcctaggcaacagagcactaccttgtctcaacaacaacaacaacaaccaccaccaccaatcacaaatggtaacagctcaggtataaatgttaagctctactcttttgagttgacctcatggaggtagatagaatgatagatacccgaatctgggaagtatgtgtgtgttgagggagggatagagagaggttggttaatgggtacagacacatagttagatagaaggaataagttctactgtttgatagcagaatggggtgactgtagttaacaacagtgcattttatatttcaaaatagctggaagagaggactcgaaatgtttccaacatataaaaatgataaatactcaaggtgatggataccctgaataccctgacttgatcattgcatattctatgcatgtaacaaaatatcacatgcactcccaaaatatgtaaaaataatatgtatcaatttttaaaaattttaaaaaaacactctttttgagagcaatgcaattatttaagaatttagggggctttgctttattctttgtgactatcattgataggagtaaatatctaaagcactaattgccatagctaaaatctaaaagatatgattgttaaattatcacctggtaccgtgaatctttaagttttagggtgtggggttttccccttaccaaatgcaatattacccatagagtagaataacctgagttaaatagcctctttgaaaaacattcataaaaggccaagtgggttatatgaatggctactctgtcttgattctcagtacaaatcttcacagtatttctcttgaaatatcacctgcctattttacttgcatttaaaatgtttggtattttgtctgttaaatattccagaaattttttgtttctacattaggcttttttagactgtggttacttttaagaagttcacccaaattttgtttttaacattagcagcagtttcatattaattttagtgataatttataatatttgcagaatgaaagtcctaagggactggcttttaaagaatattgaggaaatctaaaatcctcttaatttttcttagttttctttttttcagtgtaattctatggtttgccttttattgtcaggtatcagaagtttataataacatgtaagcctctgcaattcagtaaacacttaaggttttataagcatgtagatacttaattttttaataactaaatattagtctggctttaaacttaaaatccacacactgtcttattttgacaactgtgcaaaaaatagaacacaggaaaagatagcccatggaatgtgagaaaatattgcaaaacatatatctgataagggattcacatgcagaatatagttgtcccttggtatatgtgggggattggttctaggacctgcctgtgtataccaaaatttgctcatacacaaatcccgcagaacctgcatatatgaaaagtcaaacataggtttcacattctgtgaatactgtattttcaatcaacatttggttgaaacaaagtctgtataagtggacccgtgtggtttatacctttggtgcgcaagggtcaactgtatgtaaagaactcctacaactcaacaacaaagaaacagtctgtttcaaaaagaagcaaaggatttgaatagacatttctctaaagaagatatacaaatggccaataagcacataaaaaaatgctcaacatatctactcattagaggaatgcaaatcaaacgtacagtgagataccatttcacacccattgtggtggccattataaaaaaaaaaaaggaaaataagtgcttatgaggatgtggagaaagtggaaccctgtacattgctagtaggaatgtcagatgatgtggctactatggaaaaacattgtagtaactcagaaagttagacatagaattaccatttgatctaatagttccacttataggtatacccagaagaattgaaagcaggaactcaagcagatactgggacacttatgtttatagttgcatcattcataatggcaaaaaaaggtggaagcaacccaaatgtccattgatggatgaatgcataaacaaaatgtggtatggacatacttcagtggaatattagccttataaaggggggaaattccgacatttactaccacatagatgaagcttgaagacattaatgctaagtgaaatatatcagacacaaaaaggcaaatactgtatacttctgcttaaaggtacctagagtagccaaactctacgagtagaaagtagaatggtgattaccaggttctgggggacgaagggaatgggaagttactgttaatgggtactaagttctgtttggaatgatgaaaaagttctagaaatagagagtgatgatgtttgtacaacattgtgattatacttaatgccactcaattgtgtacttaaaaggtagttaaaacagtaaattttttattttattttatttttattttactttaagttctgggatacatgtgcagaacgtgcaggtttgttacgtaagtatacatgtgccatggtggtgtgctgtacctatcaagccatcatctagttttcaagccccacatggattaggtatttgtcctaatgctcttcctccccttgcccctcaccccccaacaggccccagtatgtgatgtgcccctccctgtgtccatgtgttctcatttaaaacagtaaatttttaaaatgtatattttaccagaatttaaaaagtacccccaaatggagcacagtaatatgcttttgtctctaaaaatgcatggacccaagtgccactctttagagattgattcaaaaggtctggagtagggccgatgcatctacagttttatgagccctacaggtgattttgatggaccatcagcttaagaaccattgctccaaatttttttctttggtaaggggtgagctgagacctgagatgagtgaactagacaaggggaacatggagaaatgacactgaaatgttaactttgatggttttctctaagtggtggaaatattaattcttttgtattttacttgttatatacatttctgcaaaattacaaaatccaagaaatatacatatatgtaaaacttccataatcagaaaaatactttaaagtttcattttgtttttaattgacacatggtaattgtacatattaatgggcacagagtgatattttgatacatgtatacattgtgtagtgataaaattagggtaatttagcataactatcacttcaaacacttgtcatttctttgtggtgagaacattcaaaattctcttctagctgttttttaaaattatatttcttttaattaaaaatatttatttaaacattttttatatagagagatggggtcttgctatgttgcccaggctcgtcttgaacttctgggctcaagtgataccccatcacagcctcccaaagtgctgggattacaggtgtgagccaccatgcttgcatgaaatagcctcatctggctatttcaataagttattaagttaaatttagtgtttaaaaatattatgactaacattggaatagtgtacttcaagctgggaaaagaatgtataatagtaatttccaaatgtggttgtactgtcagaatcaccattaaatgcagaacactactaaatttacaaagataaaatgatactaagtgtttctgaggctatagagaaatgagccctcttgatggtaacataaattggacagtaatttggaaagggacgtcaaaattaatttcaattgtatgcttttttccaaaggaaatggtcagaaatgtatgcagagatttatattaaaagatgttaatctcagggtttgtttcaaaacttagttttctggctacagaaatagcaatgtgtgttcattgtgaaatatatatgaaatattgaaaggcactaatacaataaaaactacctataatcttataaactagaagttggaactgctagttatttaatatttaatatcttgctttccagtttttaaaatgtatgtgtgacacttaaatgtcataaacacacactacataaacacacaatacatatacattgtgtttatatactatatatatatatttatttatttattatttttttaatggctggaattatattatccagcttgtgacctaaagtgaactgttacttgttgtggcattatttataataatgaaaaattgaaaattaacccaaatcctcaacttttggggatagtttatattatggtatatcaccataatctaataccatgcaggaagatacattaaatattataacatagaatattgtgtgttaatatttaggaatatatagaatatattatgtaataaagatgaaatagtacccatttctgtgaaataaaaaggatatgtatgaaaatgcatagcaatgtgatcaaaaagataatgccacaaaatattttttagtgtacactctaatattttcaaattagtagaattgtgtttataatgtgtattaaattacctcttcaaattggctctatccccttctctctgttttgatatgacatttatcagctcttctgactccatcaaccacgtctcaagatctcttccacattcctgatcattttaactctgctgcattaagttagtatattctgacatatcttccagctaagtagtttttgtctttggatgtgtgtcttatgctattaagaggaatttaattgaaatgtaaaactcaatggctttctcctgaggtcaggaacaaaacaaggatgtcacttttgcttcttatatttaacattttctagaggttctggccaggacaattataccagaaaactaaaagtatgccacagtgtcatggaaggggtaaaactatttcagtttgcaggtgacatgatattgtatagagaaaaaatttattgttttaagttttgtgggtacatagtaggtatatatatttatggggtacatgagatattttaatgcagccatgcaatgcataatcacatcagggtaaatgaggtatccatctcaagcattcatccttaaatgacaaacaagtcatttatattattttatttattttaaagtgtacagcaaattattgttgcctgtagtcaccctgttctataaaatattagctcttattcattctacctaactatatttttgtacctaatgtccatctctcctttccccctgccctactacccttcgcagcctctattaactgctgttctacattctatctctgtgagttcagttgttttaaattttagctcctggacgggtatggtggctcatgcctgtaatcccagcactttgggaggccagggcaggtggatggcttaagggcaggagttcaagaccagcctagccaacatggtgaaaccctgtctataaaaaaaaatacaaaagtcgaggtggcatgtgcctgtaatcctggctactcaggaggctgaagcaggagaatcgcttgaatctgggaggcagaggctgcagcaagctttggtcatgccactgcattccagcctttgtgacagagctgcctcaaaacaaaaaacaaaaaacttagctccccaaaataagtgagaatatgtaaaatttgtctttcgtgctgtttcatgttgtttgaaatgacaggatctcattctcttttatggctgcatagtactccattgtgtacatgtaccatattttctttattcattcatctgttgataaactttgggttgcttccaaatcttggctgttataaacagtgctgcaacaaacataggagtgccaatctcttcaatatactgattttctttcttctgagtatatatccagctgtgggattgcaggatcatatggtagctctatttttgcttttttgaggaacctccaaacttttctccatagtggttgtactaatttacattcccaacagcagtgtatgtgggttcccttttctccacctcctcgccagcgtttgtctgtcttttggataaaagccactttaaagggtgagatgatatcttattgtagttttgattagcatttctcagatgaccaatgatgttgagtaccttttcttatacctattttccatttgcatgtcttcttttgagaaatgtctactcagatcttttgccaattttttaattaggttgttagaatttttttccatttgacttgtttcagctccttatatattgtggtcattaatcccttgtcagatgcgtagtttgcaggtattttctcccatcctgtgggttgtctcttcactttgttggattgtattctttcctatgcagaagctttttaacttgatatgatcccatctgtccatttttttgtgttggttgcttctgcttttgaggtattactcaaatctttgcccagtccaatgtcctgtagagtttctccagtggtttctcttagtaattccatagtttaaggtattagatttaagtttttaatccatttgaatatgatttttatatatggcaatagataggtgtccagattcattcttctgcgtatggatatccagttttcccagcaccacttactgaagagactatcctttccccagtgcatgttcatggcacctgtgtagagtatgcgttcactgtaggtgtgtgaacttgtttctgggttaattattctgtttcattggcctatgtgtcttttttttttttttttttgagacggggtctcgctctgttgtccaggctggagtgcagtggtgcaatctcggctcactgcaagctctgcctcctgggttcacgccattcttctgcctcagcctcccaagtagctgggactacaggcacccaccactgtgctggactaatttttcgtatttttagtagaggcggggtttcactgtggtctcgatctcctgacctcatgatccgcctgcctcggcctcccaaagtgctgggattacaggtgtgagccactgtgcccggccggcctatgtgtcttttttatgctagtacgatgctgttttgattacagtagttctatagtatactttgaagttatgtaatgtgattcctccagttttgttcatttagctcaggatagctttcactattctgggtctttcgtggttccttataaatttcaggatagttttttcaatttctgtgaagaatatcattggtatttatttcatagggattgctttcaatatgaagattgctttaggtggtgtggacattttaacaatattgattcttttgatccatgaacatggaatgtctttacattttttggtgtcctcttccatttcttgcatcaatgttttatatttttcattgtagagttcttttacttcttttttttttttttttttttttgagacagagtctctgtcacccaggctggggtgcagtggtgcgatcttggctctctgcaacctccacctcctggtttcagtgattctcatgcctcagcctcccaaatagctgggattacacgtgtgcaccaccatgctccgctaatttttgtatttttagtagaggcagggttttgtcatgttggccagcctgctcttgaattcctggcctcaagtgatccacccgcattgatctcccaaagtgctgggattacaggcatgagccaccgtgccctgcctcgcttcttaaattcctgaatattttgttttatttgtagctattgtaaataagattactttcttgatttcttcaaattgttcactgttggcatatagaaatgccaatgatttttgtatattgattttgttacttgccactttactgaaattgctgatcagttcgaatagttttttggtggagtctttagttttttttctttcccaaatataaggtcatgtcatctgcaaacaaagataatttgacttcttcctttcccatttgtatgcgctttatttctttatcttctttgattactcttactaggacttccagtatgatgttgaataacagtaatgaaagtgggcatccttgttgtgttcaagatcttagagcaaagactttcagttttttcccattcagtatgatactagctgtcggtatgtcgtatatagctttaatatgttgaagtatgttcctctgatacccagttttttagggctttttattatgaagggatgttgaatattatcacatgtgcttccagcatgaattgaaatgattatatggtttttatcctttattttgttcataacgatgtatcacattgattgatttccatatatgtgtgtgtgtatatttatatgtgtgtatgtatgtatttttgtgtgtgtgtgggtttttttttttttttttgtagagatgaggtctctatgttgcccaggcttgtcttgaactcctgggctcaagggatcctccttcttcggcctcccgaagtgctgggattacaggtgtgagccatcacactcagctgatttccataaactgagccatcgttgcatccctaggataaatcccacttggtcatgatgaatgacctttttaatgtgttgttcaatttgttttgctagtattttgttgaggttttttgtatgaatgatcatcaggaatattggcctgtagttttctttttttgatgtgtccttgtctggttttggtatcattgtaatactggtctcagaaagaatttggaagtattccttctctattttgcagaatagtttgaggaggattggaattagtacttcttggaatgtttggtaaaattcagcagtgaaggtattaggtacctggcttttcattttttaatttttctttgggggatggggttggggctttacatgccataatatgtttattttattttattttacattttcattttaggttcaggggtacatgtgcacataaattggggtaaatttacccatacatgtacccatgaacctaaaatgaaaattctttaggtaaattggggtctctaggttttctttgctttggagactttttattattactttgatctcattacttgttattggtctgttcaggttttggatttcttcctggttcaatcttagtagattgcatgtgtctaggaatttatccatttcttctaggttttccaatttattggcatatagttggtcatagtagcctctaatggtcatttaaatttctgtggtatcagttttaatgtctccttttccatttctgatttcatttatttgggtattctctcttttttttcataagtagtctgactaaaagtttgttgagtttatcttttcaaaaaaccaagtgtttgtttcattgatcttttctacttttctacttttaaactttttgatgtgttgttgaattaggttagtattttattgagggttttaatatctatgttcatcagtgatattggcctatggttttcttttctttcagcatctttgtctgcctttggtatcagggtgatgcttacctcacaaaaagagtttggaagtatttcctgtaattctgttttttggaagagtttaagaattggtattcatggttttttgaatgtttggtagaattcagttttgaagctatctggttctgggtgatttttgttgggaggtttttttttattactacttatttctttttcttaattctatttttaatttaattattttgttttgttttatttgagacagagtattgctccatcacccaggctggagtgcagtggtgcgatctcagctcactgcaacctctgcctcccaggttcaagcagttctcctgcctcagcctcccaagtagctgggattacaggcgcccaccaccatgcttggctaattttttgtatttttagtagagacagggtttcgccatgttggccaggctgttctcgaactcctgacctcaggtgatccacctgccttggcctcccaaagttctgggattacagacgtgagccatcttaattttattcgtataaatttatggggtacatgtgtaattttgttacatggatatattatagtggtgaagtcagggcttttagtgtatacacagaataatgtacattctacccattaagtagtttctcattcactcttctcgtttcccccgacccttccaagtctccattgtctgtcattccacactctacatccatgtgttcacattatttagccccacttataagggagaacatgacactatttatctttctgtgtctcaattgtttcacttaagataatggcctccagttccatccatgttactgcagaagacatgcttttgttcttttttgtggccaaatagtattccactgtgtatatataccacgtgttctttgttcatcttttgatagacacttaggttgatttcatagctttgctattgtgaatagtgctacaataaacatgtaagtgcaagtatctttttttttatgtttttgatataatgatttctttctcttttggtagatacctagtagtgggattgctggatcaaatgttagttctatttttagttctttgagtaatctctgtactgtttttcatggagtttgtgctaatttacattcccaccaatagtgtaaacatattctctttcctccgcatctttgccaacatttattttttgactttttaataatagccattctaactggggaagatatgtcattgtggttttgatttgcatttttctgacgtttagtgatgttgagaattttttcatatgcttgttggccatttgttatatcttcttttgaaaaatgtctatttatgtcttttgcccactttttaatggaattatttgttttgttttgtgttgttgtttgagttccttgtaaattctagatatcagtcccctgttggatgtctagtttggaaatattttctcccattctgcagattgtttgttcactcagttaattatttcttttgctgctttttatttaagtcccatttgtctgtttttgttttagttgctttgcttttgaggtcgtagtgatgaattatttgcctaggccaatgtccagaatgattttctccaggtttactttctctaggttacttctctaggtttacttctagtatttttattgtttcagctcttacatttaagtctttaatctatcttgagttgatttttgcatatggttagagataatggtccagtttcattcttctgcatatgggaatccagttttcttagaaccatttattgaaaagagtgtcctttccccagtatatgtttttattgactttgtcaaaggtcagttgactgtcagtatgtgtctctatttctgtgttctgtattctgttccattgatctttgtgtctatttttataccagtaccatgctgttttggttactgtagccttgtagggtaatatgaagtcaagtaatgtgataccttcagctttgttcaagaattaatattattggccaggcacggtagctcacatctgtaatcctagtactttgggaggccgaggcaggcggatcacttgaggccaggagttcaagaccaacctggccaacatggcaaaaccctgtccctactaaaaatacaaaaaaaaaaaaaaattagccgagcatggtggcaggcacctgtagtctcagctactcgggaggctgaggcaggagaatggcttgaacccgggaggcggagattgcagtgagccgagattgcgccactgtactccagcctaggcaacaagagcgaaactccatctaggaaaaaaaaaaagaattatattattaaaatgaccatactacccaaagcaatctacagattcaaacctaactctatcaaaataccaatgtcattttttatagaattagaaaaaacaatcctaaaagtcatatggaaccaaataagagcccaagtagccttggtctctttatttgtaattggtctgttgaggctatttcttttttattcagtgttgatatattgtatgtttgtaggaatttatttcctgtagattattcaatttcttggtatataatttttcatactagttctttatgatccttctttatttctgaggcattggttgtaatgtcttcatgtctattttatttatttgagtcctctctcttttttcttaataggctaagggtttgttggcttggcttatttttttcaaaaaaacaacttttccccctatatcttatctattatttgatttactaatgctttgatccttatttccttccttctgcaagctttgggtttagcttattctttttctagctcctagaggtataaagataggttccttatttgagatctttttttgacataggcatttatcattaaaacattcctcttcttactaaagtattttctttaaccacattcaaatgaaattagaaaccaataactgaaggaaagtttaaaaatttacaaatacatgtaaattaaacaacatatatctaaataaccaatggaccaaagaagaaatcacaagggaaattaaaaaatgcttagaggttaatgaaaacaaaaacacagggtactagaatatgggatataacttaagtaatacttagagagaaatgtatggtggtaaatacctgtattaaaaaagaagaaagatctcaaatttataattcaaccttctactttgcaaattaaacccaaaacaagcagaaggaaggaaataataaagaaatgtgaggaacagaaaaacagtagggaaaatcattgaaaccaaaggtaggttctttgaaaagattaacataatcgacaaaccttccttcacttacaaagtaatgaaaaaaaaaggcacagctaaaataagtgccgactacagtgggtcatgcctattaatcccagcctttcgggaggccaaggcagaacaatcctttaaagctaggagtttaagaacagcctggtcaacaaagcgagaccctgtctctacaaaaaataaaaaaaagaattagccaaacctggtggcatgtgcctgtagtaccagcttttgggaggctgaggcaggcagatggcttgagcccgcaggagttcgaggttgcagtaagctatgattgcatcactgcactccagcctgggtgacagtgtaagaccctgtatcaaaaaaacaaaaacaagaacagaaagaaaaatgacctaaagtaaggaatgaaagagtatcactactaaccttacagaaataaaaagaattataagtgaatattgtgaacagctgtatgccgagaaattatatacctcattttcatagcagtgatttctgttacacaatggaaataacctctatcaggcaaaataatactcagcagatttttatgcattattaatgtttcatatcactactaaattttctctcactcgtggaggcaaaatttgctaattatttaaacaacttacatagtttaaaaccgtggataggaaaatatgttattgcttaaatgctgttttttccttttaatcagttttgttcttttgcatattaccttcttgataattttattatattaatgaaacgtgcattcattttctttatgttttataggaaaatgataattctgttgaaattattctggatagagcagagctaatatttacattttatacatcaaaaacataatttttggaaggtcttttttttttttttttaagagacaaggttttgctctttcatccaggcgggagtgctgtggtgcaatcatagttcattgtaacctcaaactcctgggctcaagtgattctcccacttcagcctcccaagtatctagggtatctagggctataggtgtgtgccatcatacctggctaatgtttttgtttttcttggtggagacagagtctcgctgtgttgtccaggcctgtcttgaactcctggcctcaagcggtcctcctgcctcggcctcccaaagtgctgtgattacaggtgtgagctactgtcacttgcctagaagtaatttttttgagtgagcatagttggcgagagtcagtaaaggactatctgcatggagcaaagtttatttataacaggagtttgtaatctagggtccatggatagaatttaggggattatatgtacctggataagaaaaaaattatatattgatttcccttaacctctagctaaagcagcagcatttttcccagtgatgaatagaggcaacaatctatagtagtgttagtgataaccatgactttgttaccaatagaaatcagaaatatttttacatgttgttcctgatacctcaaaatcatttatgtttatcaatacttcagaattttaggtatttattaaacctgtgcatattttgttacttaatgcattaattttaaaaagcacatatttctgtagtacaaattctttaatattttgataatttctatatgatgggtttcttttgtaatcctatttgttttatgtgtttcaaaacgatattccaagagaatttataagcttctctacactgccaaaagtgtttatgtcacaagtaagattaaaactcctaatctagaaacttggttgatatagacaatttttgtgtctttaaccatatttcttttgatcaggtgtgggcaataatagtgaaggtggaagaggaaaggcaggtgcaaagcttttccaagattttcagatgttaagtagaatatggactcatccttggtgtttgcagctagactacattagcaaagaaaataaggtaagtcaggtaacttagtttaaaagcatctattggaagcagaataaacttagacaaaaaattgacctacagactgtatattcaaattttctattgctttgttctattctatgtcttatttctaatttctatatgtcttgcatgtattatgattataggagtgttaaatgttattttattgagcccattttaaaaaactttttattttgaaataattttatacttatagaaaagttgcaaaaatagttctgagaattcccctatacctttgacccagtttcttctaatatcagcatgttgcattagtatagtaaagttatcaaaactaagaaattaactttggtacaatactattaactaaatggcagactttatttggatttcttcaatgtttttacttatgtcttttttgttttccatgatccaatctaggacctcccattgcatttagtaagcatatctgtcctgtcttctttgtctactaaaatctgtaatagttcctcagtccttcctcagctcgtgccaattaacttattcttaaatgaacatcaatataatttccagtgtaagttgagatattctattaaaatagtggtcatttttttttctctagggttattttgatgaagacagtatggatgaatttatagcctcagattctgatgaaacctccatgagtttaagctccgatgattatacaaagtaaatcgaatactttttcgtgccatcctgtattgacaaagttaaaacccctacttgctgattgacctcttataattgacgtttacatctttcctatgcttttctaacaatctgaatgtgtttttttgtttgtttgtttgtttgtttttagaaagaagaaaaaagggaaaaaggggaaaaaagatagtagctcaagtggaagtggcagtgacaatgatgttgaagtgattaaggtctggaattcaagatctcggggaggtggtgaaggaaatgtggatgaaacaggaaacaatccttctgtttctttaaaactggaagaaagtgagtctaatgaatgttgcctttatcatggaacagtaatttggaaaatgtcatgtcgttagtccttttttcagtcacttacctgactaattgactcaaaggaatctttcctcaattgatgagtctaatcaagtactcataattacagtaaatatctgatgaatctttaattataagcaagctactctgtgctctctggtatttgggggaaaggtaaaaagaaaaactaatgtttatttacttgtatatacctaaactctattattttcactacatgtgttagctaactgaattcttgagcaggcttgcaatgtagttgatagttttaaaaatgagtaggagaactggtattcagacctaaaaatgtctaatctcaaagccaccatgatattttcacttaactgtatgggaataaatggaaacatttcagataatcaagtgtgattgtagttaatttttagtcagtaatatacagtaaaactaattttaatcatttagtgtttttcctttgtgattcttcataatctgcaattatctactttaggtttcctgtgtattatgtacagtttctatcacctcttttgttttctttctgtctctcttgtgcatgaaagtgaagtcttagattgaactctgcagtggtttaagttgtctttacctatatgtaagttgaaggattagtgttgagacactgtatcctactagtgcagcctgtatgcctaggagcttaaaaactgggaccaaatgtctgcctatttgaaatagcagattatgaagagagaacaaggtagtggctctaaatatttggcatttgggagttgtggagcaaagcagttaactgtctataaggagaagagagttgtgggggccacctaggttagtgatcctgtgatcagataaacttggctggtctcaggcctacagctgaaataacttggtgattaattattttaattttatttttataatttcaacttttatattcgggggtacatatgctagttgattaacatgggtatattgcatgatgctcagctttggggtatgattgatcccatccccaggtactgaacatagtactcagtagttagtttttcagtctttgccccctttctctctccccactctagtagtcctccgtgtctgtcgctctcctctttatatccatgtgtacccagtgtttagctcttacttatatgtaagaacacgccgtatttggttttctgtttctgtgttaattcacttagtatataatggcctccagctgtatccctgttgctgcaaaggacatgattttgttctttattgtggctgtgtatattctatggtttatatgtaccacattttctctatccaatccactgttgatgggcacctgggttgattccatgtttttgctgttgtgaatagtgctgtaataaatatatgagtgcatgtgtctttctggcagatttattttccttttgttttatacttgtaatgagattgctgggtcaaattgcagttctgctttaagttctttgagaaatctctaaactgccttccataggcggtgaactaatttacaatcccaccaacataaatgttcccttttctttgccccttctccagcatctgctgttttttgactttttaataatagccattctgactggtgtgagattgtgtctcattgtggtttggatttgcatttctcctgtggttaatgatgatgagcatttttcatgtttgttggctgcttgtatgttctcttttgagaagtatctgttcttgtcttttgcccactttttaatggagttacttgtttttttgctgttgaattaagttccttatagattctggatattcattgttggatacatagtttgtgagtattttctctcattctgtaagttgtctgtttactctgttgatagttttttttttgttattttgtgtttttgtttttttgtttgtttgtttgttttttgtttttgctgtgcagaagctctttagtttaattaggtcccagttgtcaatttttgtttctgttgcaattgtttttgaggaattagtcataaattctttctgactcggtgatttctttataaacatttctctcttcagtacctccatggaatagacagatggcagtctaacagtagactctgacttctcttaagaaatcaggggaatagtaaaaattaaactacaaaatttctcttctcattcttctcttctgttaccccataaaacagtttactatcaatgttcatcttctggatagatataaagaatatttttatcagaataataaattattatagtgtaatttaaggcaatgagaagttcctgtatctccttccctgctgctgctgccccaatctgccttttccacataaattcctcagtctctcatctcataattaaaaatatataaagtttacatgttcctggaaattattttcttaaaatactcttgttgaattttttctcataacttatggctaacaggagcagaagagtagaccagtcagtgtgcatcatcctgtgctataaatgggttacgtaagagtatactgagattttttttttaaagtgtactgagatattgatcctttgtcacttgggaatacaattagaatctgaggcagctggtttgcctccgtaaatgagtagtctcttctctttttcctggtatgctatataagcattaacgttttttacatatgccataatgtgaatgggttggaaagcactgggggcagaatgtaggaggctacatgttgtgagcccaaaaacacacagggaaggccatcagttccaaaagacaaattttgaccacttgtctaggatttttgtttcattttagttgtgtgcagtcaaatataagtcatttgtatatggatatattttatatatttttgtagcttatatacgtgtatagtatattagaagcattctccagaactaatagataataaaaatttatttttttctttgcatctaaattaactccatataaaatggagtatatcataatgtatggacatacgtagctggtattgtataactttaaaaaaaatgactttcttacagtaaatataagaaaatctgaataggaagtattaaggggctagtctgcctccttagcgcagtaggcagcacatcggtctcataatctgaaggaagtattaaagggttaacaatgttgtacctggaatttgaaatggatattaaataattaattacctataattgagctacaatatgatttttgccacatattttattttcacgtcaaagagttactgtttgctttaatccttttgtagtagctgtctcgtttttctgagaagcagcatcttgaatgagtcatttaagtttagcttacatcatccccatttctgtgttttaaatgttttttattagaaggagagttcatgatcacgaaatgactatgtaaattacttcaaagtgttagatttattattacttaagtatttttagagtaagcttcattggtaagcatttgcattttaaaacgtatgtaattgtatggatataaagttttgtgacagaatccttgtatatgatgtagagccgtaatattagtactaatataccatatttattcactcaacagatatttataaagtgcttactatatgcccagacataaggagggaactgataagcctaaatggtaaattgaagaaggtatgctatggaaatcctagggagatgctagtcttgagactagcagctttgattttcatttatccagggacaggatttgagacttcgagccctctataagttggagagttctgtgaccccttctcaaagctgaatccctttaaagtttacaatcccatcgacaatccagggagttgacaaggaagcttatctatttcagccagggctcttggttgggaaaaatagttacattgaatttacggtcatggccttcacctcacatactttatggtttgaatttatattactcatatagtctaaaagatccgaaactgaaatattaacttcacaagtaattctgagttggtgattccctggagacctggtagaagcaaatgtagaatcactctggagatatatgaccttaaccaaggctacccagaaatttcacagattgtagctacacctgagaaaataaccttaggaaaagctaggaacagaaagtattagtagtcaacctgaggaaagttagcatacaaaataaatggcatgattagattctcaagaacttctgataatagaagtatttgataaagactataagtatgtctaaaatgatatttttaaaattcctaatcataactttatgccagaaaatttaaaacttaaaatacacaatatttaagaaaaatatactcagcaatgagcattcgttgcagttatttcatattagccaaaaacaagaaacaatctagatgtctatgaggagaactaataaatgatagtgtattcatgcagtggaatactacatggtagttagaatgattgaacgggagctccatgtcaagcatgagtaaatctcgctttgagtgaaaaagtaatttgtaggattttacaaacagtatagccatttgtacagtttagtgatacacatgcagtaaaaaacataaaacactgcaaaaaatggtaaatatataatttaggggtttagttacctattggaaaggaaggaaggaaagagaatgggatcatgtaggatcatatattaggcttcagcttcatccgaagttttaacagtgttaaaatttgatgaagatggaatgtggaagcacatttgtttcttatatcttatatacttttctgagcatttaaatttttgtaacaaaaatatattttaaaatactttgcattaaaaagcaattgagaaagtgtataaacatgctaaacctgcatatttcttattttgaatcaaactatgtttaaatcttttaataaattattttatgctactttctccttccacctttcatagtcaaagtttgtggggaaaatatataagaacgaaatcatttaatatgatatgctgattctggggtcaattcttgttggcggtttccagatcctagtagcacagtgaaatgttttctacccccaaggtcttttctctcgtggtaactgagcctttccatctctgttgattcctgtctcatggagtatgtttgggggcattttactctcttagggcctggtgggaaggggatggtttctcttctctttgggtctctgtctttctgagctccactcctaccccgagggtttgtctcttacacttgcactctctcagagtcaatctcttgcttgttctcttatttggcatctccttcctttctctttttctatctagagctcactcttctgggatagtctctgtccttctgtgctgtatgtgcgtgtgcctgcctttctcttttttccctcccctctcccaagtccccatcagtttctttcttactctccccatgggtaggtctttttctgtctctcttgctctctttccatttcttttctaatttacctacttatgttccatttgtcttatttaggtaaagctacttcttcttctaatccaagcagcccagctccagactggtacaaagattttgttacagatgctgatgctgaggttttagagcattctgggaaaatggtacttctctttgaaattcttcgaatggcagaggaaattggggataaagtgtaagtgctttaccatatttattatataaattaaccttttgattatgtttttattgcttaaacaatgtatttgaacaaatctgttgcttttccttccttcctaaagatgtgatttatttggtcattgtagtgctaggccaatacaagcaactatcttttttgtaagccactagttctgattgcatattcaggttatttcttcagtgtaaatttctgcttctacctattgcaacttgaacttatttccttgggtagagctcttagttgaaatttgtgtttctccatcttcaaaatcatttttcggtttatgtagtgtgacttctaccgtgttgctttactgagatttccccctgtaaagtcactagtgaccttctaatcctcaaatctagtggacatctctcaggctttattttattttacctgcttgattattctttcttcttcttcttcttttttttttttttttcattatgagacagggtcttgctctgttgcccaggctggagtgcagtggcacaatcacagcttactgcagtcttgacctcccaggctcaggtgatcctcccacctcagcctctccagtagctgggactacaggcgcacaccaccatgcccagctagtgtttttatttttagcagagatagggtttcaccgtgttgcccaggctgatctcgaactcttgagctcaagcaatttgtgcgcctcagcctcccaaagtgctgggattacaggtgtgagccaccacacctggcctgattattctttctttatcatttattctttgttttttgttccacttctaacatttttgccaccattcctttctttgcatcttcaccccccttcaaattacttttccaaaaacattatttttttttttttgagacggagttttgctgttgttgcccaggcgggagtgcaatggtgcgatctcggctcatcgcaacctccgcctcccaggttcaagtgattctcctgcctgagcctcctgagtagctgggattccaggcacgcaccaccacgcccagctaattttgtatttttagtagagatggggtttctccatgttggtcaggctggtctcgaactcctgacctcaggtaatctgcctgcctcagcctcccaaagtgctgggattacaggcgtgagacaccacgcccggcctccaaaaacatatttttaaagttttgaacaagacttactgtctaggctgctaggtcccaacatctgattataaacgatttttaaaagtatctgagatgcttttttttttttttttttgagacggagttttgctcttgtcacccaggctggagtgcagtggcgcaatctcagctcactaaaatcacctccacttcctgggttcaagtgattctccagccttgcctcctgagtagctgggattacaggcacacaccaccacgcccagctaattttgtttttttaatagagacggggtttcaccacgttggcctagctggtcttgaactcctgacctcaggtgatccacccgcctcagcctcccaaaatgctgggattacaggtgtgagccaccgcgcctagcttgagatgcttttaataaaaattttaaataaggctaaaataaaataatcttttatgtttaaaaaaatctcaaaatatggtctgaaacaaaagagttcttcatgttgtctgcaactggaaaaggttaatagagagaaccattagtatagacatttaatcctaacaacttttttccttttctactgtaagacttctctgagttcagtggttcccagaaccagccttaattgctaactgactaaaatcaacctctttccagtatagtaacccagattgcagattaattccaatttaataattagtatttctaagactttaattttttcacttacgggaactttcaagaacttaatttgtagcacagaaagaattgattcaattatgtttttgattttgggaaagataaactactgaggggtcaaagcataggccttggtcatttgagctgagcaccaggagtcaattcattttcttaccaacattctagaagtagttaactgggagatagtagactccaacagtgtggagctcaggaagtcatacaataaaaaacacttaagtggttaactccaacagccgtttcatagcttcaattgttttcagttctactaaatctgaagatatgtagcagggaatgttgaaggatcttcaggagtcataagtaccttcttctcctatagtatagcttttagaataaaaataaaacttaaagcatacttgccacaggtatattgtttcttatatactgatctactttgtttgcatatataaagggcaatagaagacctcttatattctctttctagattttatttcttttctagtgtgtaagtatgttataaattctgtccagtgggttagaccagaatagtcattttagaactatttctcagagcccctgcaaattggtgaccgaaaggagagggtaagggaacagtaacatttttcctccttctcccgtaatgcctaaaacagcttgcttttataatttattttatttgaactctacacaaaacttgatgtgaccaaatagttttcatggctaaaaaggagttagaaaattactagggcagagaatgaggaatttgcagacatacttgaaatgtaatgacaaagtgttatagaatgcatgtaattttaaattactgaaatacttgtaatagggaaactttttacattctctaaaacagtgtcttttatagagcagaagttttaaattttgatgaagtctaatttatcaacttttaaaacaatgatactttgtgtcatgtgtaaataattttttacctaacccatgttatgaagattttcttctgtgttcttctaaacattctgttcttacagtttttacagttagatttatgctccattttaagttattttttgcataaggtatgcagtttaggttgaagttcactttttttcatgtggatgttcagttttgctaagaccattgtttttgtcatgtggatgttcagtttcgctaagaccattgtgtaggtttttttttttttttttttgagacagagtctcgctctgtcacccaagctggagtgcagtggtgcgatctccactcactgcaagctccgcctcctgggttcacgccattctcctacctcagcctcccgagtagctgggactacgggcgcccaccacagtgcccagcttattttttttgtatttttagtagagacggaatttcaccgtgttagccaggatggtctcgatctcctgacctcgtgatccacccgtctcggtctcccaaaatgctgggattacaggcgtgagccactgcgcccggctaccaagaccattggttaaaagactatccttttaccattgaaatgcctgggccctacaattaattatcctatgtggctctctatctggactctattctgttctattgatctgtgcctgtccctttactacactgtcttggttactgtaactttgtaagtaatgaaatcatgaagagtcagccctccaactttgtttttctttttcagaattgtcttccctcctctgaggtggcattctcatatacattttacaatcaccttgtaatttctacaaaaaaatcctgctgggatttttgttacaattgtgttaaatttgtagatcgatttaggaagaagtgatatctttactaggaatcttctaatccataaacactaatctgtttttttagccttgttttcagccagtccctcatatctctggacttgattgaagattttcttgaattagctagtagggagaagacagaagataaagataaaccccttatttataaaggtgagctacaaatatttctgtgtcgtaattttaaaaatactgatttaaacataccatacaaacattttagcaacaaaagaaacaaaactacccagtctcacaactctatcatatcaaaatttttttgcaatgtctatttgtccttatccatatatatgtatagtctttttcaaaataaaattgtattgtttatatttgaggtttacaacatggtgttatgggatacatatagatagtaaaatggctactgtagtgaagcagatgaacatatctatcatctcacatagttttttttggtgacaagagcagctaatatcaacttaagaaaaattcctaatacagcagtctttgttgttgaaattgttggataaattaaaactttttggtttctaaagcagttttattgagagataattcacatcctgtacaattcacccatttaaagtgtagaactcaatggttttaatatattcacagagatgtacaaacatcactagagtcagtttttgaacattttaatcactaccaaataaaactctgtaccctttaactattactcccctatccagcccaaaactccctcacataagcaaccactaatctcctttatgtttctaatagattcatatattctggaccagtcacataaatggaaacatgtaatatgtggtcttgatagatattagggttgttctcacctttcagctgttgtgaatagtgctgttgtgtacatttgttacacaggttttcatttatttaaacaaacggcaataccaaactgttttctacactgcctgtactatttcagtcctaccagcaatgtacaagcatttcagtttctccacattcttgtcaacacttgttatttttcatttttgtttttgttataaccatcctaatggttgtgaagtggtatcttatgattttaattttcatttctctaatgactaataatgttgaacatcttttaatgtacttgttgactatttctttatcttctttggaaaaaatgtttattcaggtcctttgcccatttttgaattggattgcttatctttttgttgttgaaatgtgttttaaaaaatatattctacatactaggcccctatcatatatatgatttgcaaatattttctctcattctgtgggttatcttttgctttcattaaaaaaaaaatagttccggtgatctgtatcactttcttttatttatttatttttaatttttcgtagagatgaggtctccctctatttgcccagactggtcttgaactcctgggctgaagcagtcctccctcgttggcctcccaaagtgctgggattaaggtgtgagccaccatacctggccatctgttgctttcttgagtgtgtcctctgatgcgcaaaaatattttattttgttgacatccaatttattttttcttttgttgcttgtgcttttactgtcatagctgagaaaccatttcgaaataaaaagtcgtgaagctttaacccctgtgtttgcttaaaagagttttatagttttagtccttgcacttaggtctttgatccattttgagttaatttttatgcatgatatgaggtaaaggctcaacttcagtcttttgctgtggttatccatttgtcccaggactgtttgttgaaaagaatattctttctttattgaatagtttttgtcactcttattaaaaaggaattgatgatggagacacatgtttgtttcctgaccctcaattctattccattgatctatatgtcagtcgctgtgctaatactgcactatttcattaccattgctttgaaagtgatgttgaaattggaaagtgtggctattccagatctcttggaattcaacatcaaccttagaatctcctataaatttctacaaagaagtcagcttagatgctaatagggattgtgttgaatgtatagttaattttaggaagtactgccatcttaatattatgtcttatccatgaacatggggtgttttgctgtttatttaggtctcttatttatttcaccaatattttatagtttgcagagtatacattttacacttttgttaaatgtatttgtacatattttatttctgaggctgagtgaaatttgttcttagtgaattctttaggattttttatatacaagatcatgtcatctgcaagtacagataatttcctttctaatctgaatggcttttatttgtttgcttatccagttgccctggttaagacctcaagtacaatgttgagtgaaagtggcaagagctggcatccttgtcttgtctctaatcatagtgtgaaggaatccagtttttcaacattttgtatgatgttagttttgtggatactatttatcaagttgaggaaattatcttctctttctagtttgttaaatgtgtttgtcatgaaagagtgtgacatactatcttgatttctctgcagctattgagatgatcatgtcatgttttttttttccccattctattaacatagtgtattactttgattttcacatgttaaaccaaccttgcatacctgggataaatcccacttgtcatggtgtataattctttttatatggtgctggatttagtttgctagtgttttttgttgttggcaatggaatgttttaattggctttttttgtcctgattatgaaagtattattatatcttgcatatataatattggctgtataatattctgtcatatggctgtacataacttatttaatcatttgattgctttctctaatttttcaactttttttttttttagagacagggtcttgctctgtcacccaagctgaagtgcagtcgagcaatcttggctcactacagcctctgcctcctgggttcaagcgattcttgtgcctcagcctcctgagtagctgggattacaggtgtgtgccaccatgcctggctaatttttgtattttttgtagagatggggttttgacatgttggctgggtcttgaactcctggcctcaagtgatccacccgccttggcctcttaaagcactgggattacaggcgtgagctaccacacctggcctaatttttcaacattttaaatttttgtacataagtttatatctgcgttttaaacttttttgcttaagatagattcctaagaggagaaatcatttaccaacaggtatgatcttttttaggacttttgaaacattgtcaacttattttccagaacagttggattagtactcctagtaggaatccttgaatgatcactacaccattgccataataactaaaacctttcttaatagatgaataatgatatcttgtatttgttttaatttgcatttattttataaccagtaacatagattgtctctgctaatctctttttgcttttactgctgactgatggctatgtttctgtctgcctgcaatgctctctccacccgcactatcttcttcacctgattaattcctatccattcttcatctttcatgtccagtgacactcctcagtactgacttccctcctcctgactccaatgtctgattttttccttttaatttttgtgggtgcatggtaggtgttatgtattcatgggttacatgagatattttgatacatgcatgcaatagataataattacatcagggtaaatgggatatctatcacctcaaacatttatcctttgtgatacaaaaaatccatttatactcttagttatttaaaaatatacaatttttaattatttttgacggtagtcaccctgttgtgctagcaattactagtttttattcattccaactatatatttgtacctgctaaccatcagtacttccaccccaaccacccactacccttcccagcctgtggtaaccatccttctactctgtatctccatgagttcaattatttttatttttagatcccacaaataaatgacaacatgcaaagtttgtctttctctgcctagcttatttcacttaatgacctccagttccatccatgttgttgtaaatgacaggatctttctcttttatggctgaatactattccattgtatataagtatcacattttcattatccattcatctgttgatggacacttaggttgtctccaagtcttggctattgtgaacagtgctacaatagacagtgcagatatgtcttcgatataccgatttccattattttgggtatatacctaggagtgggattgctggatccttttttttttttttttttttttttttttttttttttttttggtggggggagacaaggtcttgctctgtcacccaggctggagtgcagtggtgtgatcttggctcactgcaacttccacctcctgagttcaagggattctcccacctccgcctccccagtagctgggactacaggcatacactaccacgcccagctaatttttgtatttttttggtagagacagggtttcaccatgttggccaggctggtctcaaactcttgacctcaggttatctgcctgccttggcctcccaaagtgctgggattatataagtgagccactgcgtctggctgggattgccggattctatggtagctctatttttaattttttgaggaacctctgaactgttctccatagtggttttactaatttgtgttcccaccagcagtgtacaagagttcccttttctccaaatcctctctagtatttgttactccctgactttggataaaagccaagttaactggggtgggaagatatctcatagtttgatttgcatttttctgataatgaatgatgttgagcaccttttcctatacctgtttgccattggtatgtcttcttttgagaaatgattattattttgtccattttaaaatcagattattaaattttttttcctgtagagttgtttgagttctttatatattccggttattaatcgcttgtcagatgggtagttttcatatattttctcccatcctgtgggttgtctcttcactttgttgactgtgtcctttgttgcgcagaagctttttaacttgatgaaatcacatttgtctgtttttgcttttgttgcctctgcttgttgggtattactcaaaaaatctttgcctagtccaatgtcctggagagtttccccaatgttttcttgtagtagatttgcagtttgaggtctaagatttaaatctttaatccattttgacttgatttttatatatggcgagagataggggtctagtttttttctcctgaatatgtatatccagttttccccagcaccatttgctgaagagactgtcttttccccagggtatattcatggcaactttgtcaaaaatgagttcactgcagatttatacatttatctcagggttctctattgtgttgatctatgtgtttttatgccagtaccatagtgttttggttactatagttctgtagtataaagtcaggtaatgtgattcttacacttttgttcttttggcttagtatagctttggctattttgggtcttttgtggttccatataaatttttagggttgttttttgtatttctgtgaagaatgtcactggtattctatacagattgtaatgaatctgtagattgctttgggtagtatggacattttaataatatcgattattccaatccctgaacctggaatatcattctatgattttgtgtcttcagtttctttcagcatctttttatagttttcattgtagagatctttcacttctttggttaattcctaagtattttatttatagctattgtacatgggattactttcttgatgtcttaaaaaattttcttttaatttgtaagtttctttatttctctttcaggttgtttgctgttggtatatagaaatgctactgatttgtgtatgttgggtttatatcctgccacttcacagaatttctttatcatttctaatagttttctggtggagttttcagatttttccaagttaagatcagatcatctgcaaacaaggataatttgatttttttctttccaattttgatgccccttatttcttgttcttgtctaattactctagctaggacttccactactatgttgaataagtgatagaagtgggcatccttgtcatgttcttgatcttagaggaaagccttttagtttttctttctttagtatgatactagctatgggtctgtcatagatggcttttattatttttgaggtatgttccttatgtacttagtttttttagtgttttttcataaagggatgttgaattttgtcaaatgctttcttaccatgaattgaaatgatcatatggttttgttttttgttttttttttgagacggtctcactctgttgcccagactggaatgcaatggcgtgatcttggctcaccgcagtctctgccttgcaggttcaagtgattctcctgcttcagcctcctgagtagctgggattacaggcgtgtgccaccgcgcctaactaatttttgcatttttagtagagacgaggtttcaccatgttggccagacaggtcttgaactcctgacctcgagcggtccacctgcctcggccttccagagagctgggattacagacgtgagccaccacaccccggcgatcatatgggttttgtctttcatgctgttgatatgatgtatcacatcaatttgtatatgttgaactattcttgcatccctggagataagccccagttggtcatgatggatgatcattttattattgaattccgtttgctactgttttgttgaggatttttacattagtattcaccagtgatattggcttatagtttaatttttttatgtgtgtttatctggttttgttatcagggtaatactggccttgtaaaatgagtttggaagtattctgttctctacttttcagaatattttgagtaggatttgtcttatttcttatttaaatgtttgatagaattcagcagtgaagctattgggtcctgggattttccttgctgggtgactttttattatggcttcaatctcattactttttattggtctgttcagattttggacttcttcacggttcaatcttggtaggttgtgtgtgtctagaaatttatccatttcttctaaagttttccaatttatcggcatatagttgctgataatagcaactaatgattctttgaatttctgctgtaacagttgtaatatctttattttcatctctgattttatttttttgggtcttctctcttttttgcttagtctgtctcaaagtttgtcagttttgtttattttcttcaaaaaacctgttttttgtttcattgatcttttgtattgttttctttatttcaagtttatttatttctgctctgatctttatttctcttctactaattctgggcttggtttgttcttgcttttctaattcttctcttctcttcttttttgttttttttttctttttttttgagacaaggtctcgttttgttgcctaggctggaatacagtggcgcaatctcggctcactgcaacctctgcctctcaggttcaaatgattcttccgcctcagcctcctgagtagctgagattacaggcgcccgccaccatgcccagctaatttttgtatttttagtagagacagggtttcactgtgttggccaggctggtctcaaactcctgacctcaggtgatccacccgcctcagcctcccaaagtgctgtcattacaggcatgagccaccgcgaccagcctctgattctttaagatgccttgttacattatttgcagtttttctacttttttgatataggcatttatagctataagctttcctcttagtactgctttccctgtgtcttatgttttttggtatgttgtgtttccattatcattttttaaagaaaatttttgatttccttcttaattccttcattggcccaccggtcattcaggaatgtgttgtttaaattctatgtatttgtatagtttccaaaataccttgttattaatttctccttttattccactgtggtgagagaagatacttgatattatttcaggttgtttttgatgttttaagacttgttttgtgacctaacatatggatgatccacatgctgaggaaaaaaatgtgtattctgtagctgttggatgaaatattctgtaaatatgtattaggtccatttggtctatagtgtagataaagtgtgatgtttcttagttgattttctgtgtgtagtgttgaagtctccagctattattttattggggtctatctctctctttggctgtaacaatatttgctttgtatatgtgggtgctcccagggttgagtgcatatatattttaaattgttatatcctcttgtagaattgaactgtatcattatatagtgtccttctttgtctcttcttacagtttttatcttgaaatctattttgtcctatataagtatagctgttcctgctctttttggtttccattggcatggaatatccttttttatccctttattttcagcctatgtgtatttttacaggtgaagtgtgttcttgtaggcaacagatcattgggtattttttaaaatccattgagcccctctgtcttttgattggagagtttagtccatttacattgaatgttattattgattagtagggacctactcctgccattttgttatttgttttctagttgttttttgggctcgtcttctttccttccttcttatcttccttttaatgaaggtgattttctctagtggtatggtttagtttcttcctttttgtttgtttgtttatccattatatgttttttggtttgtggctcccatgaggcttggaaattctatcttaaaacccattattgtaagctgataacaactttacactgtttttataaacaaagaaagaaacaggcaaaaagaaaactaataaaaattctacaccttaactttgtccactttttagctttttgttgtttctgtttatatcttattgtactatgtcttgatatgttgttgtagttatttttgttgcttcaacatttagtctttctacttataataagagtaatttatacaccacagttacgctgttataatattctgtatttttctatgtacttactgtttttagtgagttttgtacctttagaggatttcttactgctcattcatgtccttttctttctgattaattacttcctttagcctttcttgtaggacaggtttggtgtggataaaatccctcagcttttgtttgtctggaaagtttttatttttcttttatgtttagaggttattttttccatttatataattctagggtgaaagttttttccttgagcactttaaatatttcatgctactcttctcctggcctgaaagatttccactgaaaagtctgctgccagacatattggagatccattgtatgttacttgtttcttttctcttgctgcttttaggatcctttctttatccttgacatttgggagttattaagtgccttgaagtagtcttttttgggttagatctgcttgatattctataaccttctacttgaatattagtatctttctttagatttgggtttctctgttattatccctttgaataaactttctacgccagtctttctctctacctcctgtttaagaccgatatctcttagatttgctttttttgtagctattttctatgccttgtaggcctgctttattcttttttattcttttctcttttgtctcctgtgactgtgtattttcaagtagcttatcttcaggctcactaattctttcttttgctttatcaattttgctattaagagactcttatgcattctttagtatgtcagttgcattttttgactccagaatgtctgctttgttcattttaattattccagcctcttcattaaatttatctgattggagtctgaattcctcctgtgttatcttgaatttcattgtttcctcaaatcagctattttgtgttctctctctgaaaggtcacatatctctgtctttcccggattttcccgattccctgtttagttcatttgatgaggtcatatttctctaaatggtcttgatgcttatggattttcgttggtgtcttggcattgaagagttaggtatttattgtagtctttgcagtctgggcttgtttgtacctgtcatttttgggaaggctttccaggtatttgaagggacttgggtgttgtgatctaactttttagtcactgaagctgtgtccacattaggggtcaccctaaggccagtaacgctgtagttcttgcagccttgtagaggtaccattttggtggtcttgtataagatccaaaagaattgtctgcattaccagatggagaatcttgttctcttcctttactttctcccaaacaaatggagtctctctgtgctgagttgcctggagctgggggtggggggtgggtgacacaagcacccctgtgactaccactgcgggtatagcacttggtcagatcttaagccagcagagcaatgggtcttgcccaaggcccactgtaaccactacctggttactgcctatgtttgctcaaggcccaagggctgtacattcagcaagtggtgaagcctgccagtactgggtctttcccttcatgttggcaaattctcttagtccctgggcgggtatagagatgctttctggagccagggcctggagccagaaatgttagaaatatacctagtgctttattctactatggctaaactggcacagaaataacaaaacaaagtccttcctactcttctctttcttttcctcaggcagaggagcctctcttcgtggccaccaccaggacaggcccgcagagagtactgccagtgtaccgccagtgttcacttaaggcctaagggctatttagtcagcttttggtgaatgctgccaggccagagactcacccttcagggcagtgggctccactctgccccaggctcagtccacaaattccattcaagagctaaggcctggaattggggacccaagagcccgtttgttgcttttgtccgctgtggccaacctggtagctacactgctagataaagtcccctttactcttccctctccttttctcaaacaggaagagcctctctttgtagccaccacaacttctaataagctgggtctcaccataacctaacacatttctgtctaatccatgccccacaatgtgtactacctggttattgctgctgatgattcagggcccaagggctctttggtcagcaggtgatgaatcctgccatgactgggtccctcgattcaaggcaatgggttgccttctggcccagggagctagggcctggaatgggggcttcacgattctgcccagggccctgtcctactgtgactgagctggtatccaagttgcaaaacaaagtgctttttctcttcccttttctctcctcaagtagaaagcagaggtctcttttggagctctaagctgcgctacctggaattggaggagtgaggagtggtggcataagcactctcttagccgccccagtggtatctgactaagtcaagtgcccccattttactggctccaagccctttacagcactaggacttgcccagaagttgcagtccttgtggcctagatagcctttcagttttatttagggccccagtgcactttagcccactgtggcgtgacttactaaaactcaacttctgatcactgtgatggatgattcccctctggtttgggcaggtttatatgctcccttcatgtgtgtaggctgagttccaattcaaagtcctatgatcactgcactctccttcccgcaagtgcactgattctctccctatgacacgtggccacttctgggggttgaggtagcagtggcattggcgattcaagattgtctttccccttctgtgcctctttcagtgatatgaagttaagatcaggtactataattgctcacctgatttttgtttcttatgatggtgcttttttgtgtagatagtcataacatttgctgtttatgctgggaggttgatcagtagcagcttctattcagccatcttattccacctccttccccagtactgccctgattgaatgagttggtatttgttcctgtttctgttttttggaattgtttgtaaagcattgagcttaattatttaaatgtttgttagaattcagcattgaagccatcttggcctgggctcttcttataggtagttttttttctttttagtattatggtaaatatatatataacataaaatttactattttgacagtaaaaaggcaacctaccatatgggaaaaatatttgcaaatcatacatctgataaggggttaatatcaaaaatacataaaggattcctacaacacaacaacaaaaataatatgatttaaatatgggcaaaagagttgatagacatttctctaaaaatgatatacaaatggccaagaagcacatgaaaagatgtctagcatcactaatccttagggaaatgcaaatgaaaactgtaatgagataccaccacacacccattaggatgggctactatgaaaaaacaataatgagagttggtgaggatatggagacattggaactcttgtgtactgttggttagaatgtaaaatggtatagctgctgtggaaaacagtgtggtgttcctcaaaaaattaaaaatagtattaccatgagatccagaagtactacttctgggtatatacccacaagaattgagttcagggtgtcagagaagtatttgtatttgtacgcccacattatagcagcattattcatgaccaaatcatggaagcaagtcaaatgtccatcaacagataactggataaacaaaatgtggtatatacatacagtggaacataatttagccttaataaggaaggaaactttgacacatggtggaacatgtatgaatcttgaagacaatatgccaagtgatctaagccagtctaaaaaggacaaatattacatgattcctattatgaggttcctagagtagtgaaatttgtagagacataaaatagaatggtgtttgccagggcctgtgggtaaggggaaatggggagtgtgagagaacagataactccacggggcttcccagagtgctccatgttgtatggggattatgtctgtctcataaatatatgtatcattggagacaggttcattactacccatttttgtatactctttgtctagcaccaagctagacatgtagtaggtccatagtaaatacttgttgaactggtaagggaataaattacccttatctgtaacttccctagtttttttatacagagaatgatgctctagttaggcattttcctaggtatatacttgcactttttatctttctcatttccccgctttctttgtttctagagtgagtttttggcatatctttaacatatatatgtgtagtatatatgtgtatttttacatttgactgtagttaaatataagcttaaatatattttttttctattatcactatacattttattagattctatgttctggcagtttttcattattgaaaagcctatgttacaaaaacataccaatttactaccatcaataaatggaaaatgcttatcttaatatgtattgtaactacattttcttcatctttaatgggtaaaaacagttgtcattgttttcattaataattttttgaccactagtagggttgtacttcttttatatgcttgctagtttatttctgattttgtaaattatctttagcaaatgtttactaatcagattggtctgcctttgagttactgctattaccactaccactaccattaccattaccactgtgtattgagcactgagcaagatttaaggggtactacaggaaatcatggtgtagaagaggaacagacacatatattatgtgccataatagaggcaggtgtaatttgtcatgggatcttgagtgataatattaagaactcagtaagcttttaattaccatgtgacaggcaccattctaagtagtttttaaaatattatctcattgaatcctcataacaaccctatgcaataggtactctgattatcttcattttacagataaagaaactgaggcacaaggagtttaattacttgccataagtgaaaatgttagtaaatggtgaaactgagattaaactcagggagtgtcactccaaagtctgtgttcttaactactaacctataatgactctatcagtttttaagtgttggattcatcgaggtggtattagagatattcatttgcattataataaaaggtgagtatgttgaaatgctttttaaaatagtcatatcattttccattcatttatgattatttattttaataattatcctgttcaagtgaacaattaatgcaaatgtgactccagcctcttacctttttatgcaagtatccatctcaaattctttttttcttggatgtgtatgcctttttttctaattgaaaaaaaaatcataaataaaatgactttcataagcattaatgaatttttaacaaggaaattctgggttttctatatcagtgaagatataggtaagaaacatggaaaagcatcttttttttaactaatgtactaaatttaaagagcttgctggaaagacataagtaaatctcagttttgttaactgttttattttaaggctctggggcatgatagaattttgcttggattggaaatagtagcattgtgtttacagttaaataattagaatagaaattatgtatgataaaatataaaagtgtcataagcccttaatctcttggtattttagtatcaatgcaagtcttgggtaaaatttcacctcacttcttcctggtgtagattaaaggaaaaaaaaaacttaaactcactgtctaaaattgacatgtcatatcattaactcataaagtcgtactcctttacacacacacacacacatacacacacaccacatttgaaatggaaacgtacactgaaatttgcagctaccccatagaataatttttggcacatagtaggcattcagtaaagatttgttcagtgaatgaataaaggcattctttatctctcatttttatttgatcattatcaagttgttgataaggagaaaaacgtggccatttacagatataacttaaaacatgcctcatgagcgaaatgtaagtttaatcatattcttttgacagttttaaggattctaatcaaggaaacccttttaagaaattctcatgtagatgaaataggctttaaaaatacctgtgctcatcactatctatttgaatgaaatctgtggttaatttatttataatgtaatgactccttgattaagaaaagtatataatgtattttgctatacaaatagaatatatataacccacttttaaatgatgagcaaggtggaaaatctgttcttaccagtaagcagagcgatatatcaaattccttttgtgttcttttgttaaattttcaggtgaggggaagtggcttcgaaacattgactattaccgtttagatggttccactactgcacagtcaaggaagaagtgggctgaagaatttaatgatgaaactaatgtgaggtaggaaaaattttctgtatatgtagaaacattaaaataattaattttaaaatttacataaagttcactatttttattgtgtatttgaatgtttttagcaaatgcaaggtacagtcaggttgcaaaacagtgtcatcactccctaaccactgaattcacttatggaatcatataatttgtagccttttgagtctcacttctttcacttagtgagatttatttgagaatcatttacattgttgcatataccaataatttttaaaaattgttgtatagtcttccattatagggctatatcacagtttgttcagctacttccacttgagggacatttgagttgtttccaggttttggaattaaaatcaaagctgctctaagctttcatgttcaagtttttgtgtgaacataagtatttacttaaatgaaacaaaagcctaggattgtgattgctgggtcatatagtaagtgtacatttatctttgtaagaaactatcaagcagttttccaaagtgactgtacaatttttcattcccacccgcagttgtatgagagttccagtttccttacattcttgtctgtacatggtattgtcattttttaaaaaaattattttactcattctaatgtatgtgtagtggcatctcttgtgattttaatttgctattccctaatgataaattatgttgagcatcttttcatgtgcttattgaccattttaatatcattaactgtagatacaaggcaatttgtgtgtgtattgatattgttttaagctgttagtaattgacaaaatcaagctacatttggaaagaaaaagttttatatatagtcatatgttgcttaacaaccagtatacattctgagaaatgcatcattaggcaattttgtcactatgcaaatatcatagagtgtactgtacatcagtaggctttctgtgatatagcttattgctcctaggctgcaaaactgtacagcatgttactgtactgaatactgtaggcaattggaacacaatggtatttgtgtatgtaacatatctaaacagaaaagatacagtaaaaatatgtattatactcttatgagattgcctttgtacatgctgtctgttattgaccaacacattatgtggcacatgactatacatacatctaaacatatgcacatacgcatacgtatacacatacacaaacataagaaagcatggcatttaagaaaaggataaaggagatggggttagtttagtagaaagatggctgaagtatgccttaataaatattttaaactatggagaatattatactgtgtgtttaaaacatgttttaattttagcagcatcatgaactagacctaggcttaaggctagagaaatttcagttacattttaggaagattattaattattgaaaacccgtagcctaagagagcttacaaagggatgatttgagtatagttaaattataaatgtatatgattgattatataattgtttaaagaataaatacatttttatattctgtgtttttcatgtttaaacaaattattatttgtacatgagtgtgaagaagtaattttattgagtaactcaaatttctcaaacataatctaaacctttggcttgctaggtttcccaaattttaaaatacgacagaggcatataatctgtcacgtgacatttatacttgatgactagtagggaaaaacattgaaatgtagatgttgagctgtcagcttggcttactcactagtgaattacccctaaacatatgccaaaaagcatgtcattcaaattcatgcttcaggcatatactggttgagtatttcttatccaaaatgcttgggggtgctagggacccgaagaatttcagatatgggatttttttcagatttttgaatatttgtattatattcttacctgttgagcataccaaatctgaaaatctaaatccaaaatgccccaatgagcattttcttcgagtgttacgttggcactcaaaaagttttggagtttggtgaatttaggatttcagacttacagatttgggctgttcaacctgtacatgtatattatggatttggggagttgctcttgagtagctgaacccatacacatgaaatccacagatgttatgctgtctctcaaaatgcacaaacaaacagaaaatgaaacaaaaaacaaaatgaaaagagcaaggaaaaaatccacaaatgttttagattatatctctgtaaattctaatttttcatgactcagtaattttcagtaaataggatataaatataatccttgtttatgccaaagcaatctgaaagacacattaaaataaactttaagataatgaccatttgtaacgttgttgttttgtgtgacctggaagtagttttcagcagtctcagagtgcctcgttagcttgatactatttttggtttgtttctcttttaatttagaaatgattatagattcacctgaacttgcaagtacagagaggtcctgtgaaccctttacctaattttccccaatggttaaatcttatatttcaatatcaaaactaagaagttgacagtgtttcaatgtttgcatatatctttttttccacatatacacaatcaagatacagaaatattccatcaccacaaagctcgctctctctcactacccttttatagtcacacccatttttactgccaaccttgtcactaaccttaacccctgacaatgactaatttatgctccatctctattattttatcatattaagactgtcatataaatggtatcattctctatatgtgacctcttgagattggcttttttcagtcagcataatgcccttgagttccatccaagttgtcacatgtatcaatagtttgttcctttttattacagagtagtattctatgggatggatgtaccacagatgtttaatcattcacttattgcaggacattttcattttgtccaggtttggctattataactaaagctgctgtgaacactgtgttccagctttttgtgtggacctaagttttcatttctctaggataaatgcccaggtatgctgtggctaggtcatatggtaagtacttttttaggaaactgccaaactcttaattagaatggctgtaccattttatagtcctaccaagcagtgtgtgagaaatcaagtttctctacatcctcaccagcatttgctattatcactgttttttattttaggagttctgataggtatgtagtggtatcttattgtggtcttaatttgcagttccctgacaaccagttatattgaacatcttatgtgtttatttgccatcaaatattgtatatcctcttgggtgaaaatctctttatgtctttttgtccattttcttattggattgcttgtttttttattgtagggttttgagagttctttatataatctagatatgtgtcctttgtcagatatatggtttgcaaatacttcctgccagtttatggcttgtcttttcatccccttcacagggtctttcagagaacaaagattttaattttgatgaaatctagtttgtcaatgtttgtttctttgttttgatcatggttctgatgtcaagtctaagaactcttcctcaaagccctaggtcttgaagactttgtcctgtgttgtattttacaagttttataattttaccttttatgtttaagtccatgttgtattgagttaatttttgtataaggtgtgaagtttaaaggttcatatttttggctgtggatgttcaattgctgcagcatcatttgttgaaaaaaactatctgtggcagtgcacagtggctcatacttgtaatcctagtggtttgggaggctgagcccaggaattcaagaccagcctgagcatcacagcgagaccctgtctctaaaaaaaaaaaaatacccaggcatggtgatgcacaccagtactcccagctactctggaggctgatgtgggaggatcacttgagatcaggaggtcgaggctgcagtgagccatgattgtaccacttcactccagcctgggtaacagaggaagacactgtctcaaaaaaaaaaaagaacgaagaaaaaaccatacttcctttactgaattggttttgcacctttgtgaaaaatcagttggctatacttgttttgggctgtttttcagtttgctattctattcctttattccatatgtctttctctgcatcattactacatagtcttgattactgtagctgtgtactaagccttaatatcacattgaatgattcttcccactttgttctacctttcacagattgttttagctatttttatatgaattttagaataatcttgtctagacctacaaaagttttgcaataattttaataggtattgtattaaacctattactaatttgtagagaattgatatcatttttcaactgtaatacttttagcagcagagaattgataactttattgttttctgatcagtgaacacagtgtatgtctccattagttgatctttgatttcttccatcagtgttttgtagttttcagtatacaggtcctgtagatcttttgttagatttacacccaggtatttctctttttgagttattgtaaatgttactgtatttttaatttttgtttccatgtgttcattgctcaaatatagaaatgcaattgatttttgtgttgatcttttgtctgtaatcttgctgacttcatttgttctaggagtttgttttatagatttctggggattttctaagtagatcattgtactatccacaaggagggatagttttatttcttcttttatgatctgtatgctgtttgtttccttttcttgtcttgctgcaagaaaagtctccaactataattgtgaatttgtctgtttctcctttaagttatgtcaggttttgcttccgatattttcagctctgtttattatgcatgtttagtattgctatgtccctccctatacctcatactagttaaaacttaagagtaatatagttagtagcaatggtgagagtggacatccttaccttcttcctgatcttaggagaaaagcattctgtcttcattaactatgatgttagctgtaaggttgtttttttgggtgggggggttgtttttgtttgtttttgttttgagacaaggtttctgtctatcaccatgactggagttctgtggtgtgatcatacctcactgcagcctcgaactcctaggctcaagggatcctcctgcctcagcctctttgagtaggaatgcacagccatgttgtactttttttgtaattactcttcatcaagttgaggtggttcccctctattcttaattttctgagtttttatgacgaataggtgtttacatttgacaaatgctttttctgcctcagtttgtatcatctgttatttcttcttaatctgttaatatggtgtgctatgtagattggtttttgaatactgaaccaacttttcatgcctggaataaaactccacttgatcgtaaggataattctttttatatagtacttggttctgtttgctaatactttgttgagagatatttatgagagttactcttatatattcagttgttttcgtgttgtcattgtctggttttggtatcaggttaatatcgacctcataaaataagtcaataattgttttctattttctgacaaaaattatggggatttgtgttaatcttaaatgtttggtaaaatttgccagtgaaaccagttctggccttgaagatttctttttttgggagtttaaaaatcactaattaaatttcctcagtagttttaggattattcaaatgatctattttatattgaatgtgttgttgtagtttgtgcttttgtaagaattggttcatttcatcgtaatttcaaatatatgtgtagaattgttcatagcattttcttaatatccttttcatgtctttagggtctatagtgatagcttctgtttcacttctgatactggtaatttgtgtgttttctttttactagtcttgctagaggtttgtcagtttcattaattgttacaaataactagtgttttattcccttgattttctttttctttttttttttttcctattttaatttcatcttgcttttggtttgttttgctcttgttctactttctggaggtagaagcttagattactaatttgatttgagactttttttcttttctcatgtaagcatttagtgttataaatttcgctttcagcactgctttagttatacaaactttgatgtgttatattttcatttagttcagtatatttttatttcagaattcatctttggctcagctagaagcatgttgtttaatttccatgcgtttggaggttcccattatttttctgttgtggatttctagttcaattatgttcaggaaatataatctgtatgatttcaattcttttaagtttgttatgctttgttttatgtctcaagtagactggcccttgaagagaatatgtactctgctgttgttgggtggagtgttctataaatactgattagattttgtttttcgatgaggttcttgtattcttctttacttttgctgattttttttttttggctatgtggttatcagtttttgagaggaaggttgaaatctccaactataattgtggatttttctgtttctccttcagttctgtcaggttttgcttctgatattttcagctctgttgtttattatgcacatttagtattgctgtgcccctgtctatccctcataatcttctttgctctgaaatctgttttatctgatactaatataaccactcttgttttattttgattggtgtttgcacggtatatagtttttcatccttttacttcaactcacctatgttgttgtatttgaagtgagtttcttgtagacagcatgtgattgggtcatgttttttgttttattttttatccacttaatttttcttttaaatggtgtatatagaccgtttatatttaatgtaaggcttcagtctaccattttatttttttgttcagttggttctctttcattttattttcttttgtttatgatttctttttcctcccttcctgtgggttagttttatatttttgaaattctattttgattcatctgtagttttttttagtgtttctctttgtatagctttgatagtggttgctgtaggtattacatcatacctatacacacacttattacagtctactggtgtcattttgccagtttaattgatgtgcagaaaccttacctctttatatccttttgattccctttttataatatgactgtctcaagtgtttaaccatatcagtcagtgtaatcattctttcttcaaccatagaatataatttagaaaacacaacagaatgaaattgttgtattgacttatatttattatttgctgttacttctccctaatgtttcagtattcctttttatatcatttgctttgtatttagagaacttattgtagccattcctttttttttaagcagggtcttgctctgtcacccaggctggcatacagtggtgcaatttcagctcactgcagccttgacctcctaggcttaagccatcctcccacctcagcgtcccaagtagctgggactacaggtgggcaccaccacacctggctaatttctgtattttttgtagagatggggttgtaccatattgcccaggctggtcttgaactcctgagctcaagtgatccacctgctttggcctcccaatgtgctgggattacaggcgtgagccaccatgcctggcctagccattctttaacagcaagtccgctggcaacaaatgatttccccttcattcttgaatggtatttcagctggatatagaattctgggttggcaattctttcctttcagtacttgaaaaatatgtgtcactaccttctcgtctccctggtttcttatgagaaacctgctgtttgaattgtttttccccccttagataaggtgtcgtttctctcttctttcaagattatttttctacgtttttggaagatgactgatatattttgtcacgtatttgtttgggtttatcctgtttgtggttcattcagctacttaagctgcaggtttatgtttcttaatacattttggtaattttcagtcattatttctttgaatttcagcccctccttccttctcctcttcttttaggactctaatgacaaaaatattaaatcttttgttatagtcccatgggtacatgagtctcttttccattccatttttctctgttgttcagattaggccatttctgttgtttagtcttcaaaatcaccaaatcttctgttctctgctttctactgaacacattctgagtttttaatttctgttatatttttcagttctaattttttttttttttgagacagggtctcactctcgcccaagctggagtgcagtagcaagatttcagctcactgcacactccaccttccaggttcaagcaattctcatgcctcagccacccaagtagctgggattgcaggcatgcaccaccacacccagctaacttttgtaattttagtacagacggggtttcaccatgttggccagactggtttggaactcctgacctcaagtaatctgcgtgcctttgcctcccaacttgctgggattacaggcctgagctgctgtgcccagcctaaaattttcagttgattctttttttatgtcttcttgtttctttgctgagactgtttgtttcatttgtctcaagtatgttaataattgcttatgaggcatttttataatgactactttaaaaatccttgtcagacaattctaacatctatgtcatctcagtgttggtgtctgttgattgtcttttctcgttgaacttgagatttttctggttcttattatgagaaagttctatttaaactgggcatgttggttactatatcatgagatgctggattttatttaaatcttttggtatagtaggcatcttctgacaaatgttttggcagggcatgagacgccctaccacattgttgccagttgatagtgggagttcagtctcctcactaggcctctactggtattaccttggctgggtggggggacagaggctcaagattacctgtttacttctttccagatggcctccactgacatcacagggggtgactcattagttattattggatggtggtataattccagtaggaagggaaggggttttcttgtaactgctgggtgtgggtggatgtattgtttccctacatggtcttcattgacactgttgggtcacagggaggaccttgtgaaatcagacttgtctgaccccaccctggtagtgccttgttataacttggttacggtagaaaggtgaggattcagctgcattttttgctgtactgtttggttggaattgagtggttatcctaacattttctgtcttgctgtgctgcccctttcctggtcctttggctggagggtaggcttttcttggagatttttttgacagcaccttctggagttcttcagcaaccaatctaggatacatgaggcagaaagaaagtctgtaacagctgggctcggtggctcacacctgtaatcccagcattttgggaagtgaggcaggaggatcacttgagcccaggagttgaagaccagtctgggcaacatagtgagaccctatctccacaaaaattttaaaaattagctgggtgcattagtgcatttctggagtcccagctacttgggaggctgaggtgggaggagtgcttgagcccagcaagtcaaggctgcagtgagctgtgatcatgccattgcactccagtgtgggtgacaattcaagaccctgtcgcaaaaaaaacaagcttttaaaaataaaaaggtagcccatgaaactcagtaccacattatcctttatatcctgagggccctacccatctgcctcatccttctgacttttcagagctgccttctgttccttgtatatatacaagattggtaatttgggcttcattaaaattaaggacttctgttcaccaaaggtgtgatagttaattttatgtgtcattttgactgcactaagagatgcccatgcagctgataaaacacttctggatatgtctgtgagggtgctcctgaaagggtatttgaattaatagactgagtaaagaagattgccctcatcagtgtgagtgggcatcatcctacccattgagggcctgaatagaccaaaaatgcagaggaagggcaaatttgctctctctttctttgagctgggacatccatcttatcgagcccttggagattggtaatcatggttcttcagccttcagactcagacagactaggacttataccaactgcccccacccacaaccctacccccggattttcaggcctttgaactgggaccaggatttatacgattagctccctggttttgcagcttgtgaacagtacattgtagcacttcacagcttccataatcacagtgaggctaatgccgtaatatgtctacacacacacacacacacacacacacacacacacacacgcatgtacacacaagttcttaactccttttggttctgtttctctggaaaaccctgactaatacaaacgtcatttcacattaagagtgtaaaggcaagccacaaagttggagaagctatttccaatatatagatataaaaaggtctcatccaggatatataaataactcttaaaaatcaattggataaactagacaacccaatagaaaaatgggcaaaaacttgaacaggactttacaaaagacgatatctgaatggccaataaatgtatgaaagcatggtgatccttattaattatcagagaaattcaagttaaaaatggttttgacaaaagatgcaaaagcaattaaatggagagagcatagccttttcaaaaactggtattgaaacaattagactttcataggccaaaaacaaacctttacttaagccttacccatattttaaaaaatcaagtcaaaaggaatcataaatctaaatgtaaaactattatacttgtataagaaaacagaagaaaatcttctgcatctagggttagtcagagttcttagtcatgatgccaaaggcatataacccattaaataaaaaatcaataattggacttaatcaaaaataaaaacttttgtctgtgaaagactcttagggaaaggaaaagacaacttatagacttggagaaaatatttgcaatttgcatatttaacaaaggactcattcagaatgtataaagaactcagaaagaaaacaacccagttagtaaatgggcaaaggacttgaactgacacttctctgaagaaggctatgcatgtcaaataagcatatgaaaagatagcatcactagccattagggaaatgtaatttaggtgaggctagtggctcaggcctgcaatcccagggctttgggaggctgaggtgagaggatcacttgaggccatgggttcaagaccagcctgggcaacatggtgagaatctgtctttacaaaaaattaaatacaattagctgggcatggtggcacatgtctatagtcataactacttaggaggctgaggaaggaggatcacttgagcccaggaattcgaggttgcagtgagctatgattgtgccactgcactccaacctgggagacagagtgagatcttgtctctaaaaaagaaagaaaatgtaatttaaaaccacatgagttgtcacttcacacctatcagcatggctaaaataaaaaatagtgacaacattaaatgcttgtgaggatatagagaaactagttctatcctacattactagtgggaatataaaataacaaccattctgggaaacaatttggcagtttaaaaaaacaaaactaaacaactaaacatacttgtcatataaccttgcaattacactctcagaaatgtatcccatggaaatgaaaacattttcacataaaaacctaaacacaaatgttcacagcagcttttatttagaatggtcctcaactagaaacaaccaaatgttatttaacatgtgaatggataaacaaattgtggtatatctatgtagtggaatgctgctcagcttactgatccaagcaacaacttatatggatctcatgctaactggaaaatgccattcttgatttgacagaagtataatgatagagaactgatctgtagttgacagggtttagggttaggggaagggcatgaatacgaagggataacacaaggaaggtgtttttttgtgatgacagaacagttctgtatcctgctatggtaatggttatgtgattctacatgcatgataaaattttgtagaactatacatcaaacaaaaaactgatgaaacccaaatgagctctgtacttgagttcataccaacatcaatttcctggttttgacaatgtattgttgttatataagttgtaggttaccattggaagccgagagtgaaggatatatgggagctcgactgctgtaatttttgtgaaccttaaactgtttttgaaaggttataataaaaacaaaaagatagtaccatgagttgtcaaggacctgaacaactggaagcctcatataatgctggtgggaatatgaattggaataactactttatagaacaatttgttcagtttaacagtgcatgtaaataccctatgactcagcaattccactcttagatatgtacctgacagaaatgcttttatcaaaagacacgtataatatggtttataggagcattatgcaaataatgctttatattttaattatgtttgttttgagcatatactttaatactaatacttagtattaagaatatctaaaaaaggtattgggtagtttatctcaatatggacttgcgtattgaagttctttaaggtttcatgtgtgttgtgtgtgtgtgtatgtatgtatgtatgtgtgttttttaacctacatagtttataccattctatatgcttgattcttttgtatagctctatgccatcttttgcttatgtgggatagatattaataactggaataattttggaccagcatttacccatataccttcaagtatgtcctctaatgaaagatgctacagtttattctctgtaatgactatgtgttatagaggtataaagatgaaacttgtcatcataatcccactgaccacagagaaccactattaacattgtgtttatatgttttgtttttaatgcatttgcaattgtatttagtaaggctctatattctgcttttcttccgcataacatagtattttggatttttaatggtaacatagccagagtgtaatttacttctctatgttatacatattgtttaattttcaaccttatgctactgtaaaataacactgtgataaatacattttcttcaaaattggtcaacttttgtgataatttctatagtctgtattcatagatgtgtggtagctccaaattgacataaaacatgaatttagtatctctatttattttataccaggatttttctttagtatataatatgattggtagactaaattgtaaactttttcccatcatttaaatttagagtttctttgcattctagtgtatagtgaatgctataaatgtaattagtatggcattttagtcattaattttctttcatgaaagaaaagaaaaacattttgtgttgattattgagagcttattatattccagggatttttgtcactctgtaagttaccagcaataagcaaattattaaataaattactgtacaatcatccaatgaaatactatgcagctaccaagcatgatgtttaccaagaaatttggggaaatgttcataatacatattgtatatacagttactatcctgactgcaaaatttaaaaagtatatatttagaaaaaaagaaaactgtaggaaatatatcatgatttgaatggaggttgtttctggggagtggaactgagtaattcttttccttagagttgtttttattttcaaaaagtgtttatccaatctttttcaaattaaattttcattaatatcaaagtaatatatttacatatttttaaaaaacagatagttttacaaggcttcaaataaaaaccagtcccgtgaccaaacctctttctacctgtgatttctactttctggaggtaaccaatttcaactcttggcaattcttacttacttacatacatcctttctaaagtgtaaggtagtaatttaccacaagcacaggcacacttttcctcattcgttttcccagtataatttttcataatatttgcctaaattaatttgcagtattttctttattgtggctacgtaaatatttgtaagccacttgaatactgtgattgtttttcctttttcgtgtacttgtttattatattttgctgaagtattcattcgtttttaccatttgcttagttttctatatacctatcaccaattcattcctaaattatcctgtagaaatattgtaaatcctggccaggcatggtagcacatgtctgtaatcccagcactttgggaggccgaggtgggcagattaccttaggtcaggagttcaagaccagcctggccaacatggtgaaaccctatctctactaaaaatacaaaaattaaccaggcatggtggtgttcctgtaatcccagctgctcaggaggctgaggcaggagaatcacttgaacctgggaggcagaggttgcagtgagtcgagattgcgccattgcactcccgcctgggtgacagagtgagtctccgtctcaaaaaaaaaaaaaaaaaaaaaaaaaaagggaaagaaagaaagaaaccttataaatgcttgtgttccaacaaatcaggtaatctatcagtttctttttttttttctttagacacccttcctggagccccgtgtctgtcttcttgcttctgttttatctacctcagtaccttgcatctgtctaacgcctctccttacattctttatgctgtattataaatgttgagtcacccctacatattcacctacttttgcattttccttcattttgatgtacttagtgcccctagctgtacccaatacaatatagactttcaggttacatataaattctctaaatttattcagaaatctgtagataaaaccttgactacattgtaaatatttgatttttcatttcatctttattcttaaatcagacgattttattttccaacaataggattcttcctgggcatatgtattatcatcctgactccttagataatatattattttcttcagtaagtaagaaatgaattctctgaactcttgatagttaaaaaaaaactaagtatcaaaaagtcatattgtaattaaaatatttgtaaagtactaattactgaagcatttattctatattttcattttcagaggacgattatttatcatttctactaaagcaggatctctaggaattaatctggtagctgctaatcgagtaattatattcgacgcttcttggaatccatcttatgacatccagagtatattcagagtttatcgctttggacaaactaagcctgtttatgtatataggttcttagctcaggtaggtttataattctctttttcatattgaaagtttatgtgaaactgataatattttagagatatggaacatatgtgtattacagagagggaaacaaagttggaaataccatttctgtacataaagcagcagaagtcagttttggcttttcttgattttctgttttgtagtgtatccatttctgtgatgtcatctttctcaggttgagattgttttgcatgaacacatttagcagatgctacccccagcagatgcaacccctctcagcctgcctccaaatctgggcttcttaaccagaaactgggttttttttggtagatccttgcttatttgatcttctttagtacataagttgattgacaactttatgtaaactctttcctgttatttgtttatttattcaattttcttttatttttttctttcctgttaagtttaaaacttctgtacattctcatttataatttgtattatatttaatatacatttaatataatgtatacatttaattaatgtagtttatatgtaatggatatggtattttatatttgttttctgtcttgaaattatagaaaataaaacgatataaaggcattttatggtgtttgttgatagcttattatattacattgaaaaggaatcaaactgctctcttgcattctaacttcaatatttacctaaatgttttttgtgtctgtccctttatttctgtttactctggtatctgcctgctgtcctcctcctacagagtacagaaataaataaagcaacacttgaatgcattttggtcagttaatatagaataattatcagtaatgtaattttatttattatggtaaactatgctaaacagatgaaatctttcatgaattaagcaaaattgctgatgagtttttctttatggcaatatactaccataaagttttaccatttcatattaaccagtaaccgtatttatccttgattaagtttcatgcttacaaaattttatttttttgtatattcttccttctttttacaaagggaaccatggaagataagatttatgatcggcaagtaactaagcagtcactgtcttttcgagttgttgatcagcagcaggtggagcgtcattttactatgaatgagcttactgaactttatacttttgagccagacttattagatgaccctaattcagaaaagaagaagaagagggatactcccatgctgccaaaggtaaacatatttagattattggcttaacaaaccaacgtggactaaggaaattttactactgatatcaaatttagtcatctgattaaggctatatttcagaatttttcaaggataataaaatgatatttaatgaattttgtctagaaaattataaatgatagggtgcttgatctgttctccatatagcaccacaaaaagatagtatattctgaaacacatattttatgccacatataatatatctaattagcatattttctaatatactttacacttcaacttttataagaagtagcagacaaattttccaattagaaaaggggaaattacttcgaatttattcatatggtgaatttcgggttgcaggaaaccagttaattttataaacgtgtattatttgctgactttgagaggtatactgtgagagaatactaagaaaaacaagacattgttcagattatctccctcaatccagcagctgaaaagcagatagtcctgttttcattttcaagatgaggaaactgaggttcagagaggctaggtaacttacccaagtttacacaccatattgtaaagctggtcttcaaatcatatctgaccaactcaaaagcattactcttaatcattataattttttgtcctccaaatggagattagaaagttattttcaaatacaagaagcaaagcagaggacctgggatttccagaattgaatgacatttaggatgctttattttagtttaaataaatctggactttaaaatatagaatgctttcacagtcagtaatattgtgtgatataactgttaagatggtataatatagtcagtttagcttatgtcttgtgaaggttaaatactcctcaaatttatggaaaactttaaggtttacaaaggcctgtctcatatacattatctcaggaagctgagatttagagtttgtgattacacaagggtacatgaccagtaagtgttacagctagaatttgaacccagtagttttctttctctcttctcccctccccctctctcccccacccccacctccctcctcccctctctccctctccctcttcccctctctccctctccctcttcccctctctccctctccctcttcccctctctccctctccctcttcccctctctccctcttcccctctctccctctccctctctccctctctccctctctccctctctccctctctccctctctccctctctccctctctccctttccccctctccctctccctctccttctacctctttttgagacagtctcactgtgtcgcccaggctggagtgcagtggcgcaatctcagctcactgcaacctccacctcctgggttcaagcgattctcctgcctcagcctcccaagtagctaggactataggcgcctgccaccacgcccagcaatttttttttctatttttagtagagatggggttttactatgttggccaggttggtcttgaactcctgaccttgtgatccacccacctcagcctcccaaagtgctgggattacaggtgtgagccaccgcgcctggtccttttttttgttcttttttcttttttactttaagttctgttatacgtgtgctgaacatgcagtttgttacataggtatacatgtgccatggtggtttgctgcacctatcaacccgtcatctaggttttaagccctgcatacattaggtatttgtcctaatgttctccctcccctttccccccaccccctgacaggccccagtgggtgatgtaaccctccccatgtccatatgttctcattgttcaactgccacttatgagtgagaacatgcagtgtttggttttctgttcttgtgttagtttgctgaggatgatggtttccagcttcatccatgtccctgcaaaggacttgaactcattctttttatggctgcatagtattccttggtgtgtatgtgccacattttctttatccagtctgtcattgatgggcatttgggttggttccaggtctttgctattgtaaatagtgctgtgataaacatacgtgtgcatgtgtctttatagtagaatgatttataatcctttgggtatatacccagtaatgagattgctgagtcaaatggtatttctggttctagatccttgaggaatcgccacactgtcttccataatggttgaactaacactcccaccaacagtgtaaaagcgttcctatttctccacatcctcaccagcatctgttgtttcctgacttatttaatgatcattattctaactggtgtgagatggcatctcattgtgaacccagtcgttttcaaactgtgttacaaggaaccccaggagatgctttagggactgctaccatgtggctaagcaagtacagaggggccaggcaatgaacactctgatcccgacatcccatttcagtcagagcccctcttttatctttttaatgtattggacttcaacataagatttaattcaaagagaggacgtgcctgctttttaaaaaaaagtttttaaaacacaatgccatgttgcctttctatcacagtaactaaaaactgtgagagatctatccaggaagtacaatcagatacctgaaggagctgataatccggttggggagaaaaaagtaacattcttaaaagggaaagaatgaagtgctgatgtgactggtgctgagtatctttgcttataataggggaaggatggagcattcagatacaattttgatgggagaaaaatcagacttggttggcctataaaagatggttagtatttaattggataaagggaagaatcaagtgtgaatgagagattgaacagtttgggcaaagggacagaggtaagaatttatgtaccaggcttaagggatgatgaaattggcctggcattgatgaagagtggaggttagataagtaggaaagccatgaaaggcaaatggaggcattgcgctttaaaataatgtttactataagttcttgaatgggactgttgtatgatgaatctgggcttttagaaaattagcctggagtgattattgtgggctcgatcagacatttcatgaaaataaatggtagaactcaactgataatagactagcttttaaagggataggcagcgaaaatgttttttttttctttgagacagagtctcactctgttgcccaggctggagtgcagcggcatgatctcggctcactgcagcctccgcctcctgggttcaaatgattcttgtgcctcggcttcccgagtagctgaggttatagacatgtgccaccacacccagctaatttttatatttttagtagagatggggtttcaccatgttggccaggctggtctcaaactcccgacctcagatgattcacctgccttggcctcccaaaatgctgggattgcaggtatgagctaccttgcccagccaaaaaattttatcttaaataatgaagcttagttattcattcattgatttaaactttttggggtgcctatgatatgccaattgtactggtctctaaggatacactcataaataagtctaggattctgttcccaagaagctatagtcttaaaagcttaccttaagcaagtaatatagtaagagttacagatcctataatagaaatctgtgcaggtgccaaggaaggaatattcatttctttcttggaaagtttgggatggatattgatgtgcttgaacagatgttgaaagtagaactgggtaactgtttgcattgctaagacggcagaagagcaaaaggcctttcaagatggggaatagaaaaaaagaagcacatgcataacatggcatgataagtttgaagaacctcaagtagttaaaaataaataagagtataaggagatactggtagagtaagggtgagtgtgggaagaggtaaaagtaaagactggaaaggtaggtgggaatcaaatcatagaaattagtttgtaagttgtgttataggttgtggtatctatttaacaattttaagcaagagactaccgtcacattttcattttagaaaaaaatcattttatgtatcagtgtggaggatggatcagagaaaagaaaatggatattaagatacttgttaggatgctactaaaatgattcaggtgggagaggtaatacaggcctgatatgagatgttagcagtggagacagagaagtactgggcataatatagatactcagtaattattaatgttcccttgatttataattagaatttcatgtaagatttccactagtttaatagaatttgaaaactggtcatctgaaatgggtacgttttgatattcatggcgagggatttcttggtacgtttggatattcatggtgatggattttttggtatttgaagctgcttttattcaaggtattttgaagttggttcctgttattatagtacaattgcaaacaccttccttcttgtccatgatttttaagatgaaagactgctaaaaatgatacattttcatcctttcaattgctgttatctaagtaataattaaattccatgcttttatgaggtttttttgtcttttggtagtcccgaaagcacttctttttaacttacttgatatgtgattactgtatctctttctgcttcatcacttcctccttaggtcattattacttaattcctgttcctccatttctcttcttgttcagtttttacttctctacttctaatttgatttaatacctcagacttaattagccacctgactatttttcttgtctttgtacctctttaaaggcaagaactgcattctgtgcttccttcagtatccttagtgaataatgcaatgcttggcacttttttattattattatactttaagttctggggtacatgtacacaacgtgcaggtttgttacatatgtatacgtgtgccatgttggtgtgctgcacccattaactcgtcgtctaggttaggtatatctcctaatgctatccctcccccctccccccaccccatgacaggccctggtatgtgatgttctccttcctgtgtccaagtgttctcattgttcaattcccacctatgagtgagaacatggggtgtttggttttctatccttgcaatagtttgctgagaatgatggtttccagcttcatccatgtccctacaaaggacaggaactcatcattttttatggctgcatagtattccatggtgtatatgtgccacattttcttaatccagtctatcattggtgggcatttgggttggttccaagtctttgctattgtgaatagtaaacatacatgcgcatgtgtttttctagcagcatgatttataatcctttgggtatatacccagtaatgggattgctgggtcaaatggtatttctagttctggatccttgaggaatcgccacactgtcttccacaatggttgaactagtttacagtcccaccaacagtgtaaaagtgttcctatttctccacatcctctccagcacctgttgtttcctgactttttgatgattgccattccaactggtatgagatggtatctcattgtggttttgatttgcatttgtctgatgaccagtgatgatgagcattttttcatgtgtctgttggctgcataaatgtcttcttttgagaagtgtctgttcatacccttcactcacttgttgacggggttgtttgtttgttttcttgtaaatatgtttgagttcattgtagattctggttattagccctttgtcagatgggtagattgcaaaaattttctcccattctataggttgcccattcactctgatggtagtttcttttgctgtgcggaggctctttagtttaattagatcccatttgtcaattttggcttttgttgccattgcttttggtgtcttagacatgaagtccttgcccatgcctatttcctgaatggtattgcctaggttttcttctagggattttatggttttaggtctaccatttaagtctttaatccatcttgaattaatttttgtataaggcgtaaggaagggatccagttccagctttctacatatggctagccagttttcccagcacaccatttattaaacagggaatcctttccccatttcttgtttttgtcaggtttgtcaaagatcagatggttgtagatgtgtgatattgtttccgagggctctattctgttccattggtctatatctctgttttggtaccagtaccatgctgttttggttactatagccttgtagtatagtttgaagtcaggtagcgtgatgcctcccgctttgttcttttggcttaggattgacttggcaatgcggggtcttttttggttccatatgaactttaaagtagttttttccaattctgtgaagaaagtcattggtagcttgatggggatggcattgaatctttaaattaccttgggcagtgtggccattttcatgatattgattcttcctatccatgagcatggaatgttcttccatttgtttgtgtcctcttttatttcattgagcagtggtttgtagttctccttgaagaggtccttcacatcccttgtaagttggattcctaggtattttattctctttgaagcaactgagaatgggagttcactcatgatttggctctctgtttgtctcttattagtgtataggaatgcttgtgatttttgcacattgattttgtatcctggactttgctgaagttgtttatcagcttaaggagattttgggctgagacaatggggttttctagatatacagtcatgtcatctgcaaacagggacaatttgacttcctcttttcctaattgaataccctttatttctttctcctgcctgattgccctggccagaacttccaacactatgttgaataggagtggtgagagagggcatccctgtcttgtgccagttttcaaagggaatacttccagtttttgcccattcagtatgatattggctgtgggtatgtcataaatagctcttattattttgagatacgtcccatcaatacctaatttattgagagtttttagcatgaaggttgttgaattttgtcaaaggccttttctgcatctattgagataatcatgtggtttttgtctttgcttctgtttatatgctggattacgtttattgatttgcatatgttgaaccagccttgcatcccagggatgaagcccacttgatcatggtggataattgcttggcacttttatctagacttttttgaaattctagttgtctttatagtgttccttagtgatccatatatcattgaaaagcagtgttggaattagacttacttttcaagcagtaaaattgagatgaagattggttagtctgtcacagtgggtttgtggaaggaagagaattcgagctttaatttatatcttcagttagattcttaatttgctatcttagcttcattcaccactctactcattactttattatttttattttattttatttcatttcatttcatttcatttcatttcatttttgagacaaggtctcgttctattgcctaggctggtcctgaactcctggcatcatgtgatcctcctgccttggcctcccaaagtgttaggattacaggcatgagccactatgcctgtccactttattattttaaatcccctcattggattcttactgttgctgcttttcccttttggaaatataatagccttgacgtcctgtgaacctattttttaataagttgatttaagggcctcctgaatcatctctaccaagtatctgtgcatctttttagttgttcaggataatgtttctcagccattttgaaactgtagcatgatctagacttataagtagtttaacacaagtttctagcaataccgatttgttaacttattcttaatggcttgtgtttaaaatgttaaattaatagctaacctctgttaacgtttatgtaaatgttaaattgatagctaacctgttaacatttatgtaaattatgttagagaaagtaccttttctggtaataaacttattaattatacagatatcagagatgaaaattttggtcaaggtcatgttttattttattttgagacagtctcactctgtcacccaggatggagtgcagtgctgcaatctcagttcactgcaacctccgcctctggggttcaagtgattctcgtgcctcagccacctgagtagctgggattacaggcatgcgccaccacgcctggctaatttttgtatttttcatagagatgggctttctccatgttggccaggctggtctcgaactcctggcctcaagtgatcgacccacctcggtctcctaaagtgctgggattacaggcatgagtcaccacctgcagccaaggttatattttataatatgcttaagtgggtgttttgttcctcttaagtacagtatacacagcctactctgtaccttttattaagaaaacaaaagccaataaaactggcatagaaatgtttttatacttcccttttccagcactggactacgtatgtctttttaaatgtgaactacttgatgattacagggagaacaaaatggggatttaaattaaagtatcttaagtgaggctttaggtttgttttctctacgctgaatttgtgtgcagtgttctcccctttctttagtcctgtattcaaactttaatacttcaaagcataatttactgaacagagatgttattgtacagttttattagccggcagatggtaatataaggtttcaccttagtcattcttaataccagtgtgaaatacattccattaaaataatttgatgtaaagtatgaaatagctaatccacttatttcaggaactttctggtaacctgcctacatttacttttgagaataaaggttcaaaataacacatttaattgtagagcaagtgttagtagcctatggggtatgaaccacatggtggtatgtgaacctaatatttgttgtcatattcttctaggaagccatgctcataattgaagcatatataaggtttgatgtcattgtctcctacttctttgccttttttttaatcacaggttttggatttttttgtttaataaaacaagtttgaatattattcctatctttgtatttactagtataaaatgattgttattcatctgtatatgaatagaccaccagaaaaaataacgggcatcagaaaaattgtttgaattctaccatttctttgcagattacaaaagtgtcctattcgttttttgttggggtgattgatgccaagtaaaaagagcagcttgtttaagccctctcctaaataacttgccaaccacccttttcagatgtaatcttaggcaaaccatgtaagctttctaagcctcatttttctgaagaaaataagaatagtgccagtacttctctcacaaaggaggtaattcatgtaaacatactacctagcacatagtaagtgttcaaatgttagctgctgtttttgtttccataattgttattaatattaccattatagtaggttcatttctctgaaatacttatggacttacatttttggaatttcagaggagtcatgtgaggtcctgatcctgagtagaaaattaagcttgatatatgacagaccagtagaaaactaaaaacatttaggagccagaggagatcatctcagctaagctgcagaagacataggtatttgaggcttgcattcccccagagatcagttgtaatcaggaaggaatatattagatattgatcttcactttcaataaagttagcatgcagttgacaaagaacattgaaaggggttttttttcttaaataatataagcaactttagaataaagtctaccttatagccagctgatgcttctgtagtaattttccaaagtaaagagatgcttctattttccctccacaaactacacaataaatacttgttaacagactgaccatactttatttatagtgctgttttgtcttattttttattgtaccaccttatgacacaagaaaaactattaaggagccatttaccaagtcttttagggaaaacatttgggttacagaaaccatggagccaatgataccctgagatggcagcctccctaacgctggcaagctgtcttataaataattgtccatggaaacatcaatgtagataaggcagccttgctggcagtgttggggtggagggcagagttggggatggtatgcaagattctattggggagagtttaggatagactttaaaaagtgtctccttatggagagttggaagtactagaaatatttgctgcttaaggtcatagaaatcctgaaatttaaaataccaggtttgcatttaataaatgctcatttaataaatgaattaaatggtaagcttttttactttataggcaaattaaaatatctattctctctagaatatgaacttcctattagcctaggaaggcaagaactatattaatgcatcttcatcactctatccccaatacctggcataatacataatatagcacatagcaagtattcaataaaaatgtgctatgtgaacaaatgaatttttgtgctaaaattgcaagctaaatgttgtgaggcaatagttgacatgcctttgaaatagtgtttttccttgtgtgtacttcttggagaatcacctggtggcttgattaaaaatgcagattcctagtcggacacagtggcacacacctctaatctcagcactttgggaggccaaggtgggaggattgcttgaatccaggagttcaggatcagcctggtcaacgtggcaagactctgtctctacaaaaaattagccaggcttggtggcatgcacctgtagtctcagctgttttggagactgagttgggaggatcccttgaacctaggaggtcgaggctgcagtgagcaagtttgtaccactacactccagcctgggtgacagagtgagaccctgtctcaaaaaaaaaaaaatgcagattcctggcttcatctaagacctactgaatcagaatttctggaggtaggccttgggaatctatttttgacaaggtctaccactcttgtgtgtacaaggtatgtagtagtataatttgcctttacaatagttatcagctaaacctttgaattaaaaaaacaaacagtatctaagctttattgagcaatgtttatgccaggaactgtgctaaggattttactagcattaccttatttaatccttacaaagcaggtacaattttttctattttctgatgaaattatggcatggaaagtggtggcaccggggcttgaactcagtgctgtgactccagactccacactctttaaccattacactatactatcctgacattaatattctatatgattaagcttgcggagaagtaaattgaggtttgatatgactttacaccgttttaatcaatactgtgggtttatggaaaggcacagtgttatcaaggtgtataatattggggagggtatggatttcatctagttactacacaatcttacagtgtcagagctgatcctagtcctccttgattgtctttggtgctgaacttactgatccttagccctaagtcagtgtagcagagtggttaaggacaggggtcctggggcaagaccagggtttgaatctttatcttagtcaaaatatctgacttctatgcctcagttttttcattatacttctgagaaatgtatgtccattagttcttcaaaaatatcatcctttgcatttttatttttgtctctttctgagactgttactatctgaatgcctgctcttctagcctccatatcttttagcttttcttttgcattcctatttctttattctttcttactatcttctggaagagtatctcagtcttatctcctaattcactaagatattcaactgtaccccgcttgctgtttatactgagttattttttcaactgttatttttttttcctaatatttcatttagactcttaaatttgtttgaattccatattggtaatatcttcctttatttcatctgtttcagtaactatgttttagataaaatatgatgccagttgttaccccagggatgtctgtgtgtgtgtacatgcacatatgcacacattgtctataagtttctggaattcatattgccttttcccttctatagtttctgcagagttggttttgagggcaggagctagcagctcatgctggtttgccatgggagtagtttcgtccataatatggggatgatgattatatgtgcttcatagagttattatgaaaaattaaatgaagttcttagaacagtgctggtatgcagccatgcattcagtttagctttaaacaaatctacagatggctaagtttccagatcccaactttcgaatatactcttttgaaaagctagattatggttttgatttgcatttctctgatggccagtgatgatgagcattttttcatgtgttttttggctgcataaatgtcttcttttgagaagtgtctgttcatgtcctttgcccactttttgatggggttgtttgtttttttcttgtaaatttgtttgagttcattgtagattctggatattagccctttgtcagatgagtaggtttattcacgatagcaaagacttggaaccaacccaaatgtccaacaatgatggactggattaagaaaatgtggcacatatacaccatggaatactatgcagccataaaaaatgatgagttcatgtcctttgtagggacatgggtgaaattggaaatcatcattctcagtaaactatcgcaagaacaaaaaaccagacaccgcatattctcactcataggtggaaattgaacaatgagatcacatggacacaggaaggggaatatcacactctggggactgttgtggggtggagggaggggggagggatagcattgggagatatacctaatgctagatgacgagttagtgggtgcagcgcaccagcatggcacacgtatacatatgtaactaacctgcacaatgtgcacatgtacgctaaaacttaaagtataataataaaaaaaaagaaaaagaaaagctagattatagagctaatcagaagggggaagggtactgaccctctcttttagagtttgagctgtcccaggattctgccatatattctaatgttttctgtctctcttgttgcaaggaaaatatgaaaaaaattgttaattaattttcaaaaattcccattgtgaacatattcaaaccagaaaaatatattcatatacccatccgctagatttaccaattattgttttgccacatttgcctcatctatttttctgaaatcttttaaattacaagtatatggcatttcacttgtaaatacttcagtatataatacatctttgaaatagtaagacatttcttatataattacaataccataaaatgaataacttcctaattccctaacaccatctcataacacatccatattttgattaccctgcttgtgtccaatatatatatatatatatttaatattctaagttctggggtacatgtgcagaaagtacagttttgttacatagttatacacatgccatagtggtttgctatacccatcaacccgtcacctacattagatatttctcctaatgctatccctcccctagatccccacccctcaacaggccccagtgtgtgatattcccctccttgtgtccatgtgttctcattgttcacctcccgcttatgagcgagaacatgtggtgtttgattttctgttcttgtgtcagtttgcagagaatgatggtttccagtttcatccatgtccctgcaaaggacatgaactcgttcttttttatggccgcatagtattccatggtgtatatatgccacgttttctttattcagtctgtcattgatgggcatttgagttggttccaagtcttcgctattgtgaatagtgccgcaataaacatatgtgtgcatgtatctttatagtagaatgatttataatcctttgggtatatacccagtaatgggatcgctgagtcaaaatggtatttctggttctagatccttgaggaatcgccacattgtcttccataatggttgaactaatttacactcccaccaacagtgtaaaagcattcctatttctccacatcctctccagcacctgttgtttcctgactttttaaagatcgccattctaactggcatgagatggtatttcattgtggttttgatttgcatttctctaatgagcagtaatgatgagtattttttcatgtctgttggctgcatatatgtcttcttctgagaagtgtctgttcatatactttgcccactttttgatagggttgtttttttcttgtaaatttgtttaaattctttgtagattccggatattagccctttgtcagatgagtagattgcaaaaattttctcctgttctgtaggttgcctgttcactctgatggtagtttcttttgctgtgcagaagctctttagtttaattacatcccatttatcaattttggcttttgttgccattgcttttggttttttagacatgaagtctttgcccatgtcctgaatggtattgcctaggttttcttctaggatttttatggttttaggtcttatgtttaagtctttaatccatattgacttaatttttgtataaggtgtaaggaaggggtccagtttcagttttctgcatatggccaaccagttttcccaacaccatttattaaatagggagtcctttccccattgcttctttgtgtcaggtttgtcaaagatcagatggttgtagatgtgtggtgttatttctgaggcctctgttttgttccattggtctatatatctgttttggtaccagtaccatgctgttttggttactggagcattgtggtatagtttgaagtcaggtagcatgatgcctccagctttgttctttttgcttagaattgtcttggctttgcaggctcttttctggttccatttgaagtttagagtagttttttccaattctgtgaataaagtcagtggtagcttgatggggacagcattgaatctataaattactttggtcagtatggccattttcacgatattgattcttcctatctttcagcatggaatgtttttccatttgtttgtgtcctctctttatttccttgaacagtggtttgtagttctccttgaagaggtctttcacatcccttgtaagttgtattcctaggtattttattctcttagtagtaattgtgaatgggacttcactcatgatttggctctatgtttgtctgttattggtgtatagaaatgcttgtgatttttgcacattgattttgtattctgggactttgctgaagttgcttatcagcttaaggagattttgggctgaggcgatggggttttctaaatatacaatcatgttgtctgcaaacagacaatttgactttctcttttcctatttgaataccctttatttctttctcttgcctgattgccttggccagaacttccaatactatgttgaataggagtgatgagagagggcatccttgtcttgtgctggttttcaaagggaatgcattcagtttttgcccattcagtatgatattggctgtgggtttgtcataaatagctcttattattttgagatacgttccatcagtacctaatttattgagaatttttatcatgaagggttgttgacttttgtcgaaggtcttttctgcatctattgagataatcatatggtttttgtcattggttctgtttatatgctagattacatttattcatttgagtatgttgaactagccatgtattgcagggatgaagccgacttgattgtggtggataagctttttgatgtgctgctggattcggtttgccagtattttattgaggatttcatggatgttcatcagggatattggcctgaaattttctttattttgttgtgtctctgccaggttttggtattcaggaggatgctggcctcataaaatgagttagggaggattccctctttttctattgattggaatagtttcagaaggaatggtatcagctcctctttgtacctctggtagaattcagctgtgaatccatctggtcctggacttccttttgtttgtgggctattaattactgcctcagtttcagaacttgttattagtctattcacagattcgacttcttcccggtttagacttgggagggtgcatgtgtccaggaattcatccatttcttctagattttctagtttatttgcaccaaggtgtttttagtattctctgatgttagtttgtatttctgtgggatcagtggtgatatcccctttatcattttttattgcgtctatttgattcttctctcctttcttctttatcagtctggctagcggtctatctattttgttgatcttttcaaacaaccagctcctggattcattgattttttttgaaggtttttttatgtctctatctccttcagctcttctctgatcttagttatttcttgtcttctgctagcttttgaatatgttgctcttgcttctctagttcttttaattgtgatgttagagtgttgattttagatctttcctgctgtctcttgtgggcatttagtgctataaatttccctctacaggctgctttaaatgtgtcccagagattttgatacgttgtatctttgttctcattggtttcaaagaacttctttatttctgccttaattttgttatttacccagtagtcattcaggaggaggttgttcagtttccatgtagttgtgcagttttgagtgagtttcttaatctcgagttctgatttgattgcgctgtgttctgagagactgtttgttatgatttccattcttttgcatttgctgaggagtgttttacttccaattatgtggtcaattttagaataagtgcaaggagttgctgagaagaatgcattgttctgttgatttagggtggagagttctgtagatatcttttaggtccatttggtccagagctgagttcaagtcctgaatatccttgttaattttctctcattgatctgtctcatattgacagtggggtgttaaagtctcccactattattgtgtgggagtctgagtctctttgtaggcctctaagaacttgctttatgaatctgggtgctcttgtattgggtgcatatatatttaggatagttagctctttttggtgcattgatccttttaccattatgtaatgcccttctttgtctcttttgatctttgttggttttaaagtctgttttatccgagattagcattgcaactcctgcttttttttgctttccatttgcttggtaaatattcctctatctctttgttttgagcctatgagtgtctttgcaagtgagatgggtctcttgaatacagcacaccaatgggtcttgattctatccaatttgccagtctgtgccttttaagtgggggaatttagcccatttacatttaaggttaatattgttatgtttgaatttgatcctgtcattatgattctagctggttattttgcccattagttgatgcagtttcttcatagcgttgatggtctttacaatttggcatgtttttgcagtgtcttatactggttgttcctttccatgtttagtgcttccttcaggagctcttacaaggcaggcctggtggtgacaaaatctctcagcatttgcttgtctgtaaaggaatttatttctccttcgcttataaagcttagtttagctggatatgaaattctgggttgaatattcttttctttaagaatgttgaatattggcccccattctcttctggcttgtaggatttctgcagagagatctgctgttagtctgtggtggtcgtttctgtttgttatgtctcttttttttttagcgtattcattttctcaccctccattctggatttgtttgattatttcctggcggtgtttgaacttattctacctcttatatgttctacctcttatatatcctgtacactagaaatcagaaattagatgtaaaggcttgattagatttatgacatacatttttggcaagaatgtcttaggaatgacatgtaaaaaggggttaatatttttttaaaaaccagtatgggaaagggagtaatatatatattgagtgcttatactatctacttttaaatacattgtctcatttactccttacaatagctctgagctatagatgatattattcctttgtagtaaaggatcgcccaactattaaggagcaaagtggccaggtgcagtggctcatgcctgtaatcccagcactttaggaggccgaggcaggcggatcacgaggtcaagagatcgagaccattctggccaacatggtgaaaccctgtctctactaaaagtagaaaaattagctgggcttggtggtgctcacctgtagtcccagctactcgggaggctgaggcagtagaattgcttgaacccaggagacggaggttgcagtgagctgcgattgcgccactgcactccagcctggcgacagagtgagactctgtatcaaaaaaaaaaaaaaaaaatggagcaaagttagcattcagaaagagaagaaaataaatccaacaaggccctttacctttacttaaacttaaaaattactaacaaatcacttaatgtctgcgcctcagtctctggtaaagtaagagcagcaaattaacttacttccaaagtttcttatagttccaacattatttgatcctcacaattgctcaggctactgtgtttttcattttaggtaatgagaggtgttctttatgcatcagctaacttttttaatttaaaaatttctttatttttatagatttagggagtacaagtgcattgtttttaaacagatatattgcacagtggtgaagtctgggtttttagcgtaaccatcacctgaatagtgttaattgtacacaatacgtaatttcttatccctcatctccctcctaccctcccaccttttggagtctctagtgtctattattccattctgtttgtccctgtgtgcacattgtttagcccccacttataagtgagaatatgtagtatttgactttgtatttctgagttatttccttaagataatggcctctctagttccatcaatgttgtggcaaaagacatgatttcatttatttttatgtctgagtagtattccatggtgtgtgtgtgtgtgtgtgtgtgtgtgtgtgtgtgtttgtgtgtgtatacacacatttccttttttatccttcagcttttaagttcgggggcacatgtgcaagatgtgcagatttacatgggtaaacgtgtgccatggtggtttgctgtacagatcacctcaacacctaagtattaagcccagcatctattagctattcttcctgatgctctccctcccctcaaccctcaccccgacagtccctagcgtgtgttgttcccttcaacgtgttcatgtgttctcatcattcagctcccacttataagtgagaacatgcacataccacattttctttatccagtcatccattggtggacacttaggctgattccgtgactttgctattgtgtatctgctaagtttttaaaaatacatatatatatattcaggacaggtaataactattggtctttccaaagttatgacagccatatatctaggattttcttggacaactccaatatcagataatttgtcctgtcaaacatctcaattttttattagaaaaacttggttagggtgtaaaacacctctgtatagaaatatgttttttttttaagagatagagtctcactatgttgcccaggctggtcttgaactcctcagcccaagcaatcctcccgcttcagcctcccaagttgctgaatctacaggcgtgcaccaccatgccaggctcttttctttctttttttttctttttaaggtgagggtcagctttcacactattagaaaaggtgttagaaataatagaaagtggtaaataacaccagtagagttctcccagaagccagccaagagaagagagtattttgatgaagagagtgattaaattctgtcacatgttactgatgagtaagataggatcaggtctgataattgaccaattagatttagtgacacaaaggtcattggtaaaccaggcactgtactcagcacttcatgtgtagtatttaatctccacaataatcccatgaagtagatgcttagtagcccattttatataccagaagactgagggttcagcaagttaacttgctcaaggacaaagggctaataagtggtggaactaggattaaaatctgcttgagactcactgttcaatacaagagccactagctccatatggctacttacatttacattaaaattaagttaaaaaatcagtttctccatcacattagtcacacttcagatactcagtagtcacatgtggcttgtagctactgtcttggatagtgcaaacacagaacatttccatcgttgcagagagtactattagagagcagtattccagagcctgtgatcttaatcactacacctaaagcctcccagttgacaaagttaccacctttttttggtgtgtgtgcacgtgcgtgtgtgtgtgtgtaagtatatataatttaaatcattccattaaatttacctctgaaattcaaaagactgaaacagatcttctttttatcaaataagttgattgcagagattatattggtgtttacatttcaggcaacctgctcatgaaattatccattgtagagagaaacctgggaaacaaagctatacgtcctttaatttttttccccattttcatttaaagttcagaagaacataatatgttggaatgatcaatgattctgaattaatatagatatttgaatgtcacagtatctgtatattaatatcctaaagtggtgttactatattggttaggttgactgattcatacatgtaagtcttttaacactcctggagtaagagtagcaagaaactgaagctatgatccttttaagggtttaagtaggtgaatacctcacttttgtctcttccattactagtgttttcatgaccaagttttttacatcagatttattattttggacccttaaaggaatataaattgcaagagagattttgatcagtgtaagaattactagatggccttatttatttccttctttattattgtacttcttatcttttattaatgttttctttctctaagatatatttgaaagccaggcatggtgacacacccctgtagttccagctactcaggagactgaggcaggaggattgtttgagctcaggggttcgaggctatgtagtacataatcacacctatgactagccactgcattccagcctgggtaacatagcgagcccctgtctcttaaaaaacaaaagatgtggccaggcatggtggctcacacctgtaatcccagcactttgggaggctgaggtgggcggatcacttgaggtcaggggttcaagaccagcctggacaacatggtaaaaccctgtatctacaaaaatacaaaaaaaaaaaaacacaaaaaaattagccaggcatgtggtggtggcaggcgcctgtaatcccagctacttgggaggctgagccaagataattgcttgtacccaggaggcagaggttgcaatgagctgagattgcgccactgcactccagcctgggtgacagagtgagactctgtctcaaaaaaaaaagacataatttaaactgctaaatagctgctttcattcctatttcatatcttctgtttcctttttacattgtacctataattgagttagagaatgtaacaatgtttgtgaaatgttaactcaagattgtgtagaatgaaaattgagtttcgattcaggctatacttggaaagctgcaacctctagaatgtcactgcagtcatataaaatctagaatgatgactttctacctcacagtggcatgtggcatatgtaatagttgtaatggatatccaatttttaaaggtaaattgctaaatatagtatctagttctttaagtgttaaggagaaaacattcttatcaaaggaggcttttaccttccacctaagtcattttggcaggcctgccttttctttcatttaaagtgataagttctgtagttgtcactatcttattcataccaacaatttgggaatctggatatatttataaatgctctttggcaaaggttatgtgctcgtgaccaaaaaatctgatacaaggtgttatgtgaatttcattcaataagctctctagttacttatcaaattcactgcattttttccagcgtagtttgggaagaaagaaccttcaaatttgaaagtagaggctttttgaccaggaatattaaatttctttactaagaagctagatttatttaagcaataaaaggaatttttcatagctttttgagtgggtcatgtggcagttaagtattctggtgattttatttccagatattacaaaactcaaattgaaagtaatggcaagcaaaatatttttgaaacatggcaaaccccctcccttacccccaggcaaagccttgattatttttttagatattttattttcaaggttgaatttcagaattaattagatgggaatttttgtcagcttgccaaatactttaaacttctaagtaaattaacttaaacttataatttatcattaattttgttttattaattgaactagtcgttttaaaagcttaaactaatttagattgtgagctagaatatagaccttgcttttccctgtgtataagctttttcacttatttaaggaaaaaaaagtttagacaaagaaaagtaaaggtacacatttggatgtaatttaaatctcattttgatgactgttggcttagtgattatagattctgctccactattgttttcaataatagtgttactctagcaactaatataaatgcatgcttttacaggataaaacaaaaacctttccaccagttgtgttgtgtattgggatgaaattttctttattaacttttataacttgctctggactttgcaaaactgttttttcccaaagaaataatctgaagatcctgttacaaatacttttttgtccccttaatttcattatttgtttcttatattgatagtatgctgctattaatttaaaaggggaagatttagaaacagtttgtatcagaaatcctatgtcttttttttctcttattcatgtcttacatagcactctggaggaaagaaagacttctgccttcctgcttatgaactacataaatgattttcaatttaaaaaaccagttaacttacttgcacggtcttttctttgttaaaatgaaaattatggaaagcatgcttatctttagtctttgaattttttggcataatcatataaagaagtgattgaaatacattaaactttattcattaacccttgttcgcagatttggtaataaaaactggaagcagtcttaatgttttaataaactcttaagtaagggaatgattaaatagatgataaagtataactatataagcactgtgcagctattagaaatgatgaaggtttggatttgatgtaaaatgatatccacggaaaggtattaagagataagagtatgtttcaaaactacatatacttcaattccattttttttctttcaacttttaagttccagaatacatgtgcagctttgttatgcaggtaaatgtgtgccatggtgggttactgcacagatcatcccatcacccaggtattaagctcagcatccattagctattcttcctgatgcactccctcccccaaccccccacaggtgccaagtgtgtgttgtccccctccatgtgtccatgtgttctcatcgatcaggtcccactttataagtgagaacatgtggggtttggttttctgttccttcattagtttgagaataatggcttccatctccatccatgtccctgcaaaggacatgatcttgttcctttttatggctgcatagtgtgtatatgtaccatctggtatatgtaccacattttctttatccagtctatcattgatgggcatgtaggttgattccatgactttgcttttgtaaatagtgctgcagtgaacatacgcatgcatgtatctttataatagaatgatttctattcctttgggtatatacccagtaatgggattgctgggtcaaatgttatttctgcctctaggtctttgaggaatcgccacactgtcttccacaatggttgaacaccaacagtataaaagtgttatttttctccacaacttttccagcatctgctgttttttgactttttagtaatagccattctgattggcatcagatggtatctcattgtagttttgatttgcatttctctaacgatcagtgatgatgagctttttttcatatgtttataggctacaagtgtgtcttcttttgagaaatgtctgttcatgtcctttgcctactttttaatggggttgtttctttctcatagatttgtttaaatgtcttgtagattctggatattatacctttgtaatatagatagattgcaaacgttttcttccattttgtaggttgtctgttcgctctgatgatcgtttcttttgctgtgcagaagctttttagtttaattagatcccatttgtcaattttggcttctgttgcaattgcttttggtgtttttctcatgaaatctttgcccatgcctatatcctgaatggtattgcctagattttcttctggggtttttatagtttggagttttacatttcagtctgtaatccatcttgagttaaattttgtgtatggtgtaaggaaggattctagtttcagttttctgcatatggcttgcctgttctcctagcaccacttattaaatagggaatcctttccccattgctcgttttggtcaggtttgtcaaagagcagatggctgtaggtgtgcagtcttatttctgggttctctattctattccattccattggtcgatgtgtctgtttttgtaccagtaccatgctgttttggttactgtaggcttgtggtatagataaaatcaggtagcatgatgccttcagctttgttctttttgcttaggattcattggctatttgggctcttttttggttccatatgaattttcaaatagttttttttttctaattctgtgaagaattgtcagtggtagtttaatgggaatagcattgaatctgtaagttactttgggaagtatggccgttttcacactattgattcttcctatccatgagcatggaatgtttctctatttgtttgtatcctctctgatttccctgagcagtggtttgttgttctccttgaagaggtccttcacttcccccttgctagctgtattcctaggtattttattctctctgtagcaattgtgaatgagagtttattcatgatttggctctttgcttgcctgttgttggtgtataggaatgctagtaatttttacacattgattttatatcctgagaatttgctgaagtttcttatcagcttaagaagcttttgggctgagacagtggggttttctagctatagggacatgtcatctgcaaacaaagatattttgacttcctctcttcctatttgaatatactttatttctttctcttgcctgattgccctggccaggacttccaatactacgttgaataggagtggtgagagaaggcatctttgtcttgtgccagttttcaaggggaatgcttccagcttttgcccattcagtatgatattggccatgggtttgtcgtatattgctcatattattttgagatatgttccttcaatgcctagtttattgagagttttaaacaatgaaggcatgctcaattttattgaagatgttttttgcatctattgagataatcatgtggtttttgtgtttagttctgtttatgtgatgaatcacatttatttatttccatatgttgaaccaaccttgcattccagggatgacgccatcttgatcatggtggataagctttttgatgtgctgctggtttcattcagtttgccattattttattgaggatttttttgcatcaatgttcatcaaggatattggcctgaagttttctttttttgttgtatctctgccaggttttcatatcaggatgatgctggcctcatagaatgagttacggaggagtccttcctctgtaatttttggaatagtttcagtattcagctcctctttgtacctgtggtagaattcggctatgaatccatctggtcctgggctttttttggctggtaggctatttattactgcctcaatttcagaacatgttactagtctattcagagattcagttttttcctggttcagtcttggagggtgtgtttgtccaggaaattgtctgtttcttctggattttctagtttatatgcgcagaggtatttatattattctctgacggttgtttgcatttctgtggggtcagtggggatgtcccccttatttctgattttattttttatttgatttttattttatttgattcttctttcttttcttcattagcctagctagcggtctaactattttattaatttttttaagaaaccacttcctggattcgttgaatttcttttgttattttttttttcttaggggttttccatgtctctgtttgcttcagctcagctctgatcttagttgtttcttgtcttctgctagctttggggtttgattgctcttggttctctagttcttttagttgagatgtttggttgttaacgtgaaatctttctagttttgttttgtttgtttgtttgtttgtttgtttgttttgagacggagtctcactctgttgcccaggttggaatacaatggcacgatctcagctcactccaacctccgcctcctgggttcaagggattctcctgcctcagcctcccaggtagctgggattacaggtacctgccaccacgcctggctaattttttgtattttttagtagagatggggtttcaccatgttggccaggctggtctcgaactactgacctcaagtgatccacccgcctcagcctcccaaagtgcagggattacagacgtgagccactgtgcccagtctttctagctttttgatgtgggcattttagtgctataaatttctctcccagagattctgatgtgttttctctttgttcacattagtttcaaaaaatttcttgatttctaccttaatttcattatttacccaagagtcattaaggagcaggttgttcaatttccatgtagttctgtggttttgagtggatttcttattcttgagttctaatttgattgcgctgtggtctaagagactgttatgatttcagttcttttgcatttgctgaggagtattttcctattatgtgataaattttagagtatgtgttgtgtggcaatgagaagaacgtatattctgttgtttttgggtgaagagttctgtaaatatctatcaggtccacatgatgcagagctgagttcaggtcctgaatatcctcgttaattttctgtctcaatgatctaatattgtcagaggggtgttaaactctcccactattattgtatgggagtctaattctctttgtaggtctctaagaacttgctttatgaatctgctttagcatcatcgtgatgctagctggttattttgcagacttgtttgtgtggttgcttcatagtgtcactggactgtgtacttcagtgttttttttagtggctgataatggttttttctttccatatttagtgcttccttcaggacctcttgcaaggcaggcctgctagtgatgaatgccctcagcatttgcttgtctaaatgggatcttatttctcctttgcttatgaagcttggtttggctgtatatgaaattctgggctggaatttcttttatttaagaatgttgaatattggcccctaatctcttccggcttacaggttttccactaagaggtctgctgttagtctgatgggctttcttttgtgtaagtgacctggcctttctctctggctgccctcaacattttttctttcatttcgaccttggataatctgatgattatgtgtcttggggttgatcttctcgtggaatatcttactggggttctctgcatttcttgaatttgaaatttggcctgtcttgctaggttgtggaagttctcctcgatgatatcctaaagtatgttttccagcttggttccactctccctgtcagttttagggaccccagtcagtcgtaggtttggtctccttacataatcacataattctcagaggttcattccttttcattcttttttctctattcttgtctgcctgtcttatttcagaaagatagtcttccagctctaagattctttcctcaccttggtctcttctgctattgatagtttgcattgtgaagttctcatgttgtgtttttcagctccatcaggttggttatgttcctctctaaactggctattcttgctatcagctcctgtattgttttatcgtgattcttagcttctttgccttgggttaaaacatgcttttttttagcccagcgatatttgttattactcaccttctgaagcgtatttctgttatttcatccttctcagcctcagcccagttctgtgctcttgctggagaggtgttgcagtcatttggagaagaaaaggcactctggctttttgagttttcagcatttatgcattgattgtttctcatctttgtgggcttatctacctttgatccttgaggttgctaacctttgaatgggttttttttcggggcctttttttgttgttgttgacattgctgctgttgttttctgtttgtttgtttttcttttaacaatcacgccaccctactgtagggctcctgtggttagctgggggtttgctccagaccctagtttcctcggcttctccagcacttgcaggaggcggctggcaacctgcactggaagatctcacccagtcaggagggatgggatcagggacccacccaatgaagcagtctggttgcttcttggtagagcaggtgtgttgcactggggtggacccttttcttcctctgtaccacctgtattctccataaccagcaagctgaaatggctgatttaacggaagcacagagatggccgctggccctcccctggggagctccctcccatggagagatcagatctctgtctgcaggagtgggtcgggacctgtcaaagaagcagtctggctacaatctggcaaggcagctgcgctgtgccttgtgcggggaaggagggggtgctccttgtctgggtggtctgcactctccacaacggggaggctggaacaactgagtccccagaaaccacagagatatcagccgccccccacccccccaccacccccagctccctcccagcgagagatcagatctctgaccctgcatgggaagtcctgctcagtttggagtgggtccgtctggttgaagaagcagtctggcccccttatctggcaaggccactgcactgcgctgtgggcggcccctcctcctctgggccgtgtccactcttcacagctggcaggctgtattggctatttcccctgaattgcagagatggcgaccgcccctcccgctggaacttggtcttgtctcaggcggacttcagccctctgctgttggctagctgagattccaagccagtgggtcttagcctgtgaggtgcgatggaaatggggcctgccgagccatgctgcttggctccctgtattcagaccccttcctagggatgtatatggatggattttatgccttggcggggatcccggggcaggagcatgcagaactcccagatctctgtgtgcgcctgagctgctgttttgctgagactccacacagctctgtgtatcagacccaaggtcctggtggaatgggttcacaacaggatctcctgctccgcatgttgcaaagatccatgggagaagcgtggtggcttcctgagcgggttgcacaatcactcactgcctcccctggctgggggtgggggttccttttgctccacgtggctcctggatgggccgtagcccttctccttgctctccatgctttttgcctattcagtcccaatgtgagaacctggatatttcatttgaaggtattggattcattcaccccttttcatgcctctctgtgagtgccacagaccacagctgcttctcatcagccatcttgccctttgtccagttccatttttatgcaaaggtgtgtgtgtgtcaatgtgtggaggaataaaataaaaaatggtactggtagttatttcctggttttgtaattggatgttagtattgtttgcatttctttgttttgttcggttctttgaaaagaggattatagtagccaggatggaggtaatgttttaggcaaaaaatctgaaactttttaagatagaaaacaaacaaattcacatgtacttttcctgtgacttacattggcatttcagttgactgtaagtcaaaaggaaagttattgcatcattagaggctgaaccttcaccataacctgaccttagacagtcatgtctgacttgataggataggttttaaatctggaattagtggggtgaatacgttaaaggggtttagaaatggcgtttctcaaaataagtgtctcctgaagatgaaaatggtaaaatagtgcgtggtattattttcaggcatagtataagcctgaactggcctttcacaagtttgtcttgagacttgtcattgtttcagtttttatgttttcttttattaaattaacatgcttgttttaaaaagttcaaaaagtacaaaagtacttttaggttcagtggctcatgcctgaaatcccagcactttgggaagccgaggcaggtggatcacttgaggtcaggagttcgagaccagcctggccagcttggtgaaactccatctctactaaaaatacagaaattagccatgcgtggtagcgagtacctgtagttccagctactcaggaggctgaggcaggagaatcgctggaacctgggaggtggaggttgcagtgagcactgtattccagcctgggcaatagtgagactctgtctctaaataaataaataaaagttaaaaagtgctaaaagtaagaaaatagacataagttccccctcccctggaatctttcattgaattacctttttttttctaagggaatagttctgggaagtagaggaactgtatctcaataaaacagacattctttgtggtgtgatagaatcatcactgcataggagccaggaaatttagtttccagtcccaggtagtccttagctgtataatcggaaaaagttactttgcctctttgggcctcaatttctactaattctatgatgacacagttggacttagaaattttaggatgctaaggactgacttaataaagctttcctggtatctcagacattttttaaaaggctgtatatgagtttgtgtatatgtgtatgtgcacatgcatttctggaaaggcttcccctccaaccattaaatatataattaatgttataaattgtgttgtttataattgagaaataaataccacacttgacaatgtctatttccaaagaattgggtatttttgtgcttttgtttattcctggtattttcatatcatcctgttacacacgtgagcagagaatgtgtgtatcatccatatttaatttacagtcatagctagactaagttattatccaatgttattgaaagaatcagtagcacagatagaaatgaattagttcctagtatacagttttcttggcctttctcttaaccagtttgctttcttagagaaatgaactgatctgactatgattaagatcatttattgctagacagaagtaaaattagagattatccatagaacattttaatcttgtaatttatttggtgtgttgtagaacacctgacttttctcattgtatttggtaaatgtgttaaaaatgttaagtcagtgttatctggttttattttatctcttgagtcatgtttggcatgtatgtgttgggggggtgggcataggagttacacatttaagaaagccctatcttttagtagaataaattaatgcagattggcctgtcttcctgcctgcctggtcagtaacagtggactttggagattgatctagtgatgataaacctattgtatgtggcataagccagagaagtcagcttcgatagcaagtttctacattggcgtgagagagaagcatttagttaacatttcaaagtaactaagcctgttagcatccatgtattctatcagtagactttattgagtcctgtcatttgtatggtcttttattgttttttgttttcaacaaaggaaatagcacacacatacatctcaaaatggattatacctgttgtaatctcagtattttgggagatcaaggtgggaggatcacttgaggccaggaatttgaaaccagcctgggaaacatactgagatcctatgtctacaaaatttttaaaattagccaggtacagtggtatgcacctgtagtcctagctactcgggaggctgaggcaggagaatcacttgagcccaggagttcaaggcagcagtgatctgtgatcaaaccactgcactccaacttgggtgacaacatgggaccctatcttaaaaaaaaaaaaaaaagaattataaagtctctattatggttgtatctattaagaatatcagttctgttaagaaaggaaataattgtttcaaatgtttattggggtagcaagataaaaagttgtttacaagatattaaatatcagaatatttggaattagtgtcagtatttgctattatatagaaaaaaaacctggggcctcatgatttgaatttttcatcttgagttatttaatgcacatttgagttcttaccactttttggaccctatactcaaggtgtgtaaaggcataattattttcaaatgtgggctttgtctatgcaaaaatttatgagtgcattaagcatcactaggtgcagattaaatttgaattcagtgtgctgtatgtatacctccactactttcatttgatcagaaatgcacaatttagaaagtgtgttctaggaaaacttgttaaaagctatggaaaatccttctgtaaagtgaattaatttgccttttatagatccaggttttcatatgtgatttcttaatgaacaacttgtgaatattttaaatttattaaaagtaacatatctgtaattcactttaaacccccaccccatctatctttgtgtctcactctcacagtcataattaaacagagcaggagtttagttgttcttactgagtatataaatgatcccaatttttaagcttttaattttttaatcttaaaagactggcttaagataccatgatttctttaaactatatatactatgataataaattgaaaaatgtatatcaatttaaatttgacccatgggtctttacagtgtaatttaacatttacattcctgcagttggaatataagggctatatgtttcagttaaactctcctataactgtttagattaatttagattagttttttgttaatatagtggttggcagttgaaatgattgtgaaaataaagttgtttatgatgtataaataggagtagccttgatttctagcacaggcatccaatatagtcactaatttaagcagacttatgttagcatttatcaactcagaattaagcacaaaataaaatgcatataaaaaatgttaagttggtggaaagaccttgaaatctgaaaagtggtaattaaaaaacaatggaatgcctaaaccatactgtataaacatgaaagtcttacataagaggctggtgttacatgttttgctgctgttttttaggtaatctgtcatatatatcagaaatatatatagcaatcaggttttagtttctagtacagttgaccatagaactatggagatattatactgtccagaggggaaaaataattgtctcttatttcaacccctctaaacaggataccatacttgcagagctccttcagatacataaagaacacattgtaggataccatgaacatgattctcttttggaccacaaagaagaagaagagttgactgaagaagaaagaaaagcagcttgggctgagtatgaagcagagaagaaggtagttgatgcaaaatgtgtttttgtttttgttatgttagtgatttgaaagagcaatgaagaagaaaagggtcacatttgaaacaggtaataataatatagtgggttttaggaacacattccccaattacaagaatctctttatgggttggtttcagctacctttagtggtagagtaggaggagaagacagaagaaaacagtttacacttaaagagtagtaatcccatttctgcctagtatttgttgaattgagaaatgagtgggaagccatatatttagcatcactaacctcccatcagtaccctctctgtagtaacaaacatacaggagcttagtgtttggaggttgtagtaaatgtagctttgcatgtataccatgaaatctaaattttggctgaatatcagaacacaaaaatatttcattattagacattaatgccatttgctccagcagcaactttatttaagatcattctatgtctgttttaaacatcaacccacttgagcaaaaatgtgcctgagcatgggaaaccttatcctaatacctgaatccttttcaaactcctaacttattgtaccaaacttctttaacattagtgtgatgttcagagtctcatcagaattctttgagttgcccccattctgtgggaattatcagaaaaaaaaagtacacctttaggggttaaagctttccttgtaataagatcttggtttcgggtgaaaagggtgttttgtttgtgtgtggaagagtgttaataatttcctggatctgagaatgtggattcttttctaaaccagtaggtgatgtagaatttcaagttttaaatcacaatgtgaaaagtgcataatttttttgtttttagggactgaccatgcgtttcaacataccaactgggaccaatttaccccctgtcagtttcaactctcaaactccttatattcctttcaatttgggagccctgtcagcaatgagtaatcaacagctggaggtgagttgtgaagtacaaaagtagtttgacatgaattaaaggcaatttcaagtgccttgttgttgagggttccctatgcagaaatatcacattctccaaaagattacccctgaatagacgaataaatttttgttttatttgttgaccgttttgaaccaacatgatgttgtaaaatgtggtttgttcagagcacaaaggaatcagtcggtgaattaatgtagtttgaattattttaattaagaaacaatagggctgctgactcgcttgggaaatagcaccttcttcagttataaaatagttataataaattgctatcttactgtttgaaagtaagataaatatactcattaacttctattctagtgcattatagatgcacaattaaatatataatgcccaatattatgaaataaatgatttaaagctagaatcaattgtaaattaaataggaaagactgggtttttattataccaataatgacttaattgaatctgaaacacattataaaatgtgcttatggattcttctgcattattaaattattggtgtgataaaactcaaacttttttaatcttcctaacaagactctttgagcattgatatggtttactccactttattgatactgaattttgctgttctcttcaattatttaaagagttttaaaaccgactgctctaagttggcaaatggaaggattccctatactttaacactatgctgtctttctgccttatataacttatttcttgcattcttctaggacctcattaatcaaggaagagaaaaagttgtagaagcaacaaacagtgtgacagcagtgaggattcaacctcttgaggatataatttcagctgtagtaagctaattggcaattgtcttattccaacctccaatttgtaccctccaccccctactgccatttttttaaatttttaattgttccttcttataaattgatttgcaatagtaaaatactggtaaaatggatggataatgccaaaccgtaacccagcaattttacatagatgttggcacaagagagaaatgggtaaaatgtaagaattgagaaatcaaacatggaaatgtatgcattgtttatataaacattttaattaccagttgtacaaattaaatctaaattattgtttcattccagagatagccagcccaggtacagcagtgaacaacttagtaccctgttttgcatcatgtttttcttcagaaaagaataaaggaaaaggggggtttgaaaccttgggaaatcccgaatatcttaaaataccttaattatttttcctcaattgtacagtaataaggagtaaatagaaaatttttcttttagtggaaggagaacatgaatctctcagaggcccaagtacaggcgttagcattaagtagacaagccagccaggagcttgatgttaaacgaagagaagcaatctacaatgatgtattgacaaaacaacagatggtaagaattctgacgtctgactatttctaggttatgtttaattttcttgactttataataagtttgtatgacatctacgtcagtaattattcctactatggagggatggatagtcattgataattctggaagaaatgtaaaaaacccaggaatgtcaagtaaaagtaatatattttgttacaaaaatgcaacagctacctaaatgggaatccttgaagtttacatatgatctagtccatataattttatttctcatatattctggacatctacgtaggaatttttgccagagttttaccacatttgccaattgtattttatttaacttttaatttttgtgagtatataataggtatatatatttatggggtacataaggtatattgatacaggtatacagtgcataataatcacatcagggtaaaggatatctatcacctcaagcatttatcctttctttgtgttacaaacaatccagttatactcttctagttatttttaaatgtgcaataaattatttttgactgtagtcaccctgttgtggtatcaaatactagatcttattcattctaactatacttttgtacctattaaccatcccccattaccccactccctgctacccttctcagcctctggtaactaccattctactctcttatcatcatgagttcaattgttttagtttttagcttccagaaataagtgagaacatatgaactttgtctttctatgcctggcttatttcacttaacataatgatctccaattctatgcatgctattgcaaatggcagtatctcgttcttttttatggctgaatagtactccattgtatatatgtaccacatattctttgtttattcatctgttggttgatacttaggttgcttccaaatcttaatgttgtgaacagtgctacaataaacatgagagtgcagctacctcttcaatatactgatttcctttcttttgggtataggcctagcagtgggactggtgaatcatatagtacctctgtttttagttttctgaggaacctccaaaccgttctccatagtgcttgtactaatacacgttactaacaacagtgtacacaagttcccttttctccacatcctcaccaatattagttattgcctgtcttttggataaaggccattttaactggggtaagatgatatttcattatcttttttgtttggttggttggttttgtagagacggggtctcactatatttcccaggctggtctcaaactctcgggcttaaacgatcctctgacctcagcctcccaaagtgttgggattacaggcgtgagtgaccatgcccagcctctcattgtagtgttgatttgcattatctaatgactgatgatgttgagtgccttttcctatgcctgtttgccatttgtatgtcttctttcgagaaatatctattcagatattttgcccatttttaaatctgattattagattttttttcctatgcagttgtttgagctccttatatattctggttattaatcccttgtcagttggatagcttgcaaatattttctcgcattctgtgggttgtctcttcgccttgttgattgtttcctttgctgtgcagaagctttttaacttagtggtatcctgtttgtccattttttatttggttgcctgtacttgtgagatattactcaagaaatctttgccagttcaatgtcctggacagtttgcccagtgtttttctgtagtagattcatagtttgaggtctcagatttaagtctttaatccattttgatttgaatgttgtatatggcaagagcttggggtcttctttcattgttctgcgtatggatatccagcttccacagcaccatttattaatgagactgtcctttcttcaatgcatgttcatggcacctgtgcaaaaaatgagtttactggtgtgtggatttgtttctgggttctcacttctgttctcttggtctgtgtgtctgtttttatgccagtaccatgctgttttggttactgtagctctgtagtatcatttgaagtcaggtaatgtgattcctccagttttgttctttttgctcactacagctttgcctattgtgggtcttctgtggttccatgaaaagttcagaattttttttttgtttctgtgaagaatgtcattggtattttgataaggatgcattgtatctatggattgctttgggtagtatgggcattttaacaatattaatttatccaatccatgaacatggaagatcttttcatttttttgtaccctcttccatttctttcatcagcattgtgtagttttcattgtagacatctttcacttctttggttaagtttattcctaggtatttaattttgactgtggctactgtaaatgggattactttctcaatttctttttcagattattcactgctggcatttagaaatgctgctgattttgtatgctgccactttactaagtttgtttatcagttctaaaatatttttggtggagtctttaggtttttccaaataccagatcataacatttgcaaacaggataatttgacttcttcttttccaactgggatgccctttatttctttctcttgtctgattgctctagctatgacttgcagaactatgttgaataacagtggtaaaagctggcatccttgttgtgttccaatttttagaagaaagtctttcagtttttccccattgagtacgatactggctgtgagtctgtcaatatatggcttttattgtgttgaggtatgttccttctataaccgtattttgaggatttatatcatgaaaggatcttgaatattatcagatgttttttcagcatcagttgaaattatcatacagtttttgtccttcattctgttatttgatgtatcacattgattgatttgcatagttaaatcatccttgaagcccttggataaatcccacttggtcatgttcaacaacacctttttaatgtggtgttgaattgtgtttgctattattttgttgagaatttttgcatgaatgttcatctcagatattgccctgtagttttctttttttgatgtgtttgtctggttttggtattaaggtgttactggccttatagaatgtgtttgaagtattccctcctcctctacttgtcacagcagtttgaggaagattggtattagttcttctttaaacgtttggtaaaattcagcagtgaagacattggtttccaggcttttctttgctggaagactttttattacagctttaatctcgttacttgttactgctctgttcagattttggatttcttaatgtttcaatcttggtagattgtatgagtcttggaatttatccatttcttctaggttttccaattttttgcatgtagtttgtcataggagcctctaatgatcctttgaatttctttggtaacagttttaatatctactttttgatctctgattttatttacttgaatcttctcctttttcttaatctggctaatggtttgtcagttttgtttatcttctcaaaaaaccaactttttatttatttctgtgctgatctttattatttattttactaatttggggttttattttcttttgtttttctagttctttaagatgcattggtaggtgtttgttttttttttcttttctgatgcacgcacttagagctgtaaactttcctcttagtaatgcttttgctgtatcccataggtttttgtatgttgtgtttcctttatcattcgttttaagaagtttttcagtttttttcttaatgttttctttgacccactggtcattcaggagcatattgttcaattttcatgtgtttatatagtttcaaaaattcctcttgttattgatttctagttttattccattgtggtcagagaagaaacttgatatgatttcatttgtttgaatgttttaagacttgttttgtggcctaatatatggtctttccttgagaatgatttatgtgccaaggaaaagaatgtatattctgtgaccattggatgaaatgtcctgtaaatatctatttggtctatagtgcagaataagtccgttggttttttttattgattttctgtctggatgatctgtccaatgtgtaaagttgaggtgtcgaagtctccagctattattattttggggtctgtctctctatttagctctaataatatttgctttttatatctggtgctccagtgttgggtgcacatatatttacaattgttgtatcttgttgctgaattgacccctttatcattatataatgaccatcgttgtctctttttatattttttgtcttgaaatctgttttggctgatgtaagtatagctagtcctgctcttttttggtttccattttcatgaaatatcttttttcatccctttattttcactgtatatgtgtctttataggtacaatgtatttcttacaggaaacagatggttgggtcttttttaaaaatccattcagacactatatgtcttgattggagagtttagtccatttatattcactgttattctgtttttaaactttcattttaagttcatggatacatgtgcaggtttgttatataggtaaatctgtgtcacgggtttgttgtacagattattttgtcacccaggtattaagcctagcacccataagttatttttcctgatcatctccctcctctcagcctccaacctctggtcagccccagtgtctgttattgccctctatgtgttcatgtgttctcatcatttagttcccactttttagtgaaaacatatggtatttggtttcctgttcctgcattagtttgctaaggataatggcctccagctccatccatgttcctgcaaaggacatgatcttgttcttattattaggtttatagaagatattaataaaattaaataaatagattgacaacagtcttgaaaatgtgtgctgagatctgggctcagctttacaagccgagaatgagaaagtagatttttgatctctgagatttctaatagttgagtcagctactgttggaatgagaaaagctctagttgtctataacatgttgaatttgtcagactctttgtgatgagctgcgttcaataaaccaaatgcagaggcattagtagcaggctatggctctgctagctgaggtttggaaatcacaggatgcaacgcctcaatttttgctgtggaacttgataatggggcattccgtaatgaatgccgtatgaggggacgtgagtatgagtaggcagagggcacatgtatctagagcttcagtcactgtaggtatcaggaagaaaggcacatttagaatacacctttacacacgtggatttttttttttcacccctcctgaactttttctttatttttattttttatttccacattttctttatccagtctaccattgataggcatttagctttattccatgtttttgcttttgtggatagtgctgcaatgaacatatacgtgtgtcattataatagaacaatgtatgttcctttgaatttatacccagtaataggattgcagggttgaatggtagttctgtttttagctctttgaggaactaccacactgctttccacaatggatgaactaatttacactcccaccagcagtgtataagcattcctttttctctacaacctcaccagcatcttttgactttttaataatggccattctgactggtgtaaggtatctcattgtggttttgatttgcctttctctaatgatcagtgatgttcagctttttttcatatgattgttggccacgtgtgtgttttcttttgcaaagtgtctgttcatgtcctttgcccactttttaatggggttgttattttcttctatatttctttaagttccttatagataatggatattagttgctagatggatagtttgcaaaacttttctgcaattctgtaggttgtctctctactctgttgatagtttcctttgctgtgcagaagctctgctgtgcagagtttagttggatctcatttgtccatttttgcttttgttgcaattgcttttggcatcttcatcatgaaatctttgcccattcctatatccagaattatattgcttaggttgtcttccagggtttttatagttttcgggtttacatttaagtattgaatgcatcttgagttgatatttgtatatggtgtgtaaggagggggtccagtttcaatcttctccctgtggctagccaattaccccagcactgtttattgagtagggagtccttttcccattacttgtttttgtcaactttgtcaaagatcagatggttgtaggtgtgtggccttatttctgagctgtctattcagttccattggtctgtgtgtctttttgtaccagtaccacactgttttggttactgtagctctgtagtatagtttgaagttgtatagcataatgcctccagctttgttcattttgcttacgattgccttggctattcaaccttttttttgttgttccatatgaattttaaaatagttttgtctagtttatgaagaatatcattagtagtttgataggaatagcattgaatgtataaattgctttgggcagtatgaccatttcaacaatattgattcttcctatccatgagcatggaatgtttttccatttgttttgacatctctaatttcttttagcagtcttttggagttctcattgtagagaccttttacctccctggttagctgtattcctaggtattttattctttattgtggcagttgtgaatgggattgcatgcctgatttgcctctttgcttgacttttgttggtgtataggaatgctactgatttttgtacattgattttgtaccctgagatattgctgaacttgtttatcagcttaagaagcattttgggccaagactagagttttctagatacagaatcatggcatctgcatactgtgatagtttgactttctctcttcctatttggataacctttatttatttctgtttcctgattgctctgcccaggacttctaatactatgttgaataggagtggtgatagagggcatccttgtcttgtgccagttttcaagatgaatacttccagcttttgcccattcagtataatgttggctgtgggtctcctcctggcggaattccagaggcccgaggcaagagccagttgcttcttgccacttcaactcactcattcccctggagttcttgtgggccaggaatgagtcctggtgtgcggtagccccattcagggttcccagcttcctcctccaaccaagcttctgtttcttccctccgcccactctcattgccttctctctgaagatctgttaggagtgtgccagtcatccttgtctttcggtggcagcttttccaccttgctgcatctagtcatccatcttgcccaaccccattattctttttttttttttttttttttttttgagacggagtctcgctctgtcgcccaggctggagtgcagtggcgcaatctcagctcactgcaagctccgcctcccgggttcaggccattctcctatcttagcctcctgagtagctgggactacaggtgcccgccaccacgcccagctaattttttgtatttttagtagagacggggtttcaccgtgttaaccaggatggtctcagtctcctgaccttgtgatcctcccgcctcggcctcccaaagtgctggggttacaggcgtgagccactgtgcccagcctccaaccccattattcttgataagttaggacttactcctgccattttgttatttgttttctggttgttttgtgatccctgtcttccttcttttcttcctatcatccttttagttaaagcaattttctgtggttgtatgttttaatttcttttattattatttttttgagacggagtttcactgtgttgcccaggctggagtgcagtggcatgatctcagcttactgcaatctctgccttcccgggtttgagcgattctcctgcctcagcctcctgagtagctggaattataagcacccgccaccatgcgcagctaattttcacatttttactagagacagggtttcaccatgttggccaggctggtctcgaactactgacctcaggtgatccatccaccttggcctcccaaagcgctgggatcacaggcctgagccaccgcgcccggcatgatttcttgcttatagttttttgtttatctgttgtatgtttgtttttttgaagttaccatgaggcttgcaaataatgtaatgcatcattttaagctgatgataacactgattgcataaacaagcaaacaaagtaacaaacaagcaaagagaaaactaatgttctattgccagtgagttttataccttcatgtaacttttcgttgtttgttaacatccttttctttcagattgagaaactccctttaatatttcttgtaggacaggtttgatattgaaattcctcagcttctgtttgtgtgggaaagtctttatttctccttcacatttgaagcatattttcaccagatatgatgttctagggtaaaagttttttgtttgtttgtttgtttgttccttcaccccttttaaatatctcatgtcactctctcctgggctgtaagttttctactgaaaagtctactgccagatgtattggagctcctttgtatgttatttgtttcctttctcttgctgcatttagtatactttctttatccttgacctttgagagtttgattattaaatggtaggaggtagtcttcattaggttaaatctgcttggtgttccataaccttctttttcttgaatattgatagttttctctaggcttggggaattctctgttgttgtccctttgaataaactttatacccctatctgtctctctgcctcctctttaaggccaataactcttagatttgcccatttgaggctattttctagatcttgtagatgtgcttcattgttttttgttcttttttcttttgtctcctctgatggtacattttcaaatagcctgtcttcaagcttactaattctttcttctccttgatcggttctgctattaagagactcttaatacattcttcagtatgtcaattgcattttttgactccagaatttctgcttgattcttttaaattatttcaatatctttgtgaaatttatctgatgtgattatcagtttcttctccatattatcttgaatttcattgaatttcctcaagacagctcttttgaattctctgtcacatatattcacatgtatctgtctctctaggattggtccctgaggccttatttagttcgtttggtgatgtcgtgtttcctggatggtcttgatggttgtggacattgattcgtgtctgggcattgaagagttaggtatttattataatctttgtagtctagccttgtttgtacccatccttcttgggaaggctttctaggtattcaaagggagttggatattgtgatctaatggtcactgcatctgtatctgcattagaaggcatcccaaaccgggtaatgctgtgactcttgtagtcttggagactcatagaggtaccgccttggtggtcttggataagatctggaagaattgtctggattaccaggcagagactcttgttctcttcccttactttctcccaaacagaatctctctctgtctgtgctaagctgtctggaaagctggtggagaggtgacacaagcacccctctggctcccttcacggggaccacactgggttagacctgaagcctgcatagcaatgggtctcacccaagatccacagtaactactggcctccgcctttgtttgctcaaggctctaaggctccacattcatcaggtggcaaagccagctcctcttgtgtccttcccttctgggctgcagatttcccccagccctaggccgatcccaagatgctatctaagatccagggcctggagtcagaatctttaggaatctgcctggagctctattctacttcggctgagctggcacccaagccataagacaaaatctttctacccttccctccgcttttcacaagcaaaggagtctctccctgtgaccactagcaccccaggcccacagcaggtattgcctggctactgctgatgttcactcagggcccaagggctcttcagtcagcttgtgttaaatgctaccaggactacgtctctcccttctgggcagtgggctcccctccagcccagggaaggtccacaaatgccatccaaaagccaaggcctggaattagggtccccgagggtctgcttggtaccctagcccactgtggctgagctggtacctaagctgtatgtcaaagttctctttactctttcgtcttcttttctcaagcaggagtctcttcccatagtgtccacagctgggaatgtgctatgtcacacctgaaggtagcatgtctctgagtctcactgaaggcccactgcaagtactgcctgggtaccactgctggttattcagggcccaagggctcttcagacaacagatgttgaatcctgtcaggattgagtcatttccttcaagagaatgagtttcctctggcccaggttatgtctggaaatgtcatccaggagctagggcctggaacaagggcctcaggactctgcctggtgccctgtcctactgtggctgacgtgatattcaagctgcaagacaaagtcttctttactcttccctctcctctcctcacctcaagcaaaaggaaagagtctctcctggagctgtgagctgtgctgcctggggtttgcgaaggtgtggcacaagcaatctcctggccaccctggctggtgtctcactaggtcatgtgccccccccccccgccccccgtccactggctttcagcccagcacagtacaggacttggactcttggtggcctagattgcctttcaggtttatttaggcccccagaactctttagtccacagtggcaaagcttgtcggaactcgggttctgcctgctgggataggtgatttccctctggctgtggctggtgtaaatgctccctctgtgggtgccagctgagttctgcctggtgtttcttttcactgtgacagggcagccctgagttccaatgcagagtcccataatcactgtactcttttcctgcaagcacatagattctctctccctgccacacggctgctgccaggggatgagtgaggggtggcattggcagttcaagactgtctttcctaccccctttagtgcctctttcagtgatatgaagttaaaatctggtacagtgattgctcacctgatttttggttctcatgaaggtgattttattgcagatagtttttcaatttgctgttccttcggggaggacgatcagtggaggcttctattcagccatcttgctctgcctccagtcacatttgccattgttaaacaacctcgaaatagtagtatacttatcagtgtgtttaatttgagaataaaaggtagagctatggatgatacatatcaaaggttcctactaagttatataattctttaaaagggtactgtattccaggatccttgatcatgtttcccaacacagtcgtttgccagccttctgccttatacttggaaatttctacgcttgacaccagggaatctatttctgtggcatatattttacttagaaagcactgcagggttatgtggttttacaatatattagtacatttgagatattcctggtcagaattattcctactgcaagtgcctttccctttggtgtttgtcactaaaatgtttgtctgtcatcatgtgaaatattcaaaagaatgacaaagaaaggagtcttaacaaaaagtgttgtaactaatacttgagactaatcacagtacagaacacattactatggcaactaagctaaatgctgcttgcaatataatagtcaagacattaagagaatttagccctaaatgatcttactaactggtttctacagtaatggtcctgtgaatgccatcacattagtaatggtgttaacaataatgtgttttccttttggtatggtacccccttaacaaattgattttaagtcaaaacttgatacctcttttgagacaggtcatgcacttgtaatgactcccattttttctctatagttaatcagctgtgttcagcgaatacttatgaacagaaggctccagcagcagtacaatcagcagcaacagcaacaaatgacttatcaacaagcaacactgggtcacctcatgatgccaaagcccccaaatttgatcatgaatccttctaactaccagcagattgatatgagaggaatgtatcagccagtggctggtggtatgcagccaccaccattacagcgtgcaccacccccaatgagaagcaaaaatccaggaccttcccaagggaaatcaatgtgattttgcactaaaagcttaatggattgttaaaatcatagaaagatcttttatttttttaggaatcaatgacttaacagaactcaactgtataaatagtttggtccccttaaatgccaatcttccatattagttttactttttttttttttaaatagggcataccatttcttcctgacatttgtcagtgatgttgcctagaatcttcttacacacgctgagtacagaagatatttcaaattgttttcagtgaaaacaagtccttccataatagtaacaactccacagatttcctctctaaatttttatgcctgcttttagcaaccataaaattgtcataaaattaataaatttaggaaagaataaagatttatatattcattctttacatataaaaacacacagctgagttcttagagttgattcctcaagttatgaaatacttttgtacttaatccatttcttgattaaagtgattgaaatggttttaatgttcttttgactgaagtctgaaactgggctcctgctttattgtctctgtgactgaaagttagaaactgagggttatctttgacacagaattgtgtgcaatattcttaaatactactgctctaaaagttggagaagtcttgcagttatcttagcattgtataaacagccttaagtatagcctaagaagagaattcctttttcttctttagtccttctgccattttttattttcagttatatgtgctgaaataattactggtaaaatttcagggttgtggattatcttccacacatgaattttctctctcctggcacgaatataaagcacatctcttaactgcatggtgccagtgctaatgcttcatcctgttgctggcagtgggatgtggacttagaaaatcaagttctagcattttagtaggttaacactgaagttgtggttgttaggttcacaccctgttttataaacaacatcaaaatggcagaaccattgctgactttaggttcacatgaggaatgtacttttaacaattcccagtactatcagtattgtgaaataattcctctgaaagataagaatcactggcttctatgcgcttcttttctctcatcatcatgttcttttaccccagtttccttacatttttttaaattgtttcagagtttgttttttttttagtttagattgtgaggcaattattaaatcaaaattaattcatccaatacccctttactagaagttttactagaaaatgtattacattttattttttcttaatccagttctgcaaaaatgacctataaatttattcatgtacaattttggttacttgaattgttaaagaaaacattgtttttgactatgggagtcaactcaacatggcagaaccatttttgagatgatgatacaacaggtagtgaaacagcttaagaattccaaaaaaaaaaaaaaaaaaaaaaaaaagaaaactgggtttgggctttgctttaggtatcactggattagaatgagtttaacattagctaaaactgctttgagttgtttggatgattaagagattgccatttttatcttggaagaactagtggtaaaacatccaagagcactaggattgtgatacagaatttgtgaggtttggtggatccacgcccctctcccccactttcccatgatgaaatatcactaataaatcctgtatatttagatattatgctagccatgtaatcagatttatttaattgggtggggcaggtgtgtatttactttagaaaaaatgaaaaagacaagatttatgagaaatatttgaaggcagtacactctggccaactgttaccagttggtatttctacaagttcagaatattttaaacctgatttactagacctgggaattttcaacatggtctaattatttactcaaagacatagatgtgaaaattttaggcaaccttctaaatctttttcaccatggatgaaactataacttaaagaataatacttagaagggttaattggaaatcagagtttgaaataaaacttggaccactttgtatacactcttctcacttgacattttagctatataatatgtactttgagtataacatcaagctttaacaaatatttaaagacaaaaaaatcacgtcagtaaaatactaaaaggctcatttttatatttgttttagatgttttaaatagttgcaatggattaaaaatgatgatttaaaatgttgcttgtaatacagttttgcctgctaaattctccacattttgtaacctgttttatttctttgggtgtaaagcgtttttgcttagtattgtgatattgtatatgttttgtcccagttgtatagtaatgtttcagtccatcatccagctttggctgctgaaatcatacagctgtgaagacttgcctttgtttctgttagactgcttttcagttctgtattgagtatcttaagtactgtagaaaagatgtcacttcttcctttaaggctgttttgtaatatatataaggactggaattgtgtttttaaagaaaagcattcaagtatgacaatatactatctgtgttttcaccattcaaagtgctgtttagtagttgaaacttaaactatttaatgtcatttaataaagtgaccaaaatgtgttgtgctctttattgtattttcacagctttgaaaatctgtgcacatactgtttcatagaaaatgtatagcttttgttgtcctatataatggtggttcttttgcacatttagttatttaatattgagaggtcacgaagtttggttattgaatctgttatatactaaattctgtaaagggagatctctcatctcaaaaagaatttacataccaggaagtccatgtgtgtttgtgttagttttggatgtctttgtgtaatccagccccatttcctgtttcccaacagctgtaacactcattttaagtcaagcagggctaccaacccacacttgatagaaaagctgcttaccattcagaagcttccttattacctggcctccaaatgagctgaatattttgtagccttcccttagctatgttcattttccctccattatcataaaatcagatcgatatttatgtgccccaaacaaaactttaagagcagttacattctgtcccagtagcccttgtttcctttgagagtagcatgttgtgaggctatagagacttattctaccagtaaaacaggtcaatccttttacatgtttattatactaaaaattatgttcagggtatttactactttatttcaccagactcagtctcaagtgacttggctatctccaaatcagatctacccttagagaataaacatttttctaccgttattttttttcaagtctataatctgagccagtcccaaaggagtgatcaagtttcagaaatgctttcatcttcacaacattttatatatactattatatggggtgaataaagttttaaatccgaaatata

SEQ ID NO: 15465 - DNA, 280504 bp, Homo sapiens
ctcggcccaacaaaatggcggcggcagcggtgtcgctttgtttccgcggctcctgcggcggtggcagtggtagcggcctttgagctgtggggaggttccagcagcagctacagtgacgactaagactccagtgcatttctatcgtaaccgggcgcgggggagcgcagatcggcgcccagcaatcacagaagccgacaaggcgttcaagcgaaaacatgaccgctgagcccatgaggtaaaacgcaaccccgtctcatgggccccagcggtctgggcccaggcaccgtctgagtcgggtgtttgggaaggcgttcgcttggtgggttaggcctgtgtgttgcttagccgaaagaggcatcgttttctctttaggtgagaagggtttcggggtatcggcgcaaggctccgacgggggtgggggtggggatggggtggggggaggtggggggggcgcggcctagggtatggggcgcttcttgcaatctcccctaaacggtgacgcttggtcgggctcctctgtttattctttggtgcctgtgggattgagacctcgaagtcggaggcggtctttggtatcccggtcatttttgctaatctttgggcctagaaactgcgtggggaagaagcggggggagggtgagaagagggggaggggtgggcgggcgcgaggatgtgagatcccaggacgacttagaggcgtttaggttgctggagatgggaagcacccgggccctgcgggattttttttctgcagccccaggagacaagcctttttttgattgggttgtggtgcagttccaggtatttaggtatcttttctactccatatcctgaaggatatccttgggtttatttctaggcgaggggggacttaacacagggttttgcttccagaggaccctagtatactactttttgtgatgtccagccttaatgggacctcaagtgtttccccactttctgggcaaatttcgaggagtaattaggccctatctttatttacttatttattccatgaaggatgaagggcaggttaacgtgggctgatgcgaagtaagatttattgcaagggaaaatgcctggcaggcctcctcttaaccaatcaagcacgtttattaggttgaagctgtttttctgtgtgcttctgatttgcctcttgacgggtctgaaaatttgggtagtcaatatgaaatgtatacacttttacccaggtggctggctggcgtttcagtttgacatttgaattttcatcccacaatgtgaattaagtaatttttttactcggagatgcatccttggcgtccagtggcaaaataaaattacaaggagcatgggtcagaattgcatttcaagttggcgaaatgtgcctttgagtaactcttagattggcatatgtttttagagcaatttagctagaatgtagaattgggcaatgagcctatgatacgtatgtctgtatttctgcatgaacaagcagtagattatattttctttaccttggggaaagatatgcttcagttcttagattgtagatctctagttgtgtacacgattgtggccttggtttctgaatttgtcagtaggctcaaatacaacaaatctttatctgtggggtattaggcacgtaagtggtacccagtataacttgttggcctgtaattaccaggcactcatgttcatatgcatggatggtgtaccttacagttaaattatgacctctagattttactaagtttcacaaagtctacatttgaaactatagtttgaagtcggatcttctcagtttctttagaatgaacaaattacgtatatagaatttctgaatagaataattaattttacacaagggtcagtttttcttactagtcttggatttttgtagatcttgatgataagagtaataatcataactaagttgagtgcttattgtcgttctttataatcttgatgaattctcaaacctgtgaggtaagtacttggttttgcccattttaccgatgaggaggaaagtgagacatagatcaagaacttgaccgaagttatacagcttgtaattggtggagctggaattgaaccccatcttgacttcacagcttatgttcttaaccacaaggcattaatgcccccttcagctgccaggtctaacctgattatgaccatttaaatttagcccaagtgttacaatgaaagaagttcatattacctactctgatttgttgcaggtctatgattttgtagctgtttataatgttacattttttgtgtccaggtgtactatgtagtgagataactgaaatatttaatgctaggagagtcttaagctacatgaaaaacctctagtaaagaactgcatatatgcatgtagggaattaattaaaaagtgtgacactccctgatgatttactatgaaagagctccaagtaggtgttcagaactgtctcaggctgaagtgtcatcgatctcctaaaccataatcatggttaaaggagaatctgacaggtaatgcttgagttgaacccacagtaccaaatccctcttgagtcttttctaatgtgaggcagaaataatataagcattattgttaatattattttacacagtagttccagattttctctttatcaaatattttgtcaagcacttaaaaagcaggaacaaagactagttctaatttttacttgtgtttataaaaaaaagtaatattctaggattctgtggtggaaaaatggccagaagacaagaggaaggaaaataaaccgatgacctggctaaaacatacactgactaatcagtggctcagtctttaaaggttttgttgtttttaaaggatttttttggttgtttgtgttgtttgaaataagattgacttgcttctggcattataaaagataaggtcttttataatcaccaagctctcaatgtagtacttgggtacctgggtgtcactgctgattattttttaatttttaaatttatttttttgagacagagtctcactttgttgcccaggctggagtgaaggggcgtgatcttggcttactgccgcctccgcctcccaggttcaagtgattctcatgcctcagcctcccaagtaactgggattaacaggtgtgtgccaccacgcctggctaatttttgtatttttagtagagagggagtttcaccatattggctaggctggtcctgaactcctggactcaagtgatctacctgccttggcctcccaaagtgctgggattacaggtgtgatccaccgcgcctggctctctgctggttattcagggcccaagggctcttcagttatcaggtgatgtatgctgctaggactgggaccttcccttcagggcagcagattcccttctggcccaggatgtgtctagaattgtcatcctggagctagggcctggaatggaggcttcatgactgatgaactttaatttgttttctttatttttattttttttgagatggagtctcactctgttgcccaggctggagtgcaatggcaccatcttggctcactacaacctttgcctcctgggttcaagcgattctcctgcctcagcctcccaagtagctgggattacaggcaagtgccaccacacctggccaatttttgtatttttagtagagacggggtttcaccatgttggccagccaggctggtctcaaactcctgacctcaggtgatctgcccgcctctgcctcccaaagtgctgggattacaggtgtgagccactgcgcttggccttaatttatttgcatataaagatttcagtattgggagatttggtgaaatttgtcattctaatccttatggcaattgattacttgaaaagctgacagctatattaccttgttattgatcttaaatataaaaaggcagaagttgtctaaattgagagattttgaatgtcttagaaagtatctgttaaggtggtagtttacaagcagttacattgtaacctaattgttgaaaaatgttatctgtgaaatacttgcatttccactatgaaaagcatgaaaccaggcccttggagggggaggagatgcaaattttataaaggtttttaaaaagcatttaaatatcaatggcttggttatgtaatgggttggggtgaaaagaaagacatttgtgaccttaatttttatcaggcccagttttattattggccacccttggcatagttggccttgagctttcagttatgtattgtatttctagagataagataaatgtagtacttaaaataatatttaagtattgatgtaggtgtgtgaaataattgtttcataagtaattgtatgtgtctttttcacttttggggtctgaataaacttatgggttgggtaataggatacgggcaattcttgaatttacatgaagtgctttcccccagaccgtgaatgttcttttggatatcagaaactatttaaatagttgaagccagtgaaaactgatgcatagatcttcctttagaaatgttgaatataacagggcagtgaaaggagggtctaagcagtctgtctctaattttatcctaatgcttgtcttatgatcagcttggaagctgacatgcaagatgtttaacttctatttttccatctgtaaaatgggaataagctcaaatgggagtaaatatcaatatttatcaataatagatattgataaagtctaaaggtattctgaaggaggtaacatgtttgtaacaatggttcttaaaagagaaactaaagctctggggtcctagttttttttttttttttttttttttgagacagagtctcactatgttgcccaggctggagtacagtggcacgatctcaggtcactgcaaactccgccctccgggttcacgccattctcctgcctcagcctcccgagtagccgggactacaggcacctgccaccatgtgcggctaattgtttgtatttttagtacagacagggtttcaccgtgttggccaggatggtctcgatctcctgacctcgtgatttccacccgcttcggcctccaaagtgctaggattacaggtgtgagccaccgcgcccggctgttaatttttaagagtgaaaagaggtgctgcgactaaatggtttgagaactgcttgtatagaggaatgaacactgaactgtgagccaagccttggtttttcagttatagctctgttgcttgattgtatgactgtggacaaatcatttatctgttccaggcttctgctttgtcatttgcagaacgaacaagactagatggtctgtagcattaatttttttttgggacaaggtctcactgtcacccaagctgtagtgcagtgacactgaacatggctcactgtagccttgacctcctggctcaagcaatcctcctgcttcagcctcccatgtagctgggaccacaggtgtgtcatcatgccccgctaattttttgatttttttgtagaaacagtggtctcactttgttgcccagtctggtcttgaactcctggacttaagcgatcctcctgccttggcctcccaaagtgctgggattacaggtgtaaaccaccataccctgcctaaagttagtttttaaaaaattctgcttacaggccacgtgcagtggctcacgcctgtaatcccagcactttgggaggccgaggcaggtggatcatgaggtcaggagttcaagaccagcctggccaagatggtgaaaccccatctctactaaaaatacaaaaaaaaatcatctcggtgtggtggtgggcacctgtaatctcagctactagggaggctgagacagagaattgcttgaacccaggaggcggaggttgcagtgagctgagattgcgccactgcagcctgggcgacagggtgagagtctgtctcaaaaacaaaaacaaaaacaaataagcaaaaaattctgcttatatgagtgtttatcattttctcttatctgccttttgtgggttagggagaagggtagtggtgagataaagtttctttattcagtgtatttatatctttttgccttaaaacttacatggttaggttacaggtgttttgttgctgatacttgtcatagtatcatgtatacctggttgtataaacatttattggaaaggaaaaaacatttttgttggaaagtttggtaattattgtggcttaggatatgttctattttgaaagattgctatatccagtatatttctgcccttttatgattgaagatgtacgtctgaaaatacctatgttagttctagccggttgttctttttgcgctgggaagtctttgaattttgcactgtagctgctattttcagatcctgtctctgaaactttgtctctcagttttagcttgaagtagccatttcctgtatctgtagtccagcactcttgttaactgtcccatacaatatttgttaagaaattattgttctggcagtagtattcacatgtatatatcctgcactccatattttgggggaatgctttattagttgatcaaatacttaagtatcaatttggggccaggcatggcactgtgttagggttatgccaaaggtaataaaattcctgccatcttaaggcattcttagtcaagtgagggagattggtaagtaaatgagcaattagaaagcagtgctaaaatatggaaatatattgattgcgctagggatcagaaatgaaagaaagcctaatttgggggatgtctaggaaagttttgcaaaggagatgttaactgtattgagtcttgaatgagttagcagttaagggttgactgtgagagggcagtccagacagctattagtatggttaaagattagtcttattttccatatatcagaggaaataagacatgtacacgattagttttggtgcaagatataaagtgataaatgctgcatgaagtaaaagtaagttgttgtgtgagttcaaagtagaaagacatttctggtggggaccaaggaaagctttatagagagatagcatttgagccgggcgccgtggctcacacctgtaatcctagcactttgggaggctgaggcgggtggatcacgaggtcaggagatcgagaccatcctggctaacatggtgaaaacccgtctctactaaaaatacaaaaaaaaaaaaaaaaaaaaaaaaatccgggcatggtggcgggcgcctgtagtgccagctgctcgggaagttgaggcaggagaacttcgtgaacctgggaggcggagcttgcagtgggccgagatcgcgccactgcactctagtctgggcaacagagcgagactccgtttcaaaaaaaagaaaaaagagagatagcatttgaatctagtccttggaatataggtacagttttgacaaaggagactgtgggagaattccagatgtgaggagtagcagcttgagcaaaggaatgttgtgtatattagcattttctatttggaagaaggtcaacatcgaattttaaacttaatttctggacaaatactgtataactattgtgcctttttttttttttttgagacgtagtctcgctctgtcacccaggctggagtgcagtggcatgatcttggctcactgcaacctccgcttcccgggttcaagcgattctcctgcctcagcttcccgagtagcttggactacaggcgtgtgccaccatgcctagctaatttttgtatttttagtagagatgggatttcaccgtgttggccaggatggtcttgatctcctgacctcatgatccgcccgccttggcctcccaaagtgctgggattacaggcgtgagccaccgcgccctgcctattgtgcttttttttttttttttaagagacagggacttcctctgtcacccagcctggagtgcagtggggtgatcatagctcatagcttactgcatcctagaactcccgggctcaagtgatcctcccacctgagcctcctgagtagctgggaccacaggcatgtgccactatgcccagctactattgtgcattttgtatggtagcttttgtggcttgatgatcttgtaaaaggtacatgtgcctttgtgaatgggcctgataattttagttcagaattgtcaaaagtattatctacttttttttttttttttgagacagagtctcactctgtcacccgggctcagtggcaccatctcagcttactgcaacctccacctcctgggttcaagcgattcttctgcctcagcctccgagtagctgggactacaggtgtgagccaccatgcctggctagtttttgtatttttagtagagacggggtgtcaccatattggccaggctggtctcgaactcctagacctcgtgatctgcccacctcggcctcccaaagtgctgggattacaggcatgagccaccgcgcctggccagtattacctacttttaaataagattgtgtaggatttaatgcacagattttgaatcactgtgataaaaatgcatccttagttgtcttcattttgctcatttgaagtgctcagttgacttttgggtgggtaacatttgacttatagaatctaagataaaaaattatttctgagtaatactggatttgttattttgcttatttggattatattagttattttttggtttatttgatagcattccagatttagttttgctataatgcttgttttgaaaatgtggattttttccaaaagggttgatatttcagggaacaatttgaagcatacgacaaaatttgcatttgcttatgggggattttgtctgcagggtcagggatcagcatactgtggcctaccaaccagtggcctgttttttgtaaataaagttctttttttttgtttttgatctttgttttgttttgttttgttttgttgagacggagtcttgctctgtcgcccaggctggagtgcggtggtgtgatgtccgctcactgcaacctccgcctcttgggttcaagcgattctcatgcctcagcctcacgagtaggtgggatttcaggcatttgccaccacgcctggctgatttttgtattttttttttttttttttttttttttttttttagtagagacagggttttaccacattggcctggctggtcttgaactcctgacctcaggtgatccgcctgccttggcctcccaaagtgcagggattatagatgtgagccatgtaaataaagttctattggaatacacctatgtccatttatttacattgtctgtggctgcttttgcactgtagttgcagagttgaatagctgcagcagagacctagtagcccacaaagcctaaaatgtttactgtctggccctgtattgaaagagtttgctgattattgtgctagatgaatgcaggatactacacccctctaaaaagagctgcatagaaatacatgcatatagatgcacacacgtctgacatctaccagctacctcatttcaccacttgggttataaaccacacatatttacatctgttgtacaattttcaatccgatttcagataaccttccttctaccacttcacaataattcatgagctgcaacccttttgatgcccacttcacaagcaaacttcaggtctttttcaaagtaaagtgccacatttattgttatatttgagcatttattatttaacatgtcaaactgtgctaccatttttctttggtttctttgttttaaaaaaagtcactgatgaaatttttgaatgttgtgcttctaacctcatttttcctatgagttctatggtgttaattgcacaattttacatagtttggtggtttttaggaacccatatgttacattattgaggaactgactaattatcatcctgtaaaaagtactaattcattcaccaaacatttctggggtgatgtaaatattaagtgagttaaatgggcataaagcacttatgtctttattgttactcaaatattagttattactgattactattaccatgtgtcaggaactgtaataagtagtgcattgatgaacaagacagataagggacctgtctccatgaagcttacattgtatttttaaaaatctattaatatacattttggctagtaaccgagcccttgccccacagaaaagttgtgctgttacacaaaataatattttaagatccatccacaagtcaaagacatttcacttaaaacagctttctcagcagtgtctccttgatagggtataatattttattgaattattgtttttggctgggtgcagtggctcatgcctgtaatcccaccactttgggtggccaaggcaggtggttctcctgaggtcaggagttcaagaccagcctggccaacatggtgaaaccccgtctctactaaaaatacaaaaattagccgggcgtggtggcgcatgcctgtaatcccagctactcaggaggctgaggcaaaattgcttgaagccgggaggcagaggttggagtgagccgagatatcaccaccgcactccggcctgggcgacagaatgagattccgtttcaaaaataaataaataaataaataaataaataaataaagaattattgtttttaatttttgtttttttctgagataggctgttactctgtcactcaggctggagtgcattggtgcagtcatggctcactgcagcctccgcctccctggttgcaggtgatactcccacctcagcctcccgaatatctgggactataggtgcatgccaccatgctgagttaatttttgtatttttttgtggagatgagtttttgccatgttgcccaggctggtatcgaactcctggactcaagctatctgccctctttggcctcccaaagtgctgggattataggcatgagccaccaaacctggccatgtgattgtttttttgtaactgtaacctcaggagatgaatccgatctatctttagggagataaagagtaatcatcccttcctttttttactgtataaaaggttacaaaatataatttcagacttgtagaaaatttgtaaaaatagcacaaagattctcagatgtgcttcatccagatgcagcaaggggtaacattttaccatgtttactttatcatcctctattattatttttctgaattgtttcagagtaaattgcagacatgatgtccctttactcccaaatactttaatacatatttctcgaaactaggaatagtctgttacatgatcccagtatagttagcaaaattaaaaattagcattaaggctgagtgcggcctcccacacctgttatcccagcactttgggaggctgaggtgggaggattgtttgaggccaggaattcaagaccagtcttctcaacatagaccctgtctctacaaaacaaacaaacaaacaaacaaacaaacaaacaaaagtactaaattagccggtgtggagcatgcctggagtcccagctactcagaaagctagagtcaggaggatcacttgagcctagaagttccaggctgccatgaactatgatcatgccactgcagtctagtgtgaatgacagagtgagacccccatctcttaaaataaaagagagattagcattgatacaataccatttttttttttttgagacagagtctcacactgtcgcccaggctggagtgcggtggcgcgatcttggctcactgcaagctccgcctgctgggttcacgccattctcctgcctcagcctcccgagtagctgggtctacaggttcccgccatcacgcccagctaattttttgtatttttagtcgagacgggttttcaccgtgttagccaggatggtctcgatctcctgacctcatgatccgcctgcctcggcctcccaaagtgctgggattacaggcgtgagccactgcacccggccgatacaataccatttttaatctacagaccttattcacattttaccaattgcttcatgacatccttcatgatgaaagacaaaaagttcttgttttctgatctaccatctaattctagaacactcattatatttcattgtcatctggaacagctcaccttgccatttttttttttttgagacagttttgctcttgttgcccaggctggagtgcaatggcatagtcttggctcactgcaacctccatctcccaggttcaagtgattctcctacctcagccacccgagtaactgggactacagacatgccccaccacgcacggctaattttgtatttttagtagagatggggttgcaccatattggtcaggctggtcttgaactcctgacctcaggtggtctgcccgcctcggactcccaaagtgctgggattacagatgtgagccactgcgcccggcctcttctccatttttaaaagaacacaggccagttgatttgaatttgtctgatgtttccctttgattatatattttggtaggaacactatgaagtgatgttttgtccttcacagcacattttatcaggaggtgtataatgcctttgcttttactatgttttagaatgattttgctttgtttttttttttctgagacagagtcttgctctgtcgcccaggctggtgtgcagacgtgcgatctcggctcactgcagcctccgcctcctgggtccaggcgattctcctgcctcagcctcctgagtagctgggactacaggcgtgcaccaccatgcccagctaatttttatatttttagtagagacggggtttcactgtgttgatcaggatggtctcgatatcctgacttcgtgatccgcccgccttggcctttcaaagtgctgggattacaggcgtgagccatcgtgcctggccgattttgcttctcatgctaaaattattaatcagctcattctctgccattttatttagaggtttgaagtttggcttgattaatttctacagaattggggagagttttcccacctcccatttttcttgctttttccatttcctccttcctcagatacccccaaagttcaaaaccaaccaccccgattatgaattttcattttgtattctgaacatatagctaaaagcagagaattaagggtgaatgtttcatgttaaagtgattggacctgttgttaagcatatgaaataatatatttccttcaaaggctgactatactatagtgcatccaacatagcttgttgaatatctcagttcttttttttttttttttttttttttagctgaaatttgccacagggaaatatctctccagcctgggcaacatagtgagactctgtctcaaaaaaaaaaaaaaaattagccaggtgtggtggtgcacaactgtagtcctaaatacttgggaggctgaggagggaggatcctttgagcacaggagtctgaggctgcagtgagctatgattataccactgtactctagcctgggagacagagcaagaccccgtctctcaaaaaaaaaaaaaaattggtggtgaaatacacataccacaagatttagcattttaaccattaaaaaagtttgtttttggctgggtgtggtgactcacgcctttgggagtgatcccagcactttgggaggccgaggcggatggatcacgaggtcaagagatggagaccatcctgtccaaaatggtgaaaccctgtctctactaaaaatacaaaaaaaaaaactagctgggcatggtggtgtatgcctgaagtcccagctactcgggaggctgaggcaggagaattgcttgaacccagggggcagaggttgcagtgagccgagatggcgccactgcccgccagcctggagacagaacgagactctgtctcaaaaaaaagcttttttttttttttttttgagagaagggatctcgctatgtttcccaggctggtctcaaacttctggcctcaagcaatccttctgcttcggcctcccaaagtactgggattacaagagtgagccactgtacctggcctcatttttctattttgataaacacttttttttttttttttgagacggattcttgctgtgttgcccaggctggagtgcagtggcatgatcttggctcactgcacctctgcctcccgggttctctgcctcccgggttcaagcaattctgcctcagcctcctgagtagccgggactacaggcgtatgccaccgtgcccagctaattttttttgtagttttagtagagacgggttttccccatgttggtcaggatggtctcgaactcctgacctcaggtgatccgcccgcctcggcctcccacagtgctgggattacaggcgtgagccaccatgcctggctgataaacacttttaaggcttaacatgagctaagtattattttagaacagattgtctcaaccttggcactatagacattttgtccagaaaattttttgttagaggctgtcctgtgaatgcattttatccctgacctctacccactagataccagtaacacccctaccctgagttgtgacaagcaaaaatatttccagaaattgccagatgttccctgtgggcggtatgggtttgagaaccacttttctagataataggcatttgtagataatgaatactgagctaagtggaggagtaaatggttgaaatagactatgtggttaagtacagttacagagatataaaccaagagatgtggaagaatagcaaaaaatttccttagagagttgatagcaagtattttcccaagagagacagcaattctgagttgggtcattggggatggtggggggaaatgtgctgaggagggggaaatattctaggtggtggaacgggttatgtctagagatacggtagaggagcccttgggtgccttgagaaaaatgagataataagtatgattggagagaatatgggaggtagaattggaaagaaggatgctagttggggtcaggtttgagaaaggcttttttttttttttgagacggagtcttgccctgtcacccaggctggagtgcagtgcctcactcggctcactgcaacctccgccttctgggtttaagtgattcttctgcctcagcctcttgagtagctggcattacaggtgcgtgccaccacttccggctaattttgtatttttagtagagaccgggtttcaccatgttggccagactagtctcagaactcctgaccttgtgatccgccagcctcggcctcccaaagtgctgggattacaggcatgaaccaccacgcccggccgagaaaggctttttatgctatgctaaaatgtttcattttccccctttcattatagaaaatcaacaaatacttttaaagtctgtagagttatatgatcagctttttaaaagaatagtgatacagtgaaatggtaaaaatggtcaatggtgaatattaaactcaagaagataactctagcctgtaaagtaggaaaataggaagggatggagatttatataaaactaaaactagatgtcatatgttgcccttaaatcacatcaccctgtgtgtagacttcttcatcctcatttgtcaaaattctgacatattgtcaatactgatgaagattcttgatattcaaagcaggagtgaagtgggcaaaaatctgtattctaattttcattaccctaataatgtccttttaatttggagcagttctgtggcctctctttgtctgtcctgatcttgacatttttgaagagtatagaacaattattttttagaatgtatctctatttgggtttgtgtgatgcttctttatgattagatgaagggtatgcatttttggaagaaataacagaagtgatggtatgttgttttcagtgcctctgtaacaggagatgcatgacattggttggtcccattactgatgatggtaattttaatcacttgggtggtttccagtagatttttctatgtaaagtttatcatttttggccgggcatggtggctcacgcctgtaatgccagcactttgggaggctgaggcaagcagattacttgaggtcaggagtttgagaccagtctgaccaatgtggtgaaaccccatctctaaaaaaatacataaattagccaggcatggtggcatgcgtctgtaatcccagctgctcaggaggctgaggcaggagaatcacttgaaccctggaggtggaggttgcagtgagccgagattgtgccactgcacttcagcctgggtgacagagtgagactccgtgtcaaaaaaaaaaaaaagtttatcatttcccatttttattttgaaacagtcttgctctgttgcctaggctggagtgcattggcacaatctcagctcactgcagcctcaacctcctgggctcaagtgatcctcccacctcagtctcctcagtagcgtgttccaccacacccggctgctttttgtattttttggtagaggtggagtttcaccatgttgctcaggctggtctggaacccctgagctcaagggcactgatcacctcagcctcccaaagtgttgggattacaggtgtgagccaccacgcctggccctgaaaaatatttttaacggttacattatcatggagaattggatggtataaaacaatagcagttctcatatttgaaaataaattgatgtaatgaaacaaatgagaggatcaaataatattgtaaaaagaataaaaacccacatatggacaggtctgtggaaattgtattaaagcctacctctcccagattgtttccgtttgttgcaatccatttaagaacagtttttgggctgggcacggtggctcacgcctgtcatcccagcactttgggaggcccaggcaggtgtatcatgaggtcagatttcaagaccagcctggccaacatggtgaaaccctgtctctactaaaaatataaaaattagctgggcatggtggcatgcacttgtaatcccaggtactcgggaggctgaggcaggagaattgcttgaaccaggactcgggaggtggaggttgcagtgagccaagatagcaccactgcactccagcctggcctgggctacagggtgagactcagtctcaaaaaaaaaaaaaacaaacaaaaaacagtttgtgggaaaaaacaatccttgtgtatgacataatttgctgcttttcccatttagaaaatttaaaaaatacttatttgagatggggtctcactatgttgtccaggctagggtgcagtggctattcacaggtgtgaacatagtacactacagcctcgtactcctggccttagcatcttgagtagctgggactgcaggtgcacatcacagtgcctcgcttactttttccatttttgtctgttgatcctctctctcttcctttggggtaaaaattgtggcttgtgatggtggtttgtggggaaagaaaaagttggtaagctacaagctctgagcctttaatgtgtttttgttaaccatgcagacagacattagatacatagatacaacatagatgagttaaatttgaaagaaggcaccaaactttgttactttaaagcaggatttctcaaagggacactgttgacattgatttcagaagtgagattttcatggtttttaatgttattattataatggtatggatagtgttttgccctctaagaagtagctaggagtgtttccatagatgcatttagtttatatcacttatgtattctgtctctattttgtaagaaaattgcctatgaacagaattttttctgtatgtggatttaatgtcttcttctaaaggaaacatgggtgtggttcacatttccttagttttgagtagcatggcttaagttgtgatccaattttaaaaaatcagttgaataaataaatagaaaataaaaggataatttctgtactaaaaaagtcagctggacagttaaaacatctccttttattcgtaagtttttcaataaaaattgttaaaagcagtattcatttgtgtaatgatataatctttgttattgttttatgtgcttttctaaaatgcaggaaacataaggtaaggagaagtctttccttaccctgggaccagatgtctatgaggactgttgacttttctgctataaacaggatgataaattaacagtggtgtgataggtaaagtagatttgttatgacatatcttccattaagcgataataacttgatttttacttagttgatgaaataaaataactttgaaaccttgggtaacatgaaattgaatcaaaatattttcaagttatggaacatagtgttattaatagaatggagtgttgaaaaagcactggattatgctttctgtaacttttagttctgggtcttatgataactgtgaccctgagcctcagtgttttccttttaatctgtagtgatattttttagttcagtctctcattttaaactgcttttagctctaaaattttatctcagtgacctgttgagttatataacaatcgtatcaggtaacctagataagaagaggaaggcagtaacatttcagaaatacagtttggggttgggaatccttaagtgatccagacttctcctttggtccgaagatagtgtgaataaaacagctgagggatgtgggcatcaatatattgcagaggaaaaggttatttccaggagtggatttgcagctactcttaaatctattatgttggggctgggcactggggctcatggctgtaatcccagcactttgggaggctgaggcgggcggatcacctgaggtcaggagttcaagaccagcctggccaacgtggtgaaaccctgtctctacaaaaatacaaaattttgccgagcatgatggcgggtgcctataattccagctacttgggaggctgaggtgagagaattgcttgaacccaggagtcggaggttgcagtgagctgagattgtgccattgcactcctgcctgggtgacagagcgagactctgtctcaaaaagaaaaaaaaaatctattatgttggatagatggtcttttccagaagcaaattttatagatggaaagcattttaattaatctagtaaaattctctcattttacaaatgaggctccctctacctctctccccctctccccctctccctctctccctctctccctctctccctctccccacggtctccctctccctctctttccacggtctccctctgatgccgagccgaagctggactgtactgctgccatctcggctcactgcaacctccctgcctgattctcctgcctcagcctgccgagtgcctgcgattgcaggcgcgcgccaccacacctgactggttttcgtatttttttggtggagatggggtttcgctgtgttggccgggctggtctccagctcctaaccgcgagtgatccgccagcctcggcctcccgaggtgccgggattgcagacggagtctcgttcactcagtgctcaatggtgcccaggctggagtgcagtggcgtgatctcggctcgctacaacctcacctcccagccacctgccttggcctcccaaagtgccgagattgcagcctctgcccggccgccaccccgtctgggaagtgaggagcgtctctgcctggccgcccatcgtctgggatgtgaggagcccctctgcctggctgcccagtctggaaagtgaggagcgtctctgcccggccgccatcccatctaggaagtgaggagcgccttttcccggccgccatcccatctaggaagtgaggagcgtctctgcccggccgctcatcgtctgagatgtggggagcgcctctgccccgccgccccgtctgggatgtgaggagcgcctctgcccggctgcgaccccgtctgggaggtgaggagcgtctctgcctggccgccccgtctgagaagtgaggagaccctctgcgtggcaaccgcctcgtctgagaattgaggagcccctccgcctggcagccgccccgtctgagaagtgaggagcccctctgccccgctgccaccccgtctgggaagtgaggagcgtctccgcccggcagccaccccgtccaggagggaggtgggggggtcagccccccgcccggccagccgccccgtcggggaggtgaggggcgcctctgcccggccgcccctgctgggaagtgaggagcccctctgcccggccaccaccccgtctgggaggtgtgcccagcggctcattgagaacgggccatgatgacagtggcggttttgtggaatagaaaggggggaaaggtggggaaaagattgagaaatcggatggttgccgtgtctgtgtagaaagaggtagacatgggagacttcattttgttctgtactaagaaaaattcttctgccttgggatcctgttgatctgtgaccttacccccaaccctgtgctctctgaaacatgtgctgtgtccactcagggttaaatggattaagggcggtgcaagatgtgctttgttaaacagatgcttgaaggcagcatgctcgttaagaatcatcaccactccctaatctcaagtacccagggacacaaacactgtggaaggccgcagggtcctctgcctaggaaaaccagagacctttgttcacttgtttatctgctgaccttccctccactattgtcctatgaccctgccaaatccccctctgcgagaaacacccaagaatgatcaataaaaaaaataaaaataaaaataaaaaaaattaaaaaaaaatgagaaaattgagctctcctgaggttgcagtttgcttaacagcatagatctaattagtaattaggactagaaccaaggttatctgactcccagttcaaggttcttggtacagtaccgtgtttttaactagtccattaggttgttttctgtgtattttataacacttctgtaagaaagtggaatatttttctctaaggtatgttaaaactcttgttcgagaaaatacagtaaaggatacctgttgtatcttaaagtgatttttatgtttttctgtcaatgccacaatctgaagaaagtaaattagctacacttctattgctgtgacaatagattatttagaatcttcttgattacttgtattattgttcccgtgcttcagagctgtttccttgctatttaaaatcattatggtatagcccagaggctaagggggttttctaagagtatgcaatttgtcattgacatagtttttttgtttgtttttgtttgttttgtttgtttttgagacagagtttttgctctgttgcccaggctggagtgcaatggtgtgatctcggctcactgcaacctccacctcctgggttaaagcaattctcctgcctcagcctcccgagtagctgggattacaggcacccaccaccacacctgactaatttttgtagaggcagggtttcaccatgtcggcgaggctggtcttgaactcttgacctcatgtgatccacctgcctcggcctgtgaggattacaggcatgagccaccgcaccctgccaacacagttgtttttgattggaaaagtttattttcctaatctcaaagtagcttgtatctgttctttattgtgaaatgcagtttctacattgaatttgtgtagtctgtagttttgactgttttaagttcaataactagcttagtagtatacttgttagaggtcagagtaggttaactactagaaagaacagtccttctgcttactgtactaggaggaagtctgtggtggagggaaaaaaggagtaaaacaattccagtcttctgtaaaatttgagtaatttctttctctactccttctacatgaaaaatacatcttatttgatttttgcatcacatgccttctatatgtgttggaatctggatcaccatttcttcattacttgtgggtttttgttgtgaaaaatgtggagtaagttagaagttgactgtagaataggtaacattctcttaaattctttgatcagagtgagcagagtccagaagcttggctcagacttagggaactcatgacacttctcttaatatcctaagttcatgacatgtctcttaataccctaagtgtacaatacaatagtagatcaaggaaggcagaggtatctggcagacttagaagtaactgttcataaaaacaaggatcagtatgtttctacaagataatgatttaaagttgagccaggattagttatacctttaatataaaaaattgaaatagcttatttaatctgttctaggctatagtatacggagctaggtattaaaacattctctatatatttaactcttttttttgagacagggtctcactctgtctcccaggctagagtacagtggcatgatcttggatcactgcagcctagacctcctgggcacaagtgattctcccaccttagcctccacagtagctgggactacaggcctttgccaccacacctggctcatttttgtattttttgttgagacggggtttcaccttgttgcccaggctggtcttaaacccctaagctcaagtgatccgcttgcctcagcctcccaaagtgctgggattacaggtgtgcaccactgcgcccaggctatttgacttttttattctgtaaaattgcaagcatattcagaaataagaaaatagtataacggggccgggtgtggtggctcacgcctgtaatcccagcactttgggaggctgaggcaggtagatcacgaggtcaggagttcgagaccagcctggccaacatggtgaaaccccgtctctactaaaaatacaaaaattagccaggcgtggtggtgggcgcctgtaatcctagctactcgggaggccgaggcaggagaatttcttgaaccagggaggcggaggttgcagtgagccgagatcgtgccactgcactccagcctgggtgacagagcaagactcattttttttttttttttttttaaaaaaaagaaaaaagaaaatagtataatgggttgggcccggtggctcacgcctgtaatccagcactttgggaggccaaggtgggcggatcacctgaggtcaggagttcaagaccagcctggccaacatggtgaactcttgtttctactaaaaacacaaaaattagctgggcatggtggcaggcacctgtaatcccagctacttgggaggctgagttaggagactcacttgaacctgggaggtggaggtttcagtgagccaagattgtgccattgcagtccagcctgggcaacaagagcgagactccatcccaaaaaaaacaaaaaacaaaagacaactatatatatatatataaaataacgaaaccccctaagtacctgtcacccagcttcaacaattatcatcttgcagttagttgaatttggttaacacttacccttcagtggattattctagactaaatttccaaacataatcatattgtattgaagtgttttttgaacaaactatactatggggtatttacctaaaatgaactatttgcaaaaagataagttgattttttttcttctggtgccagtacacatcataattgtagttaaaagctattatcctcacattaaagtttaatttttaacacattatgaaaatttaaaacttacagcaaagctttaaaaattttacactgaacaccaatattattaacatctagattctacctttaacattttactcttcttttttttttactcttcttgttttatcacatattgatccatctgtccaactctccattgatgtaacatttcattttattttcttattcatttcaaagtaaattacagatattagtatagttgaggttcagtttttaaagtcatattttcaactaattgtttttcctgttttgaaagactgttatatctgaagttccacattatgacaactcatagtctctatggttccagtgcttcccattttgaacttttctttcatgttctacgaacctttattaaaatatttagagctatgtacaagtaatatatacagtatttagctaaaactaagtagaatgaatgagggttttgcttgtgtgtttattgcagtctttaaaaaaaatctcttctagtgagtcaatgtgtatcttttttttttttttttttttttttgagacagagtcttgctctgtcgcccaggctggagtgcagtggcgtgatctctgctcactgcaaagctccacctcccggattcatgccattctcctgcctcagcctcccgagtagctgcgactacaggcgcctgccaccacgcctggctaattttttttgtattttttgtagagatggggtttcattatgttagccaggatggtcttgatctcctgacctcgtgatctgcccgcctcggcctcccaaaatgctgggattacaggcatgagccaccgcgcctggccaagtcattgcgtatcttaagatggtacactaaactaatatgcttgccattggtgacaacatagatgaacctggaggacattatggcaagtgaagttagccagacgtggaaaaaataatacttcatgacttcaacctatatgtggaatctaagaatgccaagtctgcaaaagaagagagtagaaaagtagttaaatgggtaggaaggtgggagaaatggggagatattggttaaaggttaccaagttggaatcacgtaggatgactaggtctagagatctaatgtacagcatgaacactatagttaataatactgtatcatgtactggaaagttgttaaaagagtagatttcaggtgttttcagcacacacagaaaaagataactatatgtggagatgggacattttgcttgaccatagtaatcatttcactatgtatatgtatatcaaaacattcatgttgtacactttattgattgattgattgagacagggtctctcgctgttgcctcagctggagtgcagaggcatgatcacagttcactgcctgcttgacctcccaggctcaagcgatcatcccacctcagccccccaagtagctgggactacaggtgtatgctaccatgcctggctaatttttatagtttttgtagagatgggttttgccgtgttgcccaggctggtattgaactcctgagctcaagcaatctgcccgcctctgcctcccaaagtgctaggattacagatatgagccactgcgcctggccataccctttaaatatatacataaaaagaagaatgcctttaaaaattttccatttaacaattactctcagggccaaaactcactgtttaagtattttgctcttttactttgatcttggtgttctatgtagtgctaaaatatactttcatctccatatgactgcttgtaacaaaaagctgttcaccacattatgaactccctgaatacacacaataatcatatagtaaatgcttgttgaataaacaagacaaaattcatcagtttttatccttacttaattttttgaacttttccttgaacttctgttatcaaacttaatacatgaacaacagaaagatgctacggatctatgtagtacaaagtaaaatatgaaatttacacactaaatatttctgtagcatattttcagaagtaagtaattgaatataaacagaagcaagcatattctatttttttattatttaagtgggaaatattttaaaatcttatgtcatatttgctttagatttcttttaaagaattaaaacattacagatagagttgaagcctcatgggttattttaatgttttctacataaacatgtttccatatacataaaccttatttagaattttttcagtttatttatttatttttattattatactttaagttttagggtacatgtgcacattgtgcaggttacatacgtatacatgtgccatgctggtgtgctgcacccactaacttgtcatctagcattaggtatatctcccaatgctatccctcccccctcccccctccccccaccccacaacagtccccagagtgtgatgttccccttcctgtgtccatgtgatctcattgttcagttcccacctatgaatgagaatatgtggtgtttggttttttgttcttgcgatagtttactgagaatgaaattttttcagttttatacgtttatgtaagtggcaccatacagtacatattattttgcaacttgccttttttttttttgtttgtttgctcaatgttgtttttaggattttgatgtaactccagatctgcactgtccaatacaatagccactaactatctgtggctattgagtactggaaatgtagctagtccacattgagatgtgctagaaatatatttgtacatggaatttcaaatatttagtattaaaaacatgtaaaatatctcactaaaagtttagtatccctaagaatctgaaatagaaaatgctccaaaacccaaaattttttgattactgacatgactctcaaaggaaatgctcaaaggtttaatgcaaatattccaaaatctgaaaaaatctgatatattgaccacatatggaactgataatagtttggatgtattggattaaataaaatgtaaaaattttaccagtggtttccttttttaaaatatggctactagaaaatttaaatatatatttgaaatgccttacattatatgtctgttgggcagcactgatctatattgcccacttttcattcctgtttatttattattattttatttttatttttattttttgagacagagtctcgctgggtcgcccaggctggagtgcagtggtgctatctttgctcactgcagctgctgcctcccaggtccaagcaattctcttgccttggcctcccaagcagctgcgattacagctgtgcaccaccacacttggctaatttttgtatttttagtagagacggggtttctctgtgttggccaggctggtctcgaactcctgacctcaagtgatccacctgccttggcctcccaaagtgctgggattacaggtgtgagtcactgctcccagccttcactcctgtttagtattaagttatatagataatagtttgctactggtggatagttgttgttttttttttttacgaatttggtgctactaaagactgttctcatgagcattcttaaacatgtctcctttgcacatatgctagagtttctttctccctaatggttcttctgatttatacttccactggcagtttgagaatgttcttgttctgcagttcttcatcctggtcgatgtttttgtgtagataactgtaatttaatacttaaagtcaaaagcataaggaagcattggtaattatttaagtgaatataaaatgtcagcttatttttctcagtgaatcttttgtaatagtcaactcacattgcctattttttattgtagtgcttctgatctgaataaataaatttaaaatttaacagccatgttatgtatcttattagtaggcagctgcagttatgcaaccaaagaatgtcccatctttaagttccattagcttgaaaaagaaatggcagctttacgtcatggaatactgtgctgccactaaaaatgatgttttagaagaatatttaatgatgcagaaaaatattcacagtatcttaatggaaagaaaagattataaagcagtaaccatttcgttttgttaaaatcaggtctatgttagctttttttttttgagatggaatctcgctctgtcacccaggctaaagtgcagtggcgtgatctcggctcactgcaacctccgcctcctgggttcaagtgatgctcctgcctcagcctccctagtagctgggattacaggagcatgccaccacacccggctaatttttttgtatttttagtagagatggggtttcaccatgttggccaggctggtcttgaactcctgacctcaagtgatccacccgccttggcctcccaaagtgctgggattacaggtgtgagccaccgtgcccggcgagcatttccttacatgcttatctctggatggtcagattgtaggtaacttctattttgcacttcacactttttttttttttcttgagatggagtttcgctcttgttgcccaggctagagtgcaatggcgtcatcttggcccactgcaaactccgtgtcccgggttcaagcgattctcctgcctcagcttccagagtagctgggattacaggcgcccgccaccacacctgcctaatttttagtatttttagtagagacagaggttcaccatgttggccaggctggtctcgaactcctgacctcaagtgatccactcgcctcggcctcccaaagtgctgggattacaggcgtgagccaccgtgcccagcctgtacttcacacttttaatatttcattttctgtagtggatttactattaccagggaaggggaatgcaaggaggagggaagagttcttaacctaaaattttcatagttggaatattattataggaaagaagagattgaatgaggtgtcactgttcccatgtttaaagataagtcaattgggaggccgaggcaggtgaatcacgaggtcaggagttcaagaccagcctggccaatatggagaaaccccatctctactaaaaatacaaaaattagctgagcgtggtggcaggggcctgtaatcccagctactcgggaggctgagggaggagaatggcttgaacccagagggtggaggttgcagtgagctgagatcgtgccactgcactccagcctgggcgacagagtgagactttgtctccaaaaaaaaaaaaaaagataatactttccttctattcaatttcaggcttttcttaagttacaaatggaaccagccaaactatgttattgcttacccattgtttttccagcgttagaggagtttttcaaagaatattttttgatttagagattattttatttattatctatttagagattattcatcatttagagattgccatttaatttcagtaagagttccatttgcatctgatattttttagtttcggagaaaggaaatggtggagaaatggattcatctccaatcctttggaataaaattcagacagtttaagctctagtctcaacttgatttaatttggaattgcatgatgtggtgtcagatttgggttcacatccagttctcttgctgtgtaaccttgggaaatttacccagcatctgagttgtttcttcatgtgtgcagtggagacaataccaagatgaagatttcatgagatgtctagtgtagacatctatttttcagagtggatgcatttaacagttggatgctgaatttataagagtatggatttcataaaaagagcataaatttcatgatatgatgtatatatcaaaagatataggtcgggtgcagtggttcatgcctgtagtcccagcactttgggaagttgaagcggatggatcacttgatgccaggagttcgagaccagcctggccaacatggtgaaacttcgtctctactaaaaatacaaaaattagccaggcgtggtggtgtgtgcctgtaatcccagctacttgggaggctgaggcaggagaattgcttgaacccaggaggcagtggttgcagtgagccgattttgtgccactgcactccagcctgagtgacagattgagactccatcttaaaaaaaaaaaaatgatggctgaataggaacagctctggtctgcagctcccagtgagaccaaaatgtagaaggcgggggatttcttcatttccaactgaggtacccagttcatctcattgggactggttaggcagtgggtgcagcccatggagggtagcagaagcagggtggggcgtcgcctctcccggaagtgcaaggagcgagagatctcccttccccaagccaaaggaacccgtgagtctatgctatccggcacagatactacacttttcccatgatttttgcagtccgcagacccggagattccttagtgtgccaactccaccagccctgggtttcaagcacaaaactgggcatctgggcagacagtgagctagctgcaggagttttttttttttccccctcttcataccccagtggtgcctggaaccccagtgagatagacccattcactcccctggaaagggggctgaagccagggagctaggtggtcttgcttagcgggtcccactcccacagaacccagcaagctaagaaccactggcttgaaattctcattgccaacacagcagtctgaagctgacctgtgaagattgagcttggtgaggggaggggcgtctgccattactgaggcttgagtaggcagttttcccctgacagcactaaggaggctgggaagttcagactgggcagaactcaccacagcgtggcaaagtggctatggccagactgcgtctctagattcttcctctctgggcagggcatctctgaaagaaaggcagcagccccagtcaggggcttatagataaaactcacatcttcctgggacagataacctgtgggaaggtgcagctgtgggcgcagcttcagcagacttaaatgttcctgcctgctaggtctgaagaaagcagtggatcctgacaaggaggattctcctagcacagcacttgagctctgctaggggacagactgcctcctcaagcgggtccctgaccccagtgcctcctgactgggagagacctcccagcaggggttgacagacacgtcacacaggagagctcccgtgggcatcaggctggtgcccttctgggacgaagctcccagaggaaggagcaggcagcaatatttgctgttctccagcctccgctggtgatacccaggcaaacagggtcaggagtggacctttagcaaattgcagcagacctgcataagaggggcctgttagatgaaaaactaacaaatagaaagcaataatatcaacatcaacaaaaaggacccccacacaaaaaccccatcaaaaggtcatcagcctcaaagatcaaaggtagataaatccacgaagatgaggaaaacccagtgcaaaaatgctggaaattccaaaaacccgaatgcctcttctccttcaaatgaacacagctcctctctagcaaggccgcaaaactggacggagaatgagtttgacgaattgacagaactaggcttcagaaggtgggtaataacaaactcctctgagctaaaggagcatgttctaatccaatggaaggaagccaaggaacttgataaaaggttacaagaactgctaactagaataaccagtttagaggacataaatgacctgatggagctgaaaaacacagcacaagaacttcgtgaagcatacacatgtatcaatagtcaaatcgctgaagcggaaaaaaggatatcagatattgaagatgaacttactgaaataaggcatgaagacaagattagagaaaaaaggttgaaaaggaacaaacaaagcctctgaaaaaatatgggactatgtgaaaagaccaaacctatgattgattggggtccctgaaagtgatggggagaatggacccaagttggaaaacacacttcagggtattatccaggagaacttccacagcctaccaagacaggccaacgttcaaatcaggaaatacagagaacaccacaaagatactccttgagaagaccaaccccaagacacataatcgtcagattctccaaggttgaaatgaaggaaaaaatgttaagggcagccagagagaaaggtcgggttacccacaaagggaagctcccagaggaaggatatctgggcagaaaccctacaagccagaagagagtgggggccaatagtcaacattcttaaagaaaaaacttttcaacccagaatttcacatccagccaaactaagcttcgtaagcgaaggaggaataaaatcctttacggacaatcaaatgctaagagattttgtcaccactagacctgccttataagagctcccgaaggaagcactaaatacagaaaggaaaaactggtactagccactgcaaaaacattccaaattgtaaagaccatcgacactataaagaaactgcatcaactaacggtcagaataaccagctagcatcataatgacaggatcaaattcacacataataatatgaaccttaaatgtaaaagggctaaatgccccaattaaaaggcacagactggcaaattggataaagagtcaagacccattggtgtgctgtattcagaagacccatctgatgtgcaaagacacacataggctcaaaataaagggttggaggaatattaaccaagcaaatggaaaaaacaaaaaaaaaaggggtgttgtaatcctagtctctgataaaacagactttaaaccaacaaagttcaaaaaaggacaaagaagggcattacataatggttaagggatcgatgcaacaagaagagctattttaaatgtatatgcttccaatacaggagcacccagattcataaagcaagttcttagagacctacaaagagacttagattcccacacaataatagtgggagactttaacaccacactgtcaatattagacagatcactgagacagaaaattaacaaaaatattcaggacgtgaactcagctctggaccaagcagacctaatagtaacctacagaactctctaccacagatcaacagaatatacgttcttctcagcacatcacacttattcactcaaaaccccacaactacatggaaactgaacaacctgctcctgaatgactgctggtaaataacgaaattaaggcagaaataaagaagttctttgaaaccaatgagaacaaagagacaacgtaccagaaatctctgggacacagataaagcagtgtttagaggggaatttatatcactaaatgcccccatcagaaagcaggaaagatctaaaatgaacaccctgatatcacaattaaaagaactagagaaaaagagcaaacaaattcaaaagccagcagaagacaagaaataactaagttcagagcagaactgaaggagatagagacatgaaaacctctccaaaaatcaatgaatcaaggagctggttttttgaaaagattaacaaaatagaccatgagccagactaataaagaagaaaagagagaagaattaaatagacacaataaagaatgataaaggggatatcaccactgatcccacagaaatacagactaccatcagataatattataaacacctctacgcaaataaactagaaaatctagaagaaatggataaattcctggaaacatataccctcccaaggctaaaccaggaagaagttgactccctgaatagaccaataacaagttctgaaattgaggcagtaattaatagcctaccaaccaaaaaaagcccaggagcagatggattcacagccgaatgataccagaggtacaaagaggagctggtaccattccctctgaaactattccaagcaatagaaaaagaaggattccttcctaactcattttatgaggcaagcatcatcctgataccaaaacctgtcagagacacaaccaaaaaaggaaatttcaggccaatatccctgatgaccatcgatgtgaaaatcctcaataaaatactggcaaacagaatccagcagcacatcaaaaagcttatccaccattatcaagtctgcttcatctctgtgatgcaaggctggttcaacatacgcaaatcaataaaagtaatcaatcacataaacggaaccagtgacaagaaccacatgattatctcaatggatgccgaaaaggccttcgataaaattcaacaccccttcatgctagaaactctcaataaattacgtattgatggaacatatttcaaaataataagagctatttatgacaacccatagccagtatcatactgaatgggcaaaagttggaagcattccttttgaaaaccagcacaagacaaggatgccctctctcaccactcctattcaacatagtgttggaagttctggctaggcaagagaaagaaataaaggttattcaaatagcaagacaggaaatcaaattttctctgtttgcagatgacatgattgtatatttagaaaaccccatcatctcaacccaaaaactccttgagctgataagcaacttcagcaaagtctcaggatacaaaatcagtgtgcaaaaatcataagcattcctatgtaccaataatagacaaacagccaaattatgaaggaactccctttcacaattactacaaagagaataaaatacctaggaatgcaacttacaaggggtgtgaagggcctcttcaaggagaactacaaaccactgcttgaggaaataaggacgcaaacaaatggaaaaacattccatgctcatggatgggaagaatcaatatcgtgaaaatggccatactgcccaaagtaatttacagagtcaatgctattcctatcaagctaccattgactttcttcacagaactaggaaaaactacgtagagccaaaacaatcctaagcaaaaagaacaaagctggaggcatcctgctacctgacctcaaactatactacaaggctccagtaaccaaaacagcatggtactggtaccaaaacagatatatagaacaatggaacagaaccgaggcctcagaaataacaccacacatctacaaccatctgatcttcaacaaatctgacaaagacaagcaatggggaaaggattccctgttttataaatggtgctgggaaaactggctagccatatgcagaaaacagaaactggaccccttctttagagcttatacaaaaattaactcaagatcgattaaagacttaaatgtaaaacctaaaaccataaaaaccctagaagaaaacctaggcaataccgttcaggacataggcatgggcaaagacttccatgactaaaacaccaaaagcaatggcaacaaaagccaaaattgacaaatgagatctaattaaagagcttccacacagcaaaaaaactatcattggagtgaacaggcagcctacagaatgtgagaaaatttttgcaatctatgcatctgacaaagggctaatatccagaatctacaaggaacttaaattacaagaagaaaacaactccatcaaaaagtgggtaaaggatatgaacagacatttctcaaaagaagacatttatgtggccaacaaatgtgaaaaaaagctcatcatcactggtcattagagaaatgcaaattaaaaccacaatgagataccatctcacgccagttagaatggcgattattaaaaaggcaggaaacaacagatgctggagaggatgtggagaaataggaacacttttacacttttggtggaagggtaaattagttcaaccattgtggaagacagtgtggctattcctcaaggatctagaaaccagaaatacaatttgacccagcaatcccattactgggtatatacccaaaggattataaatcattctactataaagacacatgtacctgtatgtttattgcagcactatttacaatagcaaagacttggaaccaactcaaatgcccatcaatgacagactggataaggaaaatggggcacatatacaccatgaaatactatgcagccataaaaaagattgagttcgtgtcttttgcaggtacatggatgaagctgtaagccatcattgtcagcagagtaacacagtaacagaaaaccaaacactgcacgttctcactcataagtgggagtcgaacagtgagaacacatgggcacagggaggggaacgttacacattggggcctgtcaggggttggggggcaaggggagggagtgcattaggacaaatataatgcatgtggggcttaaaacctagatgatgggttgataggtgcagcaaaccaccatggcacatctatacctgtgtaacaaacctgcatgttctgcacatgtatttcagatcgtaaagtaaaaaaaaaaagatatggaagttactatgcgcgttaataaaatatgtttatacctcctcccttaggtgtctattatgtagaacaagtttattacattctaatgataaagtaaacactctgttttcaaaggtggtgttatacgtttgtgtatcttttgccccgggcatgatgatttcatcgtttgtgtaataaatttaatactaccatagtctccccttattcacacgggataagttccaagaccccaatggatgcctgaaactgtggatagtactgaatcctatatacacttatgtttttttcctgtacactcatatttatgataaagtttaacttataaattgtgcacagtgagagactgacaataactataataaaatagaacaattataacaatatactgtaataaaatttatgtgaatttggtttcaaaatatcttattgtactgtactcacccttatgatgatgatgttagatgataaaatgcttatgtgatgtgatgaaggtaggtgaattatgttaggcattgtaatgcagcatgaagctactattgaccttctggtgttacatcagaaggaggatcatctgcttgggtggtcctgaatcatcacgtcctgatgatgtctgttgctggttgtcaggagcagacagtgtccatgactaatgggcaggcagcgtatatagcatgtatacactggacaaagggatgtctcatgtccacggctggacagagcaggagagtgcaagattttgtcacactactcagaatcgtgcagtttaaaacttaccaattgtttatttctggaattttccgtttaatatttttggactgcagttgaccacaggtaactgaattcatggaaagcaaaacaaccatggacaaagtgggattactgtattatttcagattttaattagcatttttcaaaactctgtctagctagtgcttgcattgtagaatttgtctgatttcatttttattgattagggaaataagctttatttttatctggagtgatttgtttctttgtgcttcctcaaaattgagtagtggctactgagtatatatcgaaaaggaaataaattattatgtcaaaaagatacctacatttgtatgttgattgtagcactgttcacaagattaaagatatggaatcaacctaagtgatgaagaaaattggtgtgtgtgtgtgtttgtgtgtatacatacacactgtggaataatactattcagccacaaaaaagaaaaaaaaatcatgtcttttgcagcaacatggatgggactggaggccattatcctaactgaaataactcagaaagtcaaatactacatgttctcacttacaggtgggaacttaaatggttacacatagaatagagtagaataatagacattggagactccaaaaggtgagagggtggcaggggggtgagggttgaaaaattacctattgagtactttgttcagtatttgggtgatgggtacactaaaatcccactttaccaccatgcaatatatgcatgtacgaaatctgcacttgtaccccctaaatatatacaaataaaagttttttaaaacacttagtaaatagcctgtcatagggaataattgaaaccatttcgtatctcactttaaaacctttaggctgggtgctgttgcttatgcctataatcctagcactctgggaggccgaggtgggtggatcacctgaggtcaggagttcgagaccagcctggccaacatggcgaaatcccatctctactaaaaatataaaaattagccagtcatggtggcacacgcctgtaatgccagctccttgggaggctgaggcgggaaaatcacttgaacccaggaggcggaggttacagtgagccgagatcacaccactgcactccagtctgggcaacagagcgagactccatctccaaaaaaaaaaataaaaataaaaataaaaaacctttttagttctgtttcaatgttatcttctttttatttaattatttttggaataagaaataatatttatatggtttgaacaccaaaaggtataaaagatatttttaaaggtataaagtataaaagttagaaatttcccccacttccctgttctctgttcccacagctgccagcagcttaccaccccccagcccaatcactgctactgatgcctaacctatctttccagagttctttgtgtgttcagtagcagttaaccacagatctttaatcattcccctttataccataaaaggtggcatgttatgtacacttgcctcccctttgctttttccacttaatgtgtcttgagaagctttccatatatcagtacatggaaaactttcttatattgttttattttaaatttatatacaataaatgcatggatcagaaaaataattgaatagtgggccccaaattaaatgattactctaatgatttgtagatgggtttagttaaagcactgggatatttagctacaggtataggaatgcatgattattttctgtcaggaaacctagattttgttcttctccccttctttatcaaaggtgaaatcagactcttatttaaaccaggattaagtattctttgcataataatatatatttgctttcccaagttattcttcaggaaagtcttgactctctagcaaactttgtttcttaaaatggaggttagcaggtgttggaaataaggtgagagttttaacacttaaaggaaactatataaagattagatatagtcagaaatttagaaaacattaggaaattcacagagagatggatcccccttttctaccctagattacccctgggctgcttaatggcttgtctttactattagattgtgagctccttgaggtcaggttttatctgttttttatttcaataccaagtgccaagaatatattcagcatttggtgtaaatattataaaatgagtaaatgaatgtgctcttgaatagaagttaactctgattttgggttaagtcccccgccccctttttttgagacagtctcactctatagctcaggctggagtgcagtagcgcagtctcagctcactgcaacccccttctccggggttcaagcaattcttatgcctcagcctcccaagtagctgggattacaggtgtgtgccaccacacccggctgatttttgtatttttagtagagatggggtttcaccatgttggccaggctggtcctgatctcctgaccttaggtgatctgcctgccttggcctctcaaagtgctgggattacaagtatgatctactgcgtctggctgattttgtgttaaaatcctttatgtcagttccagaagaggttaaatggaagttttcgaggcaagagatacttgtgaatttgacatgagtggcctttgttttgaaattttaatgctacacagatgctgtaaaaggattttttcaggccgggcgcggtggctcacgcctgtaatcccagcactttgggaggccgaagcgggtggatcacgaggttaggagatcgagaccatcctggccaacatggtgaaacctcatctctactaaaaatacaaaaattagccgggcgtggtggtgtgcgcctgtagtctcagctactcaggaggctgaggcaggagaattgcttgaacccgggaggtggaggttgcagtagagccgagatcgcgccactgcaactccagcctgggccacagagcaagactccatctcaaaaaaagggtttttcaaaaaatcatgtacaattagaaaattgtgtctcttaaatctatttgcttatgttattaatcccagattatgactgttctttcccctaaggcattagcctgttgaaagaaacagacctataggacttttgttgatgttaaagccagaccagaaatttagaaaatcaggatatttgccattttgataagaaaaccatttaatagttgaatataggaatttgcattttgagagtgtgtactaatttagattctccaggaatagaaccatcatctgaaaataaataagtttaaccagacggacaaggagtgatatgtagttttaggtggtaagactgtgatattgttaggttacatgtatctagggcaagatgctcaaatacaataagtatatacagactaggaactctagttgtctttttttaattaatgaaaagagggttttatgcttcatttctaaacattctcaaaggaatttatgttttgttgatgatctttttttatttatataaatttacgggggtacttgtgcactttttttttaaacatggatagattacagagccgtcaagtcaagcctttagagtttccatcacccaaataacacacattgtattcattaagtaatttctcatgatctcccacctcctgctctctcacctttccaagtctgttatctatcattccatgctctacgtccatgtgtacacatttttcagcatccacatgtgaatgagaacatgtgttattcccaccaacagtgtatgagtgttcccttttctctgcaacctcaccaacttgtgttattttttgtctttttagtaatagtcattctaactggggctggatgatacctcattgtgggtatttttaaaataaaaaaaaatttgtgtgtacataggtatatttatttatggggtacatgagataatattgatacagacatacaatgttcaataactacatcagggttgtatccatcaccaagcatttatcctttcttggtgttagaaacaatctagtttctaatctctaatagtttctaatctctagtagttatattaaaatgcataatgaattattattgactgtagtcaccccattgtgctatcaaatgctaggtcttattcattctatctaactatatttttatacatattagccatccccactgtgccaccatccccattagtgccctggcccccactacccgtcctagcctctggtaaccatcattctactctctatctctatgagttcaattgttttgatttttagataccacaaataagtgagaacatgtgaagtttgtttttctatgtctagattatttcacttaatataatgacctacagttccatccatgttgttgcaatgacaggatctcatacttttttaagggctgaataggactccattgtgtatgtgtaacacattttctttattcgtccgtctgttgatggacactcaggttacttccaaatcttggttattgtgaatagtgctgcagtaatcatgggagtgcagataactctttgatatactgatttcctttctttggggtacatatttagcagtggaattgctggattatatggtagctctctagtttttttttttttttttttttttcatttttgagacagggtctcactctgttgcccaggctggaatgcagtggcggaggttcacttcagcctcaacctcgcaggcttaggggatccacccacttcagtcttccaagtagctgggactataggcgcataccaccatgcccagctaggtttttgttgttgttgttgttgttgttgaggcagagtctcactctgtcacccaggctggagtgcagtggtgcgatctcggctcactgcaacctctgcctcctcggttcaagccattctcctgccttagcctcccaagcagctgggattacaggcgcccaccaccatgcctggctaacccagctagtttttaattgttcgtagagatggggtttcaccatgttgtctagactggtctcgaactcctcgactcaagtgatcctcctgcgttggtgtctcaaagtgctgggattgcaggcacaaggcaccgtgcctggtcagaatttttttttaagggtttctcctttgtaaatttcttattcatatcttgaattgattttctgagtttcttgtattggttttcagacttttcttgcatctcagtgacccttaaaatcaatattttgaatattttatctgggattttgtggatttcattttggttaagatctgttgctgcagaatcgtgttcctttgacagtgtcatattaccttggtttctgatgtttcctttgtcttttcattgatttctgtgcatgtgctgtaacagtcacttcttatctttgaatttactttcatggtgaggggagatttcttcctgaagatgtgactataatgttggttgggccttgcttctgggtgcgtgcagtagtgaagtctctgtatgatttattttgagacagctctgttgcccaggctggagtgcagtggcacattcatagcttgcttcagcctcaaagtcctgggcataagtgatccttctgcctcagcctcctgagtacctaggactacaggcgtgtgccaccatgcctggctaattttcaattttcttttagagatgggggtctcattatattgcccaggctggtcttgaactcctggtctcaagcaatcctctctccttggcctcccaaaatgttaggattacaggcatgaaccaccgtgcccagcctctgtatgatttctttggctataaatagcattaatggtgtctgtggtttccttgatgtcttagcttgagtttatttgtggaggctgaagttgcgctggggattggaatgcctaataggcctgtctttaggtttcaatggtagtgatggtgggctaagcatgtctatccatgtgccctggggcagtgtgtgctggtaactgtgttggcagttccaggcaggctgattcttgggcttctgagtgactttctcagatgcctgttgtaatggtgtaccaggtgggtgagctggctcttgagctcctgggcaactggcatggcatagtttatggtggtagtagttttgttgagatactcttgtgggtcccaagcactttgcatttgtgttagcagtggttacaatgagatccaggccagtaaggtggtacttgcaggcatgaggcagctgaggcggtactggtagggtgttatccctgacctctgtcccctgggagaagtactctggtgtttcagagtgtttcaggtagtgggtttggttgtggaatcccctggtaacctggatcctgcactgtttctcagccaggtcaaagcctggtagagctggactgggaaagcttgcactcaggcccccacagtggtgtaatgtcatgataggcggggtggaatgatcttcaggctgctggcaaaatgcttgggtgagggatgagtgccactgctgagatcctgccatggggaagttgggcctggtcccaggagtgagttgtgttcctttcatgccccagtccaggcggagttccttcctcttgtccctgctgttcagtcagaactctgcagttcttgcctagtccctaaatcatcccagggtcgggtcatataagccccatccagctcaagacttaagcctccagggcaattaatcgtgctcaaatcctgggggtggtgtttgcttctagcactggtggtggctgcatcccacaccaggcagagccaccccatccccgcccctactcacactctgcctctccaaacagcagcccaagtttccctaatggctaggactggccctgttgcttccccgtactgctcacagttatgagctgagatcctgcatcgtgtcttgttacagctgcttaggtttcaaaaatggcatgggacacagaatgtgttccctccctgaaacagttctttctcacagtcttccagtcattccctaaattaattagattcagggcttaagagggtcagggtgctctactgaggactggattgtatggtagtggaccacagaaaaatactcaccctctcccatattggggaatcacttctggttccctgtgggtcccagccacacaggctctctgttttccttttgcttcctagattttggtttttgctgtcgcttttctgttgaactcctgtgttccctctgggataatatatccaaagtgtcattgtctacacaattttagctcttgtacctggatgaggcacgcttgaaattcttgcagtcatccatcttttcctgatcttgtttcttctgccccattccccaggttcctccagggtctcacagttcccctgtatgtgggaaaggcagttttctttctgcccaatcctgcttctcctttgtccacccagatgaggtttccgctagaattgctacttaaagtggttctgtggaacattttgtagcagagaaaatcagggctgagggagcaccataaaggttagaaaagattagaacattaggttagaaaatctgaactactctacctgtcttgattaggaggattagagttgatgttggatgggtttgttggtttattttccacttatctatcagaatgaagaacttactgccttttcttcttagttggtctaatatttatcactttaattatttttaagtgtacaattcagtggcattaaatatatttataatgtatcatgatcattactacctatgcccaaaactttttcatcatccccaacaaaactctatatccaaaaaaaaataaaaccctctatatgtacatggaacaattaagttgggcccctatcttgcaccatataaaacagttaaatgcatcaaagatcttaacgttaacagctaaaattataaaactcttagcagaaaacatttgggctgattttcatgacctgggatttggcaatgatttcataaacataatgtagaaagcacaggcagcaaaagaataagtaagttggacttcattaaaaatttaaaaatttttttacatcagaggtcactatcggctggatgtggtggctcacacctgtaatcccagcactttgagaggctgaggcgggtggatcacttgaggtcaggagttcgagaccagcctgaccaacatggtgaaaccctgtctctactaaaaatacaaaaattagctgggcatggtggcgcgcacctgtagtcccagctacttgagaggctgtggcaggagaatcacttgagcatgggaggtggaggttgtagtgagctgagatcgtgccactgcactagaacctgggcgagagcgcaagactccatctcaaaacaaacaaacaaacaaaatgaagcaatcccccccccaaaaaaaaggtcactatcaagagaataaaaagaaagacaactcagaatgggagaaaatatttgcaaatcatatgactgatgagggtttaatatccagaatgtgtaaagaacttttactgagcagcgaaaagaaaacccaatgaagaaatgaacaaaggccttcaagaaatgaacaaaggccttcaatagccatgactttacttttttaaatttaaatttaaattttttgagacaaagtcttactctcttgcttgggctggagtgcagtggtgtgactgtggctcactgcagccttgatctcccagactcaagtgattctcctacctcagtctctggagtagctaggatgacagactcacactaccacatgtgactttgtgtgtgtgtgtgtgtgtgtgtgtgtagagacagggtctcactatgttgctcaggctggtcttgacctcctgggctcaagtgagcctctcacttttatttttatttgtagtagagatgagatcttgctaatgttccccaagctggtctcgaactcctgagctcaagcaatcctaccttcctcggcctcccaaagggctgggattataggcgtgattcactgtgcctggcctagtttctttgttttaatttttttcctccccatttgtcttttgagtttccctgagaatctgtcttgctgctgtctcagttgtcattcactgttattacactggaaccctattgatgtagtggtaaggaattagggaggggaagtgttttgtaatctcatgattaaatgtcatttcttttttttttaattggtcctgagtccctgaattgtgactctcagaagtgtttcttagcccttgccctcccacttagatgagacaggaaggctataagcctcgggggttttctaattgtctttcctcttggtagataatggtgtgagcatatttgaatatagtttctttcctctcctcctgctcaaggcacaaggaaattttcctcaaatatttgcagtgaaaacatactaaaacccttgtaggattcctggaggtaaaacctaggaaagtgtaggggcccctctaagactgggatgtcaggatttttaaactctcaaactaatccatatttggcctccagaagttgtcagtttctacttgagtgtttctgttctaggaaagctgtgatattctgtatctgtctttctagttttttttggtggtggtttgccttgtgacctcagtttttggattgatctaagataaattactgattttcagttttctcagcgttttttcttgtcaggatagaagtgaggacctccaaaatccttacatattatagctgcctggtgagttttgtttgtttctttttttaaaaattttttttttttttttttttttttgggatggagttttgcgcttcttccccaggctggagtgcagtggcgcaatctcggctcactaaaacctctgcctcccaggttcaagcaattctcctgcctcagcctcccaagtagctgaaattacaggtgcccgccactatatctggctaattttttttatatttttgatagagatggggtttcgtcatgttggccaggctggtcttgaaatcctgacctcaggtgatctacccacctcggcctcccaaagtgctgggattacaagtatgagccaccttgcctggcccgttttttcttacttttagtaaaaataacctcacgtaaactgtcataggtgtctgtgggcttatttttgatgttctcctttgttggaaattcttgtgaaataccttccaggtcttagtctttgtgaggatcaggttctgctttcaattggatgttttaagaattagttttaaaataatttgtttttcttattattagcaccctatgtttagttgctgtacttatttggatagtgtggtaagcacagtggcttaggcatgagaaatataactagagatctcataattttatgtgtttataaagtgttttatttaaaaattaaataattgcaaatgagtggataaagaaactgatatatatatatctgattatatatatatatatctgattatgtatatatatctgattatatatatatgatggaatactacccggctataagaatgaatgaattaatggcatttgcagtaacctggatgggattggagactattattctaagtgaagtaactcaggaatggaaaaccaaacatcgttatgttctcgctcataagtaggagctaagctataaggatgcaaaggcataagaatgacacagtggcttttggggactcagagggaaagggtaggaaggagatgagggataaaagactacaaattgggttcatgtgtactgcttgggagatgggtgcaacaaaatctcagaaattaccactaaagaatttactcgtgtaaccaaataccacgtattccccagaagcctgtggaaataaaaaattaaaaaaattgcaaatgtaaataagacagtaacaaagatggcaaagaacaaagatgaaaaagtatgctgtattacctgaaagtgcttttatggatatcttagcttatccttcgtccatttaaatattgttagttttagccgggaacatgcctgtaatcccagcaccttgggaagctgaggcgggcagaccacttgagaccaggagtttgagaccagccaggccaacatggtgaaacccgtctctactgaaaatataaaaattagccgggcgttggggcgcatacctgtaatcccagctatttaggaggctgaggcaggacaatcacttgaacctgggaggcggaggttgcagtgagacgagattgtgccactgaactccagcatgggtgacagagtaagaccctgtctccaaaaaaaaaaaaaaaaaaaaaagacacaaaagagaaacaaaaaaaacatattgttagttttgatgattatctactagggtaagtacttttctactcattaaattccattagtgactgtgccttgatttccctgaaaggatgcagtatagagtaggcttttgattggagatagacttcctgattttccacttagtatttaggagtgaaaattattattattattatttattgttttttttttttttggagacagggtgtcactgtatcgcctaggctggagtgcagtggcttgatcctgactcactgtagccttgacttcctagggtcaagcaatcttcccacctcagcctcctgagtagctgggactacaggcacgtgccaccacagccggctaatttaaaaaaattctgtagagatgggatctcactatgttgttcaggcttgtctcaaactcttgggctcaaatcatcttcccacctcagcctccctaagtgctgggattataggtgtgagccactgcacccagccggaagtgcaaattatttaactcctttattttattcagcaaataaatgtctttctgagcctcagtttcctgtaataaggttcttataagttttaaatgaggtcagtgtgcattaaatgtacatgttagaatttggtaaggttagtaagaaaaccaaagacatgtggaccctttacaaaaaattccagcatttaccctaagagatgctttttaagtggttgaaatttggtggcatggaggaaatgtatatgggctcgtatcacatttgggagtaaaattaaggcatgaaatttaaacaaaaaataaaattgtgggtacatagtaggtgtatatatttatgggatttatgagattctgagacaggcatgaaatgtgtactaatcacatcatgtaaaatgggctgtccatcccctcaagcatgtatcctttgagttgaaaaacaatccaattttattctttcaggtattaaaaaatgtacaattaatttaatacagtaaataatacattaatttgatctcaaactcctgacctcaaatgattaattagattaattaatgtattatctattatttattatatacaccctgttgtgccatcaaatactaggccccccccccccttttttttttttggagacagagtcttgccctgtcgcctaagctggagtgcaatggtgcgatcttggctcactgtaacctccgcctcctgggttcaaatgattctgctgcctcagcctcccgagtagctgggattacaggcgcccaccaccaagcccagctaatttttgtatttttagtagagacggggtttcaccatgttggccaggctgctatcgaactcctgaccgcgtggttcgcccgccgcggcctcctaaagtgctgggagtacaggtgtgagccactgcgcctggccaaatactaggtcttattcatgctttccaactgtttttttttttgtacccattaaacgtcaccacatcttgccccccctcgcacttctcttttctttctactctgtgtctccatgagtttgttttgatttttagattccacaaataagtgagaatatgcaatgttggtctttctgtgcctggcttatttcacttagcataataacctctagttccatccatgttgttgcaaatgacgggatctcattcttttttatggctgaatagtagtccattttgtgtaactaccacattttctttatccattcatctcttttgatggatacttaggttgcatccaaacctggctattgggaacagtgctgtaataaacatgggaatgcaggtatccctttgatatgctgatttgctttatttctggtgtatacccaagcagctggattgctggatcatatggtagctcaatttttagttttataaggaacctccaaactgttcttcgtagtggttgtcctatttcacgttgttgccaactgtgtatgaggattttcttttctttacatcattgccaacatttgttattgcctgtcttttggatataagccatttcaactcaggcaagatggtatctcatggtagctttgatttgcatttctctgatgatcagtgatgtagaatgctttttcatatgcctatttgcaatttgtatgtcttcttttgagaaatgtgtatccacattttttgcccatttttgattggattattagatttttattctgtagagttgtttgagctacttacatattctggttattaatcgcttgttagatggatagtttgcaaatactttctcccattctttgggttgtttgttcactttgttgattgtttcttttgttatgcaaaagctttttaacttgatgtgatcccatttgtcaagttttgtttggttacctgtgcttgtggggtattgttcaagaaaattttgcccagactaatggcctagagagtttccccaatgttttcttgtagaggattcataaattgaagttttagataaaattctttaatccattttgattttatttatgtatagagcaagagataggagtctagtttctttttctttttttttttttgaggtggagtttcggctcttgttgcccatactggagtgcaatggcacggtctcagctcactgcaacctccgtctcccaggttcaagcgattctcctgcctcagcctcccgagtagctgggattacaagagcccaccaccatgcccgtctgatttttgtatttatttatttttatttatttatttatttatttatttagttttttgagacggagtcttgctctgtcacccaggctggagtgcagtggcacgatctcggctcactgcaagctccgcctcccgggttcacgccattctccagcctcagcctcccgagtagctgggattacaagagcccaccaccatgcccgtctgatttttgtatttatttttatttatttatttatttatttatttatttatttatttagttttttgagacggagtcttgctctgtcacccaggctggagtgcagtggcacgatctcggctcactgcaagctccgcctcccgggttcacgccattctccagcctcagcctcccgagtagctgggactacaggcgtccgtcactgtgccggctaattttttgtatttttattagagacggggtttcaccgtagccagaatggtctcgatctcctgacctcgtgatccgcctgccttggcctcccaaagtgctgggattacaggcgtgagtcattgcgccaggctaatttttgtatttttaatagagaccggatttcaccatgttggccaggctggccttgaactcctgacctcaggtggtctggccgtctcggcctcccaaactgctgagattacaggtatgagccactgcacccggcctggagtctagtttcattcttctgtatatggatatccagttttcccggcaccatttatttatttatttttatttattttatttttttttgagacagagtctcattccatcacccaggctggagtgcagtggtgtgatgtgggctcactgcaacctctgcctcccggattcaagcagttctcctgcctcagcctcccgagtagctgggattacaagctaatttttatattttgagtagagatggggtttcaccatgttggccaggctgatctcgaactcttgacctcaaatgatccacctgcctcggccccccaaattactgggattacaggcgtgagccaccgtgccgggccagcaccatttatttttattttattttacttatttttttgagagtgagtctccctatgttgcccaggctggagtgcagtggtgctatctcatctcactgcatgcagcctctgcctcctgcgttcaagcgattctcctgcctcagcctcccaagtagctgggattacaggcacccaccatgatgcccagctaatttttgtatttttagtagagacggggtttcaccatgttggccaggctggtctcaaactcctgacctcaggtgatccttccgccttggcctcccaaagtgctgggattacaggcatgagccaccatgcccagcctggagtctagtttcattcttccgtatatggatatccagttttcccggcaccgtttacttatttatatttatttattttattttttttgagacagagtctcatttcatcacccaggctggcgtgcagtggtgtgatctaggctcactgcaacctcttcctcctgggttcaagcaattctcctgcctcagcctcctgagtagctgggatgacaggtgtgtactaccaccatgcccaactaatttttgtatgtatgtatgtatgtatgtatgtatgtatgtatgtatgtatgtatgtatttgagacagaatcttgctcttttgtcgaggctggagtgcactggcacgatctcggctcactgcaacctccgcctcccaggttcaagcgattctcctgcctcagcctcctgaggagctgggattacaggtgcatgccaccacgcctggctaatttttttttcgtatttttagtagagatggagtttcaccatgttgcccaggctggtctcgaactcctgaccttgtgatctgctcacctcagcttcccaaagtgttgggattacaggtgtgagccagcgtgcctggccccagcaccttttattttatttattttatttatttttctgagagtgagtctcactgtgttgcccaggctggagtgcagtggtgctatctcccctcactgcaacctctgcctcctgggttcaagtgattcttctgcctcagccttccaagtagctgggattacaggtgcctgccaccatggctggctaattttttttttttttttttttttttttttagcatagatggggtttcaccctgttggccaggctggtctcaaactcctgacctcaagtgatccgtctgctttagccttccaaagttctgggattacagatgtgagccactgtgcctggccccagcatcatgtattgagcctttttcttttccccagcatatgttctcggcacctttctagaaatagaaaatgagttcaccgtagatgtgtggatttgtttctgagttctgtattctgtccattggtttatgtgtctgcttttatgccagaatcatgctgttttggttactataactctgtggtataatttgaagtctgataatgtgattcttccagttttgttctttctgcttagtatagttttgggaattctggaacttttgtagttccgtgtaagttttaggattgttttttctatttctgtgaagagtgtcattggtattttgatagggattgcattgaatctatagattgctttggatagtatggacagtttaacaatattgattcttccagtccatgaacatgaaatatctttacattttttggtgtcctcttcaatttcattcagtttgcttttcagattggtcactgtcgatgtttagaaatgctgctgatttttgtatattgattttttatactgacagtttactgaatttgtttatccgttctaatagtttttttgtagagtctgtaggtttttctaaatataagatcatatcatctgcaaataagggtaatttgacttcttcctttcccttatttctttctcttgtctggttgctgtagctaggacttccagtagtaccatgttgagtaactgctggaagtgggcattcttgtcgtgatctggatcttagaggaaaggcgttcagtttttcccctcagtttgataccagttgtgggtgtgttgtatatggcttttattatgttgaggtatgttcctcctaaacccatttttttgagggtttttatcatgaaggaatgttgaatattatcaaatagtttttaagcatcaattgatataatatggtttttgttcttcattctgttgatatgatgtatcacattgatttgcatatattgatcccctcttgcatccaagggataaactccacctggttacgatgaatgatctttttaatgtgtctgatttgctagtattttgttgaggatgtttgcagcaatatttatcagagatattggcctgtcattttctttttttgatgtgtttttgtcaggttttggtaacagggtaatactggcctcacagaatgtgtttggaagtattgcttccttttattttttggaatagtttgagtaggaatagtattgatgcaggaattttctcggcccctttgttggacttgtgacaggggcgaatgtttactcagcctgccgtgctcaaccccttgttggagggtgcatgtgagtgagtgagtgcgggacctggccagctggtgggggcactgacacagcagcaagccctgtgcagggaccacggccagaccaggcacaagcgagtgagtgtgggacccagctgttctgagcaccagcaggagcaggcctgtgcacagcacccaggttgatggggaggggggtggtgtctgtgaccccgaggcccctgagggggtgttaacagtgctcctttagttctgctgtctgctgatggctgtgtgttaacaagttggcctcttgccttgtcatgtggggtggctgccctccactggtgagggcaaagggctggtgtgacagtcttttttgggtacctgcactcagtgggtcctgagctcttgtctggcatccaagaagaatgaggttgagtggacacttgaaggatggtgaaggtgaagaattttattgagcagtgggaatggctcagtggagaggggagctggagaggggatgggaagggctgatctccctgaagtccggccgtttcttccctaagtcatgctgtctcctttcccaaagtttggccatcttctctccgaaattaagctgtttctctcctctctaccaactgaatctggggtctttataagcataggatcctctttataagcacaggatgggggcggggcaggctgtagaagttttggaaaaggcaacattctattggtaaagagacattattcaaacagaaccaatcgggagagagcggacaaacaggaatagaagttttcactttgggctgtgggtttcaggctttttggcttgaacgtggggtttcaccagggactgcccttgtcttcctagaatttctctgcctcctgcctctatcagtattagatcttctttaaatgtttggtagaattcagcagtgaagccatcaggtcccaggcttttatttactgggagaatttttattatggtgtcaatctcgttatttgttatagctgtgttcaggttgcagatttgttcatggttcaatcttggtagattgtgtctaggaatttgtccatttcttctaggttttccagttcattagcatatagtttttcatagtagccatgaatgaacctttttatttctgcagtattggttatcattgtaatgtctccattctcatctctggtttatatatttggatcttcttttttttttctttttttttttttactctggccaaaggtttttaaattttcttttaacttttacaaaaaccaacattttgttttattgatattttgtattattttctttatttcagtttcgtttgcttcactctgatctttattatttcttctaattttggggttggtttactcttgcttttcttattctttaagatgtgttgttaggttgtttatttgaagtatttcttcttttttcatgtaggcactcacagctataaacttcccttttagtaatgcttttgctgtatcccataggttttggtatgttgtgtttcagtatcatttgtttcaatgaattttccaattttcttcttaatttttgcattgacttactgatcattcaagaacatattgtttaatttacatgtatttgtatacttttcaaaatttctcattattgatttctagttttattccgttatcagaggagatgcttgatattatttcaatatttttaatgtcttaagacttgttttgttacttaacatatgttctatccttgagaataatccatgggctgaggagaagaatgtgtattctgcagcccttggatgaatttttctgtaaatatctattaggtccatttggcctctaatgcacattaagtctgatgcttcattgttggttttctttggaaggtctgtccaatgctgaaagtgggatattgaagtctccaagttttatcatattggggcctgtctctcccttttgctctaataatacttgctttatatatgtgagtgctccagtgttgggtgcatttatgtttaaaatggttacatcctcttgctgaattgactgctttatcattatatagtgaccctctttggcttttcctatagtttttgtcttgaaatctattttgtcttatattagtatagccacttctgcacttttttggtttccattggctttggaaaagatttctcgtaattctgtttgataaggacacatgttaggaggttttcaacacttcagtgagtagtaaacttgtaagtaaagcaggtatgaacagaatctcttgaattagtgaaaagtcaaaatcgttaattactgtttaatttaaaactgaaattataggtattaacaaataactatatgccttatactgtactttatttatttatttttccgagacggtcttgctctgttgcccaggctggagtgcggtgacgtgatcttggctcactgcagcctctgcctcccgggttcaagcaattttcatgcctcagcctaccgagtagctgggactacaggcatgcactggcacacccagctaagttttttgtatttttagtagagatgggatttcaccatgttgcccaggctggtctccaattcctgacctcaagtgatccacccaccttggcctcccaaagtgctgggattacaggcatgagccatcatgcccggccatataatgtactttaaacatgatgattttgaaactggaaacacacgcacatgtgagtaatttcttaaatggaattgaattaccttgaagaatcttagaaaaatgatgtttttaattttaaattagttttgcgtcatacatgtctttatttctcaaattttaaagaaaagtctatgaattaaagaaaataaaacttttcctgcatgaaagcaatgagtgtattatgtaccaaaaaggtagaagaaaaatatcttctgtaatattagctagatattacttactaaagatatttttggggtatatttattagcaatattttaatgcaattttaaacataattgtcatcatacttcatagacagtttatagcctgctatttttggttagcattgtagtatgagctattttccatattatttgaacttttaaaatttaatggttggtatgatattgtatgacttgtatgcatccttgtttacctagtctttattatacactttaattgattacagttttttttttttttttttgcttttgtgagcatctggcagataactttcttgagtaaagttattatgtagaaatattttctttgggccaggtgcggtggctcatgcctataatcccagcactttgggaggctgaggcaggtggaacatgaagtcaggagttcaagaccagcctggccaatatggtgaaaccccgtctatactaaaaatacaaaaatcagctgggcatggtggtgcatgcctgtagtcccaggtactcaggaggttgaggcaggagaattgcttgaacccgggaggtggagaggttgcagtgagccgagatcgaaccactgcactccagcctgggcgacagagcaagactccaactcaaaaaaaaaaaaagaaaagaaaagaaaagaaatactttcttactttctttgtatagataaagggagatagaattactagatcaaagtctcttgatggtttttgccaatttgttttgtaaatgtatgtatcaccacaggctatctatgagagtgtctatttcatggaaacttagcctacaatgaatagtcattttacccctaaatatttgataagttaaaaaatgctatcacatttaacatttcataggctttaagaagttgcagttttatattcatttcttcatgcattttgtgtactatttcaaaagtttctataggggaatgagagcaaagtaatgtgtttttcattatttattttgctaaccaaacatatttaattactaaccaaaaggatgatcctaattaagccaacacttggaattattttcatgtaaaatgtctgtgatagagataattgaatttaataatgaaaaaagtattacagaaatttgctcattaaactgagcttgttttcagctaatccttctgcgaagtgataatgactttttttttttttttttaaataaagatgggggctcgctatgttgaccaggctggtcttgaactcctggcctcaagtgatcctcccatctccgcctctcaaattgctaggaatacaggcatgagccaccacacttggtttaatagtggaatttttattacacttttttatggattcgaggagaggtggcattgtacataacacattctaccgctaattttccatctttcacttttctcattgtgctttccttcccattccgttcctggtgttgaaccaatgcatcatttgtaaatttgtagacagtctgagtttttctgccataatctgttgtttcttcagacttcttctctggtttataagaaaactgttgttttaaaactctcagttttgtattttttatttcttattatactttaagttctgggatatgtgagcagaacgtgcaagttttttacataagtatacatgtgccatggtggtttgctgcacccatcaacctatcatctccattgggtatttcttctaatgctatccctccccttgcccccaaccccccaacaggccccagtgtgatgttcccctccttgtgcccatatgttctcattgttcaactcccacttatgagtgagaacatgcagtgtttggttttctgttcctgtgttagtttgctgagagtgatggtttccagcttcatccatgtccctgcaaaatatatgaactgatcctttttttatggctgcatagtattccgtggtgtataggtgccacattttctttatccagtgtaccattgataggtatttgggttggttccaagtctttgctactgtgaatagtgctgcagtaaacatatgtgtgcatgtgtctttacagtagaatgatttataatcctttgggtatatacccagtaatgggattgctgggtcaaatggtatttctaattctagatcattgtggaatcgtcacactgtcttccacaatggttgaacgaatttatcctcccaccaacagtgtaaaagtgttcctatttctccacatcctctccagcatctgttgtttcctgacttcttaatgatcggcattctaattggcatgagatggtatctcattgtggttttgatttgcatttctctaatgaccagtgatgctgagctgtttttcatgtttgttggccatgtaaatgtcttctttggagaagtgtctattcatatcctatgcccactttttgatagggttatttgtttttttcttataaatttaagttctttgtagattctggatattagccctttgtcagatggataaaaaaacactatttttttaaaaaattttccaattcctcatcggtaaaaaagcagtaaaacattcatggtaatgatcatggcctatagttttttttttttttaagtgacattaggatttaaaactggtatgaaacctaatcatttattttagttagctaatatcaggatttagatttatttttttgacccaattgcagataggcagatcagatctcatagactgccatctgcctcaagctccttttgtagttatgtgaatgtgagcctgaaggctgaacccacttttctctaatggagatttttttttattacactttaagttctagggtacatgtgcacaacgtgcaggtttgttacatatgcatacatgtgccatgttggtgtgctgcacccattaactcgtcatttacattaggtatatctactaatgctatccctcccccctccccccaccccatgacaggccccggtgtgtgatgttccccttcctgtgtccaagtgttttcattgttgaattcccacctatgagtgagaacatgcggtgtttggttttttgtccttgcgatagtttgctgagaatgatggtttccagcttcatccatgtccctatataggacatgaactcatccttttttatggctgcatagtattccatggtgtgtatgtgccacattttcttaatccagtctgtcattgatggacatttgggttggttccaggtctttgctattgtgaatagtgctgcaataaacatacatgtgtgtgagtctttatagcagcatgattgataatcctttgggtatatacccagtaatggggtggctgggtcaaatggtatttctagttctagatccttgaggagtcaccacactgtcttccacaatggttgaactagtttacagtcccaccaacaatgtaaaagtgttcctatttctccacatcctctccagcatgtgttgtttcctgactttttaatgatcgccattctaactggcatgagatggtatctcattgtggttttgatttgcatttgtctgatgaccagtgatgatgagcatttttacatgtgtctttggctgcataaatgtcttcttttgagaagtgtctgttcatatcctttgcctactttttgatggggttgtttgatttttttcttgtaaatttgtttaagttctttgtagattctggatattagccctttgtcagatgagtagattgcaaaaattttctcccattctgtagtttgcctgttcactctgatggtagtttcttttgctgtgcagaagctcttgagtttaattagatcccatttgtcaattttggcttttgttgccattgcttttggtgttttagacatgaagtccttgcccatgcctatgtcctgaatggtattgcctaggttttcttctagggtttttatggttttaggtctgacgcttaagtctttaatccatcttgaattaatttttgtgtaaggtgtaaggaagggatccagtttcagctttctccatatggctagccagttttcccagcaccatttgttaaatagggaattctttccccattttttgtttttgtcaggtttgtcaaagatcaggtggttgtagatgtgtggtattatttctgagggctctgttttgttccattgttctatatctctgttttggtaccagtaccatgctgttttggttactgtagccttgtagtatagtttgaagtcaggtagcgtgatgcctccagctttgttctttttgcttaggattgttgtggcaatgcggtttaaccactctgaaaagatgtatttaaggacttttatctagactctatggtgaggtataacatagtgctggttgagtcagcttcaagtttttgtagagggaggaagagagtaacaaccatgtctggatttaataaaaagtttagcataagtaaatgtgtgctcttttgccttaagaaaatatttttcaatatataaaaaggattaatgagtgctgcctttcagatacttggtttggtgtgtttgaaacatcatttccaaagataggacatacacatttccagggatcatctctatgatatgactctagaaatgatgtagatttttaaaatcaatgtcagaacttatagacacaaatgtatgctttccttctaagtagtcactttgggagcccatatacataacagtggtgtcattcctgatgatatgttgggaactctcattttgtaaccagtttagaagtcatgcaagtaaataaatcttcaggattacttcagatttgggcaaaaaattagttttacccaacttgatcattttgcatttttcaccatatttgactctaagtgaaaactggctatttccaaaaatcatacccatcctgaggatgtgaagatatttttgggctgggcacggtagctcactcctgtaatcccagcagtttgggaggctgaggcagtagggttgtttgaggccagaatttgaagaccagcttggtcaacatagtgagactccctctctccaaaggaaaaaaaaaagtgaagttttttttttctttttcaaatgagtaggcagcattgtttagttatctgtttttttttcttttttttccactgttggacttctgtccattctctttatttgtttatttatttatttgagatggagttttgctctgttgtctaggccggagtgcagtggcgcgatcttggctcactgcagtctctccctcccggctcaagtgattctcctgcctcagcctcccaagtagctgggattacaggcatgcaccaccaggcccggctaattttgtgtttctaggggagacggggtttcaccatgttggccaggctggtctggaactcctgacctcaagtgatctgcctgtctagctcccaaagtgccggggttacaggtgtgagctaccgtgcctggcctgctgatcatactctcttgattttatttttgtactgtggtactgcggttgatggactgcactgatgttatccatatttttaaccttggtcacccacagtgtgaactcattaaatagctgactttgcaatttgattgctatgatttgggaatgagtgtggcagtcataattgtgcaggtttgctatcgtttcatttctagagaacttttctatggtgatctattgatgagataagatatagtatgacattatttattcctctttttgacttttggttctcaggaattttgggtgctgtgagttgacatgtagcatcatttcctcaggtctcattttctatctgagcacgattaaggacacagtgacctgatgataaatttttttgtacatctgactcttatctgaaagaatggttattggccaaatatggaaaccatacccacttggtacctttattctagaggcaaagtttgtttcaaaattttgtaaaacaaccctctccaccaaaagaaaacaaatacccacacaagatctctagttacggtgtctgttatatctcatttcttttccttccctaaatatactgagctattcttaactaaatacaggaaaattgtgcagaggaacacttactaagtgttcagtaaatgttttcatttttcttatgtgtatatctagaagtagaattgttgggtcattgagtaactgtttctgcgtaaatatctatacacgtgccatggtggtttgctgcacccatcaacccgtcatctacattacgtatttctcctaatgctatccctcccccaacccctaacaggccccagtgtgtgatgttcccctccctgtgtccatgtgttctcattgttcaactcccacttatgagtgagaacatgcagtatttggttttctgttcttgtgttagtttgctgagaatgatggtttccagctccatccatgtccctgcaaaggacataaacgcatccttttttatggctgcatagtattccatggggtatatgtgccacattttctttatccagtctatcactgatgggcatttgggttagttccaagtctttgctattgtgaatagtgctgcagtaaacatgtgtgcatgtgtctttatagtagaatgatttataatcctttgggtatatacccagtaatgggatggctgggtcaaatggtatttctagttctagatccttgaggaatcgccacactgtctgccacgatggttgaactaatttaccctcccatcaacagtgtaaaattgttcctatttctccacatcctctccagcatgtgttgttccctgactttttaatgttcgccattctaaccggcgtgaggtggtatctcattgtggtttttatttgcatttctctaatgaccagtgatgatgagttttttttcatatgtttgttggccacataaatgtcttcttttgagaaatgtctgttcatatcctttgcccactttttgttagggttgtttgcttttttcttgtaaatttgtttaagttctttgtagattctggatattagccctttgtcagatggatagatcacaaaaaagttctcccattctgtaggttgcctgttcactctgatgagatatatatatatattttttttttgctgtgcagaaggtctttagtttagttagatcccatttgtcaattttggcttttgttgtcattgcttttggtgttttagtcatgaagtctttgcccatgcctatgtcctgaatggtggtttgcctaggttttcttctagggtttttatggttttaggtcttatgtttaagtctttaatccatcttgagttaatttttatataatgtgtaaggaaggagtccagcttcagttttctgcatatggctagccagttttccaaacaccatttattaaatagggagtcctttctccattgcttgtttttgtcaggtttgtcaaagatcagatggttgtagatatgtggtgttatttctgaggcctcggttctgttccattgttctatatctctgttttggtaccagtaccatgctgttttggttactgtagccttgtagtatagtttgaagtcaggtagcatgatgcctccagctttgttctgtttgcttaggattgtcgtggccctgtggggtattttttggttccatatgaaatttaaagtagcttttttttccaattctgtgaagaaagtcagtggtagcttgatggggatagcattgaatgtatacattactttgggcagtatggccattttcatgatattgattcttcctatccatgagcatggaatgtttttccatttatttgagtcctctcttatttccttgagcagtggtttgtagttctccttgaagaggtccttcacatcccttgtaagttgtattcctaggtattttattgtctttgtagcagttgttaataggaattcactcatgatttggctctctatctgttattgttgtataagaatgcttgtgatttttgcacattgattttgtatcctgagacttcgctgaagttgcttgtcagcttaaggagattttgggctgagatggtggggttttctaaatatgcaatcatttcatctgcagacagagaatttgacttcctcttttccggattgaataccctttatttctttctgttgcctaaatgccctggccagaacttacaatactgtgttgaataggagtggtgagagtgggcatccttgtcttgtaccgggtttcaaagggaatgcttccagtttttgcccattcagtatgatgttggctgtggttttgtcataaatagctcttattattttgagatacgtttcatcggtacccagtttattgagagtttttagcgtgaaggagtgttgaattttattgaagtccttttctgcatctattgagataatcatgtggtttttgtcattggttctgtttatgtgatggattatgtttattgatttgcgtatgttgaaccagctgtgtatcacagggatgaagccgacttgatcgtggtggataagctttttgatgtgctgctggattcggcttgccagtattttattgaggatttttgcatcgatgttcatcagggatattggcctgaaattttctttatttgttgtgtctctgccaggttttggtatcaggatgatgctggcctcataaaatgagttagggaggattccctcgttttctattttttggaatagtttcagaaggaatggtaccagctcctctttgtacctctggtagaattcagctttgaatctgtctggtcctggacttattttgatcggtaggctattagttactgcctcaacttcagaactttttattggtttattcagggattcgacttcttccttgtttagtcttcggagggtgtatgtgtccaggcatttatccatttcctctagattttctagtttgtttgcatagaggtgcttatagtattctctgatggtagtttgtatttttgtgggatcagtggtgatatcccctttatcattttttattgcatctatttgattcttctctcttttgttctttattagtccggatagtggtctgttttgttgatcttctcaaaaaaacacctcctgaattcactgatagtttgaagggtttttcctgtctctatctctttgagttcttctctgatcttagttatttcttgtcttctcctagcttttgaagttgtttgctcttccttctctagttgttttaattatgatgttagggtgttgactttagatatttcctgctttctcttgtgggcatttagtgctataaatttccctgtacacactgctttaaatttgtcccagaaattctggtatgttgtctctttgttctcattggtttcaaagaacttctttatttctgccttaatttctttgtttacctagtagtcattcaggggcaggttgttcagtttccatgtagttgtgcggttttgaatgagtttcttaatcctgagttctaatttgattgcattatagtctgagagactgttatgatttccgttctttttcatttgcttaggagtgttttacttctaattatatggtcagttttagaataagcacgatgaggtgctgagaagaatgtatattctgttgctttggggtcaagagttctgtagatgtctgttaggtctgcttggtccagagctgagttcaagtgttgtatatccttgttaattttccgtcttgtcggtctgtctaatattgacagtgggttattaaaatctcccactattattgtgtgagagtctaagtctctttgtaggtctctaagaacttgctttatgttctgggtgctcccgtattgggtacatatatatttaggatagttagctcttctcgttgctttgatccctttaccattatgtaacacccttctttgtctgttttgatctttgttggtttaaagtctgttttatcagagactaggattgcagcccctggttttttttgctttccatttgcttggtaaatgtttctccatccctttattttgaacctatgtatgtctttaatttgtttttaaaattattatatccatcctacttagtataaattggtttcttgttgtggttttgatttgcatttccctgatatgactaatgatcttgagcattttttcatgtgcttattggccattggtatatattcttttgagaagtgtatatctaagtcttttccccatttaaaaaatagggttgtctttttgttgtttaattgtaagaagtctttatgtattctggttaccagaccctcatgagatacaggatttgaaaatcgttttctctcattgtgtttgctgtgttttcactttcttgatggtgccctttgacatgcaaaagttttgacttttattaaaaatggggctgggcatggtggctcacacttgtcatcccagtgctttgggaggctgaggtggaggatttcttgaggccaggagtttcagaccatcctgggcaacataactggaccccatctctacaaaaaattaaagaaaaaatttagctaagagtatagttgtgtgctgcacttcctcaactaagaacataggtgtgtgccacaggtactcaagatgctgaggcgggaggattgctttagcccaagagttttgagacctcagtgagtcaaggtcacgccactgtgctcaagcctgtgtgacagagcaagaggctaactctaaggaaaaaaaatggggtaaacttatactttccttatttaaagttttaactccttaaaaccctgttgaattacagatacatctattatataacttaagagttgatgctataggctgggcacagtggctcacgcctgtaatcccagcactttgggaggccgagatgggtggatcacgaggtcaggagatagagaccatcctggctaacacggtgaaacctcgtctctgctaaaaatacaaaaaaattagccgggcgtggtggcgggcgcctgtagtcccagctacttgggaggctgaggccggagaatggtgtgaacccgggaggcagagcttgcagtgagccaagatcacgccactgcactccagcctgggtgacagagcaagactccgtcttttaaaaaaaaaaaaaaaaaaaaagagttgatgctataaaacttagttaatgaaatatttccctgggcgatggagctcttgcaagtcctgttgtattttttgttcatctttatgccagtcagttagacagttcttctatgtcaagcagaggatggaataataaaccaaaacactgcttagggctttcagagagtaagtgttcagtaaatatattcgataaattactgaattatttttttaaatgatggaaaggaaaatcttgccctctctttttctgggtgttggctagtataaatctttcttgaagtgataatctacatctatgttttgatttctaaggatttcccaaatataagctatatataagtgagaggaaataataacttaggtgcctaatgataatatgacaagataagtacaagggtcagctatttgttgtgaaatagcaatggatataatttaaatatgaatacctttttgctgtttaatcccccaaattttcttttgatttcttttaaaattcttttgtggtaggtaggtttattgtttcttaagaattaacttaagggtagtattttctgatacatttttaagtaacatgaagtttaacttctgtttaaacacatcatatagagtacattgaaagacctcagtattttcgaaatgtttagtaagtaatatcagcagtttccttaaatgatattttaatcctaggtaagtgtacaggtaggttgtgttactcatatttttatattcttagtgaaatagaattcttttttttttttttttttgagacagggtctgactgttgccttggctagagtgcagtggcatgatcttggctcactgcaacctctgcctcacaaggctcaagccatcctcccacctcagcctcctgagtagctgagaccacaggcatgagccacccatgctctattatgagccaccacacctggcctaaaattcgttttctttaatattttttctttctacacccacaactgtaacatttcccttagtttttactttgaatgtgcatactcttacacgacttacagtatggctatattttcagtttgctagagctttacaattaatttaaaacatgaaaggctaattaagggaattctttaaattttgttttaatagtgaaagcaagttgaatacattggtgcagaagcttcatgacttccttgcacactcatcagaagaatctgaagaaacaagttctcctccacgacttgcaatgaatcaaaacacaggtaaattgaaaaagaatgtgctataccttctagtcttttttctattttttttttacacttatggaggtaaccatttattttattcagagagcagcttttaaaagagatttcagtttgtggaaaatgacagattagcaagctttatagaagcccctattatgtatcttagctatatctgatacaggagattttaattttggtaagtatgactatagaaagcttagaaaaggaagcatttatggttttatatgtaatggaaatgtgttatagaatggctagtgaatgttgactgtgaaaaaatagtattagaagaggcaggagtagtataggaatgttttgtcctagcaatcattcatgtattaggagttaaatttttatttttatttttgtgatggagtctcgctctgtcacccagtctggagttcaatggcatgatcttggctcactgcaacttccgcctcttgggctcaagctattctgctgcctcagcctcctgagtagctgggatcacaggcgtctgccaccatgtttggctaattttggtatttttagtagagactgggtttcaccctgttggccaagctggtctggaactcaagtgatctgccctcgttggcctcccgaagtgctaggataacaggcatgagccatcacacccaacataagagttaaatttttatgttgtttgataatatccctgagtagatttggtgtatttattttttaaaataaaaccacttaacacctcctctctacctccctgtctctctcttttaaaaagatatatatatatatatatatatatatttttttttttttttttttttttaaagagacgaggtcttgctttgtcacccagactggagtgtagtggtgtaatcatagctcactgcagcctcagacttcttgggcttaagcaatcttctcacctcaccctcccggtagctgggattacaggtgtgtgccaccatgcctggttaatttcaaaaaaaaaaaaaaaaaaaaaaaaaaaaaaaaaaatttttagagacatggtcttgctatgttgtccagactggtcttggacttcctggcctcaaatgattctcctgcctcagcctcctgagtagctgaaattataagcatgagccattgtacctggttcccttttttaaaaaacattttgtatcatgtgacagttagcattttcaggttttcaagggtaactacaatacacatgcacacagacacacacaatatgtacaaaaaaagtataagagagttatagtgaaaagttcaaccatatgtgtaattagagttctagaaggaataaagagacttggttaaaagtcctatttggagagatacgggctgagcattttttaaaaagtgatgaaaaacatcagactagagattcaagaagttttgtgaaccctgaacaggataaatataaagaaaactacagctaggcatgtcataaccaaactcctaaagaacataaaccgagagaaaaatatcttaagtagccagaggaaaaaaatacattattttcaaaggaataacagtaacactggcagctcacttaacaacagaaatgatagaaggcagatgacaatgaaattatttctttaaaatgtcaaagaaaagtgcagtcatgcatcacttaactatgggataggtttttttgagaaagcattgttgggtgattttgtcattgtgcaaacattatggagtgtccttacataggctactacacacctaggctatatgttatagcctgttgctcataggctacaaacctgtgcagcgtgttcttgtactgaatacggtaggtaatcggaacacaatggtaaatatttgtgtgtctaaacacatggaaacatagaaaaggtacagtaaaaatacagtattataatcttatgggaccaccgatgtatatgtggtcagtcattgagtgaaatgtctttatgcagcatgtgattgtaattgccagcatagaactgtatattcagtgaaaacatccttcataaatgaagggtggaataaggccatatctgggcaaacaaaaagtgagaacttgatgtcaacagacctacactggagtgaataactacactagaggaaattacaagttttctgaaatgagaaagaaaataatttgaaatggcaacaccaaaatacaggaagtaatgaataagaatgggaaagctaaataggtaggtaaactaaataacataaagttatttaagccacagtccctattcttatttcatcaattaccccagtagtgttcacagataagtttttcccccttaaattcaggatccagttcaagatttagtagtcctgtttctttggttttttaaaaatctgaagcagtttgtctgccttttgggactatgactttttttgaaatgtacaggtgtgttactttgtgaaatggccctcaggattatctgtttagttatggttagattcaggttatacatttttggcaggaatactacataaagtggtgttctgttctccatgcatcctgttacatggcacatgatgtgatttgcccctttactggtgatgttaacttaggttgtttggttatggttgtgtttgctaggtaaacccagtctaaagttatgatttattccattgtaactaataactaatttaatggggggcactttgagattactaaggtattctttttattatcaaaacttaatatgttttcttttgcaaatgaccacaaagtttgcagcttaaaacaacccaaatttgttattttacagttctgtaggttcggagtccggtgggccttgctggacccttctcgggctatcacaaggtcaaagtcaagatgttagtaggactaggttcctttctggagactgtagaaaaatccattcctaagctcattcaggttgttggcagaattcagttctttatgataatcggttagaggtccttctttctcactcactattggccaagaccccctcctagttcttttcaggtgtcttcatttcttctcacgtgatgccctccatcttcaaatccagcaacagcacatcaagtctctctcaagctttgaagctctctgacctagctttttgcttgctaattctgctgccacctgctaccagctggagacatttttctgtttttaaggattcatgtgattagattaggtccctctccctctcatctcctcctgattatctcttgagtttaagatcaactgtgccatattacataacacagttatgggagtgatatgtcatcacattgataatttctggggatttgcggtgtagaatcttgtgggccattcctagaaggtctgtttatcacagcatacatttgtgattcttagctgaataatttattcctatgatgggttcaaaatggtgatgttctaacttgtctttccttctatgtttattagttgatattttattgtaagggaggggttcatgttctaacctattcaattatttgtatcagtatatacttacaattttttccatgaatattctctgtcattatttattttgatcctgaaattgtatcagttttggctagtaggagcctcacctggatggctcctgctgacctttttacaaatccgcatcatttcttgaacactttctttctgtcccttcaaagtattcaaggcttgctttccattctctgttccccagccctacaatcagttattttttgcaagagttctgattccttttagtgggatatagtgtttagaaatcaagatcagggtgtgtgatgtgctcattgccaccaagatgtctttgtttccaagctctttcacagagaaagccaataatatgttttatattttcatgagttgatactgatacttttaattcaattccagtcttctttctagacttccccttttcatgtttttaacttctttctccaacagaaagaaacctggttcctattatccccaatttatttatttttatttatttattctttttgagatggagtctcactctgttgccaggctggagttcagtggcgtgatctcagatcactgcaacctttgcctcccaggttcaagcgattctcctgcctcagcctaccaagtagctgagactacagtcatgcgccaccatacccagctaatttttgtatttttagtagagacagggtttcaccatgttggccaggatggtcttgatctcttgacttcatgatccgcctgcctcgacctcccaaagtgctgggattacaagtgtgagccactgtgcccagcctatccccagtttatttatttatttttatttttatttttttgagatggagtctcgctgtgtcacacaggctggagtgcagtggcgccatctcagctcactgcaacctccgcctcctgggttcaagcgattctcctgtctcagcctcttaagtagctggaactacaggtgcacaccaccgtgcccagctaatttttgtatttttagtggagacggcgttttgccatctctggatggcaggctggtctggaactcctgaccttaggtgatccacctgcctcagcctcccaaagtgctctgattacaggcgtgagccaccaagcccggcctttccccagtttatttgtattcatttttctagtcctcattgtacccacagtttcagagttgttaaccatatcatcgcattaaagaaacgtaactatagttcagtatttctttaaagttctttttgtctttagaatgatgttacgttgtcggagtcctgtgttcactagttgaggaactccttcagtagtggtatctccagttggacaaacagatgtcactcacaaataccaattgtaaattctgggcagcatactgaaggctagatatcaacaaagtagataaactggaggggagtcaacacatggaagaagaagtggcaatggctgaattccccattgttaatcctttttgcttcagccaaggatcctcttagctccatctgtggcctttaagacttggataaaaatctacagtcttattggatgtgaaatcaaggaaaaaatttagggagaccacagcagctgtaacatgagtagagagatcccatctagaaaagagccacagaatgggaaaaccagattgcacgaaaactctcccaatagctctggtcctgttgcctaagtgcactccagattccaaccagcctggttaggactaaaagaacagaacaaaagctttgagttgtttggtactacagggtggaaagggtttggagtttcatttcaagtaagttaactatctgtttgtttggttggttggttttttttgagacaggttctttttctgttgcctaggctggtgtgcagtgatgccatctcagctcacagcaacttccacctcccgggttcaagtgattcttgtgcctcagctttctgaatagctgggattacaggcacctgccaccacgcccagctaatttttgtatttttagtagaggcagtgtttcaccatgttggccaggctggtcttgaactcatgacttcaggttatctgcctgcctcggcttcccaaagtgctgggattacaggcgtgagccaccacacccagcccagttgactttttatgttggccttgtatcctgtgaacttgcttaacgtacttattagttctaaatagtatttttccccctcttgtagattctttgggattttctacttagacagttatatcacctgcaaatagggatagttttattttttcctttccatctgtataccttttaatttcttttcttgcttcattatattagctaggattttctgtattttccagtattacattgaagaatgatgatgatagcagacatcctcttagtgttaccaattttagtgggaaaacattcagtctttcacagtgaaggatgtttgctttataggtttcttgtaaatgccctttatcaagttgaggaagttcccctctattcctagtttgctgagaatttttttaagcttaaatttctatttgatttctatttgtaattataaattcacatgcagttgtaataactaatatagagagagctcttatgcactttggcagtttccctcaatggtaacatataaaactagaatacaatatcacaaccaggaaattgacattgataaaatctattaatcaagattttgtcagttttactttgtgtgtgtgtgtgtgtgtgtgtgtgtgtgttaaagttctatacattttttttttacctgggttgattcatgcatctaccaccacagttgagatacagaatagttcatcaacacaggattcctcatcttggcattttataatcacacccacttccctccgcctacctctgcctatgcttaacacctggcaaccactaatctgtcttccattttgaaaattttgtcatttcaaatatgttaaataaatggagtttatagtaaataatcttttggggttggagtgttttcacttggcataattctgtggagattcattgaggttgttgtatgtatcaacaatcctttccttttaattgcagggtaatattccatggtatggatgtacagattgagtatccttaaccccagaatcagaaatctgaaatgttccaagatcggaaacttttgagtgctgacatgacactcaaaggaaatgctcattggaacatttgggattttcagattagggatgctgaatccctaatgtgaataaaccagaatagtgcaaatatgctagaatctgaaaaaatccaaaatttgaaacacttctggtcccatgcattttggataaggaatacgcaacctgtaccacagttgtatttgtattgttttttttttttttttattgaaatggagtcttgttttgtcacccaggctagagggcagtggcatgatcttgactcactgcaacctccgcctcccaggttcaagtgattctcctgcttcagcctccggagtagctgggattacaggcaagcgccaccacacccggctaatttttgtatttatagtagagacgaggtttcaccatgttggccaggctggtctcgaactcctgacctcaggtgatccacccacctcggcctcccaaagtgctgggattacaggtgtgagccaccgcgcctggcctgtaccacagtttgtttaaccatttatttgttaaagcaaatctgggccgattcctgatttcagttgttacaattaaagctggtggtgaatatttatatatacgtttttatatgaatttatgttttcatttctttgcaataaatgccaggagtgcattttgcagttcatatgatggttacacatttatttttattaaattaattaaactacatttacattttattttattttgggtagagacagagcctcactgtgttggccaggcttgttatgaactcctgacctcaggtaatcctcctgccttgtcctctggaggcccttggattacagacatgaatcactgcacctggtttgcattttttttttttttttactccattggactctatcagtgcttttatttatttattggtatttatttatttatttattttaacttttaggttcagtggtacctgtgaaggtttgtcacataggtaaggtagcatcactggggtttattgtttagattatttcatcacttaggtattaagcccagtacctaatagttatcttgtctactcttacatgttcatttttttaaaagaaactcctgaactgttatccagagtggttgtactgttttatattcccacagcaatgtatgagtgatccagtttctccacatccttgccaacactgggtgttaatactatttttaaattttagccatttgatatttatggtatctcattgtggttttaatttgcatttacttaatgagtaataaattctttttaaatagaaacaggatattgctctgttgcccaggctggagtgcagtggtgcaattatagctcactgcagcctcaaactcctaggctcaagtgatcctcctgcctcagcctctcgagtagctgagactgcctcagcctgtcgagtagccaagactacaggcacatgccaccatacccagctaattttttaatgttctgtagagacggggtctggctctgttgcccatgctggtctcagactcctggcctcaagcgatcttcccaccatggcctcccaaagtatttagattacaggcatcagccactgcatctggctggtaataaaacattaaacatctttattgaaatataatttacatgccatacaattaacccatttaaagtataaaattcagtggtttttagtatattgaatatttacacatatgtacaaccatcaccaccatcaattttaaaatatttttatcacctcaaaaagaaactccataccctttagctatcaccccctagctctaagaaatcactaatctagtttcttgttttgagttttttatttttatttttatttttattttttttttgagacagagtctcgttctgttgcccaggctggagtgcagtggctattttggcttactgcaacctctgcctcccaggttcaaatgatttttgtgccttggcctcccaagtagctgggattataggcgtgcgccaccacacctggctaatttttgtattttttagtagagacagggttttgccatgttggccgggctggtctcaaactcctggcctcaagtcatctgcccacctcaggttcccaaagtcctgggattgcaggcgtgagccactgcgcctggcctatttccctattttggactttcatatgaatggcatcatataatacgtgtttttgtggctgatttctttcatttagcgtaatgtattcaagatatctgttgtaacatgtcttagtactccattcctttttatggccacataatattccattatatgtgtataccatatttgtttatccatttatccattgatggacatttgtcttgttcccatgttttggctgttaggaataatgcggctgtaaatattggtgtacagttttttgtgtgtagccatatatttttgtttatcttgtgtatatacctaggaatctaattgctggatttatatggtaactatgttaaattgtttgaggaaatgtcaaactgttttccaaagtagagatactattttacttttccaccaggagtatataaagattgtgagttcttcacgtccatgccaaccattgttaataacagactttttgattctagccattctagtgcatgtgaagtagtatctcattgtgattttagttttcaactgcctgaagggtaatgatgttgaacatcatttcatgtgcttatttgtagtttgtatatattccttggagaaacttctattcaaaccctctgtccagtctttttctttttgacagggtcctgctctgtttcccaggctggagtgcagtggcatgatctcagctcacagcaccctcaacctccctggctcaaatgatcttcccacctcagcctcccgagtagctaagactatgggtgtgtgccacagtgcccagctaatttttgtttattttttatagagatggggtcttaatttgttgaccaagctggtcttgaactcttgtgcttaagcaattcacccgcctcggcctcccaaagtgctgggattacaggcgtgagccaccgtgcccagcccctttgcccatttttaaaatgggtatttatgctttcattgttgatttgtaagaattctttatatattctaaattttttattgtaaaatatgcataacataaaaattgccattttaactaattttaaatgtacagtcctgtaacgttaagtaaaattgttgtgcattcaccaccaccatccatgtctagtactttttcatcttccccaagtgaaactctgtacccatcacatactaactccccaatcttccctctccttagccttgcaaacaccattctacattctcttcctaggaatttgactactctaggaacttcatatacgtataatcctacaatatttgtccttctgacatattttacttagcacaatgtgttgaaggttatccatgttgtagtatatctcaaaatttcatttcttttgaagtctgaataccattccattgtatgtatataccacattttgtttatctattcatatttcaatggacacttggataagatatataatttggaaatattttcccctattctttgagttgtctttatttatttttagagacagggttttgctctgttgctcaggctggggtgcagtggcaagatcatagttcactgcagccttgaactcctgggtacaagcaatccttccatctcagcctcccaagtagatgagactatagttgtgtgccaccatgtctggctagtatttttttttttttattttttagagatgaggtcttaccatgtagcccaggctgagcttgaactcctggcctcaggcgatccaccttggcctcacaagtagctgggattacaggcgtgagacactgcacccagttgggttgtctttaattgaagcacaagttactaattttgatgaacttttatttatctgtttttccttttgttgctcattcttttggtgtctttaagaatccattaccaaattgaaggtaatgaagatttacccccatgttttcttctaaaagttttatagatttagttcttaaatttaggtctttgatctactttgagttaatgttttgtatatgttgcgaagtaggggtccagcttcattttttgtaggtttctaaccagttgtctcagcaccatttattgaaagacaattctttcttcattgaatggtcttgccacccttgtcagaaatcagtgggactgttgggcatggtggctcatgtctgtaatcccagcactttgggaggccgaggtgggaggggtactcgggcccaggagttccagaccagcctggacaacacagtgagactccatctctattaaaaaaaaaaaaagccaggcgtagtggtgtgtgcctgtagtcccagctacttaggaggctgaggcagaaggatcacttgagcccaggagactgaggctgcagtgagccatgattgtaccactgcaccctagcctgggtgacagagtgagatcctgtctccaaaaaaaaaattaaaaaaaaaatcagctggtcatagatatatgggtttatttctggactcttaattctgtttgtccttttaccagtactccacggtcttgattgcattgttttacagttttgtgcaaagttgcaccaaagttgttgtgtagttttgcaaaactggcaatcaagtctgtgcagtactggcaaaattaggaagtgtgagtcttcatacttttcatttttcaaaattatctgcctattctgaatgttttcaattccctatgaattttaactctttgttttttcttggtagagatgaggtttcactatgtttctgaggctgttcttaaacttctgtcctcaagtgatccttccaccttggcctcccaaagtgctgggattataggtctgagccaccatgcctggtccatatgaattttggaatgagcttgtcaatttttacaaagaagtcagctgggattctgacagagattgcagcgtgtctgtagattagtttgtggagtattggtgatggcagcggtgggccgtctggagtggctgctgccatcacactggctgcagcagggagacgtggccagggctgcacggtctatagagttggtgggagccaggggcaagcaggagccctgccccttccaagttggagctccctgggtcctgctgcagctgcctaagcatggctgtagacctgggcatccctgtgctcttgagtcttgggagcaggctggagccccaccctcccaggtgcaactgcagctggccaaaccgtggctgcagtcccaggcctctcattccatggagcaggcaggagacccaccctcccgggtgcagctgcagtctcccaaactgcggctacagaaccttgccttctgctccacgagcaggcaggagccctgggtgcagcaggagccccgggtgcagccgcagccacccaaaccatggctgcagatctggtcctcctgctttatggagcaggctggagtcccaccctcctgggcacagctatagctgcccaaattgtgggtatagacctgggcctcctgctttatggggcaggcaggagccctgccccactgggtgcagctgcagccacccaaatcatgggggggctgcagacccaggtgtctctgcactcttggggcctgggaaggccccccttgctctcataggcttgggagtgcctgctcctgctgcctggcttcaccctgctattggcacctgctctgatcttgtggcaaagttggggccgagcctgggtgctgtcgtagcctggccaggtatccacatgcttggggaactgctgacatgccagccttctgctgccttgaccccctctggactttgggtactgacaaacatagggaagctgaggcagggctgagggcagttcagcactggcctgcaggtgcccccttgcatctacagcctgggcaccatgaatggcagcaggaggtagacaggttcctcagtggaaggtggcaggtccctggtgaggacccaccttcaggccagggaaagcctgaaggctggaggttgggctgccagttgcatggatcagagtgggaacttgtggtgccttttctgggcctgcctgtggaccaattggcatgcacatcctcccctctgaggcccataaaaaccccaggctcagccagagctgaacagatgtcaggatgaccagctgcagagaggagcaacccactctagggcctcctctctgctgtgagctgcagaggtgacaagatgaccttcctgcaaagaggtgccacacattctagggcctcctctttgctgagagctgcagagacgatgggtcgactttcctgcagagaggtactactcatactagggcctcctctctactgagagctgcagagacgaaggagagatgatggggagatgatgggatgacctgcctgcaaagagaagccacccactctcaggcctcctctctcctgagagctgtgcagatgacgggataatcagctgctgagaggagctaccctctctgctgatagctgaacacttgtagtaacgacttgcctagcagagaagaaccaccctctctgctaggagctgaacacttgtagtaatgacttgcctagcagagaagaaccaccctctctgctaggagctgaacacttgttgggataccttgactgtggaaaggagctgccccctttgggtttcctctgagctgttctattgctcaataaagcccctctttatcttgcttactctccacttttctatgcacctcattcttcttgggtgcaggacaagaacttgggacctgccagatgaggctaaaatagctgtaacacaaacagggctgagacatgccccttgctcaccttgttgcaggtgaagagaaggaaagaagagctgcagccctctggggagcccagacctgggagctccccaagccagggctgtgactccctctttggggccctgcctgcggttcctggtgtctccaaacttctgggtgccaccgtgttccctggtgccagctgtggatgctgcttgtggtgttcatggtccagctgcagcctcacagagaaagagctgatgcccatgctggcacctggagctgcgtgccctgctgcagctgccaggatgtctgattgcgcagtgaccggaccccacacttgctcacataccccttgctgcttcatccagtcttccttggctatcataggacacaggccagtagcatgagccgagtgtagccggccaggccaaataggcgggacaagcccagcaggcctgagcaaaactctggcacaggtgccaccagccgcagatgtttctggccagaaaagtgacaccccaaagattctgtaacactggcatcataagaatgataaatcttatggcttggcctggtggctgaaggaattgtgtactttaaatgggtaaattatatggtgtgtaaattgtatctcaaggatgtttaatgttttatcactggcgaggtgcggtgacttatgcctgtaattccagcactttgggaggctgaggtgggaggattacttgaggacaggaatttgagaccagcctgggaaacatagccagaacccatctctacaaaacatttaaaaatcagccaggcatggtggcatgtgcctgtagtgccagctaatcaggatactgaggcaggaggatcacttgagcccaggaatttgaggcggcagtgagctataattgcaccactgcactccagcctgggcaatagggtgagactctgtccctagtaaaaaaaaaatgttatcttctaattcatgaacatgaagtgtttttccattgatttaggtctttaatttctttcaatagcgttttataattttcagagtatgttttgtacttctttttttttcaaattatttccttctaattctgttataaatggaattcttttcttaatttcattttgagattattcattgcaagtgtatagacataacattgatttttgtttattgtccttgtacccatcaatcttcctgaactaattttattcccatagttcttttattattattattattattttttgagatagtcttgctctgttccccaggctggggtgcagtggtgcgatcttggctcactgcaacctctgcctcccaggttcaagcaattctcttgcctcggcttaccgagtagctgggattacaggcacctgccaccacgcccagctaatttttgtatttttagtagagacagggttttgccatgttggccaggctggtcttgaactcctgacctctggtgatccgcctgcctcggcctcccaaagttttgggattacaggcgtgagccactgcgcccagcctattccaataattctttagtggattccttaggatcttctatgtatgagataatgtcacattctaataaggatagttttattttttatttttttttgagacagagtctcgctttgttgaccagggtggagtgcagtggcatgacctcagctcactgcaacctctaccccctgggttcaagtgactttcctacctcagcatccctaggagctgggattacagggatgcgccaccacacccggcaaatttctgtacttttagtagagatggggttttgccatgttggctaggctggtcttgaactccggacctcgggtgatccacccgcctcagcctcccaaagtgctgggattacaggcatcagccaccgcgcctggccctctaataggaatagtttcataccttcattttaaatactgatgactttcaatttttttttttaacatgcatgctctgagtagaatccgtagtgcaaagttgaatagaaatggtgagagcagatttccttgccttgttcctgatcttaagggtttcggaaagcattcagtctgtcgccattaagtatgatattacctacctgtgggtttttgtagattttaaaatttcctttcttccttaatttattagaaaaaagatttttttttttttttgagacggagttttgctcttgttgcccaggctggagtgcaatggcacaatctcggctcactgcagcctccacctcctggattcaagtgattttcctgtctcagcctcccgagtagctaggattgcaggtgcatgccaccacgcccagctaatttttgtatttttagtagcaacagggtttcatcatattggtcaagctggtctcgaactcctgacctcaggtgatctgcccacctcagcctcccaaagtgctaggattacaggtgtgagccaccacacctggccagaaaaaaaagatatttttaaagagctgttttaggttcatagcaaaattgagcaaaaagtacagtgagttcccatatgtccctgcttccacacatgcacagcatctcccactatcagcattccgtaagagagttgtacatttgttatataacgttgatgaacctacattgacatgtcattattaccccaaatgcatagtttatgttaaggttcactcttggtgttatacattttaaagatttttgacaaatatataatgacctgcattcaccattgtggtatcatacagaatagtttcactgccctaaaaagattcctgtgctgtgcctgtttcttcatccctttctcccctgtgagcactggcagccactgatctttttactttctccatagttttgcctttttcagattgtcatagttgtaatcatatgtatgtaacctttccagactggcttctttcacatagtaatctgcatttgtttcctccatgtctctttgtagcttgatagctaatttatttctagtgctgaataatattccattgtctggatgtactacagtttgtttatccattcatcttctaaaggacatcttggttgcttctaagttttggcagttatgaataaagctgcttataaagatatttatataagtaaatgaagatgtttacataaaataaagacatttataaatatctccatgcaggttattttgtggatgtatgttttcagcttctttggataaataccaaggagtgtgattgctgctttatatatggtatgcttagttttgtaagaaattgctgaactgttttcctgagtggctgtatcattttgcattcccaccagcaataaatgatagtttcttttgctccatatgcttctcagcagttttgatgtagtcagtgttctggattttggctattctaataggcatgcaggggtatattgttttaatttgcaattccctaatgacatgttgagcattttttcatgtgcttatttgcgtctgtatatcttttttggtgaggtgtctgttcacatatttctttttttttccttgctttaaaatcatgttgtttgttttattgttgagttttaagcattctttgtatagtttggataattgtcttttatcagatgtgtactttgtgaagattttctcccagtctctagcctgtcttctgatttgaagttttctaatatttttgtggacttttgcatctatattcataagtgatacttgcctgtagttttctctatttgtgatatattttttatatcagggcaatactgttttcataaaatgagttgggaaatgttgcctccttttctgttttttagaagagtttgtgaaggattggtattagtccttttttaaatgtttgttataattaagtggtgagaacatttgggccttttctttatgggtagctttttttattgctaatttaatctcatcaattgttacaggtctgttcacacctgtttcttcttgagtcagttttagtagtttgtgttttggaatttgttcatttcatgtaagttatttagttttttggcacacagttgttcatagtattcctttataatccgtttatttcagtaagattagtagtaatgtcctctttttcatttctgattctagtaacttgagtcttgtttcttttttttcttggtcagtctaccctaaagtttgttcatcttttcttcccccacaggtaagttgttacacaatccctagcagattccaactttcatggccaaggtcctctttgatcatctttttaaaaaattagtttttggccaggtgcctgtggctcacgcctgcaatctcagcactttgggaggccaaggtgggcagaccacttgaacccaggagttagagaccaggctgggcaacatgacaaaaccccatctccacaaaaaattagccaggtgtggtggtgcgcgcctgtagtcccagctacctgggaggcttagaggggaggatcacctgaacccgggaggttgaggctaaagtgaaccatgatagcacctctgcactccagtatggacaatggagtgagaccctatctctaaaaaaaaaggaggaaaaggaaaagaactactctttggttttattgattttttttttctattgcttttctatttcctatttcattagtttcatgaatttctgccataatctttattatttccttctccttgattttggtttagtttgctcttattttcccagtattttatggtaaaatgaaatatactttattggtagtatgttttttatttttagtgtaatagtttaaattttcttctgctgggaaatgtcttgcaatatttataaactacaacaggaaatgtttttataccaaagtaatctttacagagatttcatgctttataaggaggggttagtatgcaaaaggagagtgattctagtgaaagaacacttctaggaatattttaatgtgagtagtatgttaacaatactgccagacttcatagtgtgagaatgggtttgtggagttataggtattgatgttctgtttgataatgcatcgaagagataaataatgttctttatttcttcttttttagataaaatcagtggttctggaagtaactctgatatgatggaaaacagcaaggaagaggtaaggataattatttagagatatttgttagttacgattaaccaagtagagcatatgtctttagattgcttctggacacatgtatgtgtcgaaggctactgatacccagttgtcattatacttcagtttcgttgttttccagtttgagaacaggtgttcattgtttctgttattgttgtggttcacttcagtggtttacctaaagtcagacaactgaagacttccaacagatagatattaaactgtctttatattgccccaaaggtgtttgaggtggatgttaagggcatgaactccatggttgtgaaatctctcaaaacttggtatctagagtctgctaagcattattatagcaactcataacaaggtcctttgcctgatacacaggtccacaactgtggttttgggaattttttgacctactgtaaaaaaaaactgaatccagtaaaatatattgattatactggcaaaatgagggtaagtttagtatctcaaagcaagttgtagaagttacttcatgccatatgttagcttagagaagaatgaaacatatttagatccttgaaactccctacttctcttgagatctgattacttctgcatctttgttttgtctttgttgactggggccatgatcattttgcagcagtgtattccccgcagcatgccacagcaaccatgtaaaaaacgagaaatttaatcttcagccaaggaaacctggcagtaaatgagaattagttttaatttttatttttttgcatctgtgttccttatgtggtagagaattagtttttgaagttccttttagaaaaatattctaggcacataaatagcatctcattatatcactgtattgaagttgctatagggaaatagctaattgtagggatgccgtttcgagaattttattcacttttatatttatgtctcacatctagggaactagctcttcagaaaaatccaagtcttcaggatcgtcacgatcaaagaggttggttgatgttgaagggacaaaaagttattttctttttcaggttattttctgtttctaaaaccatgtttttttctgaactcatgtcaaccactattctgagttaactattctatacaaatatacatatttgaaaatgattagcataatataatgaatccctttgtatctatcacctgatttcaacaattattattcattctaactttgaattctaaagggtttttaaggatttattatatattagtggcccttgcaatatgtagtttatttcattagacaatatatgtccttgaaaaaggacaaaataattgttgaatgcctatgaggcagtgggttttttgggttatatgaaattgtctaggatgggaagttagtcatcatagttgtaagttataaggagaaaaaagagtggtaaaaaacacttttttctgctaaattgtcaactcaagtcatacataaaaactgaaacttttctaacataatgtagtacccaatatactatgcagtataattgttattagaagtttgccgcttagtctattggactttcattgtttctaaccagtgggaatgtctcttaaaaaccaagcttgtttgatattaatttattctctgaagtagtgattcttaaagaagagtgtcctccagggtctccctggtagctttttcagaatgcgtatgccttggtcctgctccagacctactgaatcataatcttcagtgatatggtatagacatacatgcttccctaggtgattctgatgtgcttccttgttgagacccactgctcaatctcaacatgttatttatgttctttgggtattgttccagttgtcagaaacattcataattctatgaacttaattctttcataggaaaccttcaattgtaacaaagtatgtagaatcagatgatgaaaaacctttggatgatgaaactgtaaatgaagatgcgtctaatgaaaattcagaaaatgatattactatgcagagcttgccaaaaggtaatgtgtgttaatttttcatgaagttaaagttgaaatgaatttttaaacatcatttttataaaattggaacttgattactgttaactatgtacaaacgaccaaacatggcattttcctagtggttgtctagaaatatatttgtatgccaatgataatatgtgttattgaagttaaaaatttggaatattcagttggttttgtaaagaatgaaatctatttttttctttcctttgagttttagacaaggggctttagtttccaaattatacttcagtgtgtaagcaggtttaaaaatttaatatattaggttttggttcagtcaatgttaatgtgcttgctttatacaaaaatgtaatgactgttcctgaaaacttaaaaatcatgtacagtctagtttagtcttattgcattcttaaattccctaaggctaaaagctgaagttaactatcatagatagatttagttgtatttcttgctgttatcttttttaaaaaactttgtcacatacctctcaactgttgaagttctaaccataaaaccttgttaataagaatagggaacaatagccaaatgaatatcttggactcttcatagctcaagtctgagagcaatataattggatgatgagaatgacagggaacttggttcaaagagtcaaattttagattttttttctttgttaaataatatgttgtagtctcttggcacatttttcaaattcattctcatagatcttttacagcagtgcttattaaaccttgttccctgtctatgtttttatgacatattttcaaattatggaagtttaaaaaatacagtaggtaggagggatgggactttccttgactaggataaattagaagttacaaaaggtgataaatgaaatgaggaaaggaaattaatgaaagaagagagataggggcctaccgcttacttagttttgcaaatcatttatgacaattttatgtaatggttttggtggccaagggcagaaacaactaacatgggagtctaagtcccataggtggtgacttactttggatttttacattctcagtggttgtcactgggagtgtttatgatgtaagaaataggaattcaaacttttgttttaattgtactgtggaagaaagtcagcatatgatgttactaacctgaactatgcctaattctgtcagaccaaaacaaaaacagacccgtttcataaggttaaatttgggtgtttatattattgttgtaatatttattgagtatgtataagtaccaggctcttacagaattaactcctttaatcctcaaaacaacactgtaaggtagttattattttgcttgtagagataaaggaacaaattcagaacccaaggaactttttcagctttaaattgagaagctaagatttcaacccaggtctgcttgaatccaaagcctagtgagtgctcttttcactctgctgctttgcttccaattctccctagaagaaatctagggagaattcagtttttttttttttttgtcgttgttgttaatttaaaatctttagttcttttcaaatgctggggcttctctgagtgtctacatgcaatgattgctgtgaataacttttttttggtggggattatttaattttactacaatctgtaaaatctcaatcatctgtgtcctccccccccccaccctttcagagactcagaaactcatttaacaactagatgctataacttgtcaaaatttgcttgttgaataacatagagccatatttcagagaaagcccctggtgactacctgcttttttttccttaattgttgccaatgatagccagttactaagcccagcaatgtaggtaaacattgaaacctaaaccctttttactatgcctgtcttatttgctcttgagagaactaatgaaaacttaaattgacagcctctctcttcaattcacatgttttatagttaaggaaggacattctttctaaaatattaacatagggatcaacaaatgatctcattctacaatttattgttagggtacttcagctaaagtatcttaatctgttaaaactctttaaggactttacagagtagtgaaactttgacataccagttgggaaatgctgcagtatagatacaggagtaatagaatgaacttcatttcccccaccaatacccctcccttgcaatataaaactacccttaaaaatctttctgagtttatgatttggattatgaaaataggatgtctttaaaaattttttccctctgaaccacacatattttatgaattctttatggaacttagcatagatgttcatattcataacagcttttgtgataggcactataaaaattcagaactgggttgaggctttctgtttgattcacacatttgttttgtaatcactccataatacctccctttcctgtttttatgaactatatttcaacaaataaactgttgacacctggcccttttactatttccctgttttatttacttttgtgaggtccttacaccaatatctaaagcttgaaagaaacaaactatgtaccagcaatgttggctttatctgaactgaagtcttgtacttcacttgcacatttaatatgtgtaatggttttttaaatgaaatcattctaggtacagtgattgtacagccagagccagtgctgaatgaagacaaagatgattttaaagggcctgaatttagaagcagaagtaaaatgaaaactgaaaatctcaaaaaacgcggaggtaaatacaagtgaaaatgaaacatgaatttaaattgctgtttatgaccatattggaaaatcggatgtgcttactaaaaatacctccacttttctgccttttgtttattaaaagcactacttaaatataacttctgtttctctctgagctctgaagcagaaaaggttaagcaccatttatcgaaacacctttgccttcagtggctattaagttatctcaagaagcgtagcatttccttcttccacatgttctataatacatatatgccataatactatgttttccccccaaccctaaaataattttagattcatgcaaaatcttgtctgtggcctacaggtaactttatatatatttagagttggatagagtgacgtacatctgcattagtattagttggggtattataaatgcaagtcccttgactccactcctcacaaattagaatttctgttgatgaggtcaagaatgtactccagtttgttcttgtgtacactgaagtttcaaatccactaatctaagaatggcaacatggacataagtaggaaggagtagggagctagagctgataaccctccctctgtcttccagaggcacctctccctttgtctgtctatcttcccttaaacacacaaacggtggggagtggtggctcacacctgtaataccagcactttaggaagccaaggcaggagaattacttgagtcctggagttcgagaccagcttgggcaatatggtgagaccccatatctacaaaaaataaaaatatcagctggacatagcggcgcatgcctgtagtcctagctattctggaggctgaggtgggaggatcacttgagcccaggtgatcgaggctgcagtgagccgtgattgcaccactgcactgcagcctggatgacagagtgagaccctgtctcaaaaaaattaaaacacacacacacacacacacacacacacacacacacacacacacactctaatattggctaaccatctataaaaagtttgcatcagaaggattcatttagaaataatagtggactatgtgtcccacttgtttgtgtgtgattcttaaatggtgcctatatatattttggggcagcttaataaagccagaattcataactataaaaggaatgaatctccaaatgatagaacatgacactaaatttctaagtagaagtgtagtgaaagcatatccatttaatattgatcagattatataattgtgaaattatagtgaagttcttatattggtgaaattttgtgtggatttttattttaatgctatgattatcttgctggaaccagtaaaatatatctatttttataacatattttatatattcattttccgattaaataatttgtaaggttgttggcaaaaataaaggaaatattatatagtcttttgtccacaaaggggtagtcaactccttttgagcataaggaatctttctgagaatctagttcatggtagggaaactgccattgcagcaacagagctcattaaagctaaggtagtagtcttaaaatttaagagaatcctcaattataaagtgatggtaaagatcagtagtaagagtttctttcctctgatcataggttctctagagaagacaaataactaagtgttctgcattgtgtacacttagtgtacagagtgtctaaatggtgttatttttgggaagggaccctgtagcagtcagtgtctgaaatgtggataagggctgaaagaataaaagaaccactgttgttgacgagggtattcctagtgccactttggtatgctgctgacatttggtctcagctgataagtttcaggaacattttattgaatgatctgtgtaggaatgttttggtatcacgcttaagggaatacatgcatttatagccatcagtagcacttaaatctttcacatctattttcatcttaatgatttgttacatttttaagctgtcagaaatcacacaggaaatttaacactaggtttactttatatacacatatatagataaattggtgatctgaaatactgaattggtgtagttaatatttaaactttttaagaaagctggttccaaattgaagcctaacttaggaaactgtcaagaatgtaaactttcttgtattacaagaaatgtaagacattacaagaatgtaagacaatatataaagtcttatattgatttggaataatattataacacaaagatacggttaaagttaacatttcaggagctgattttttaaaaaattttcagtatcataccctattttgacattctcttcccagtttaattgttagaaagtatattttacacctaacttttttacatgacacaataattttgttctatttaaaaccattaaaatctattgagctcagaaatgaaaatgcctcttttccatttataccctgtgttacaattttaaatatatttcataattaaaaataaaaaatttaaacatgtatacagcaacaagtacataaagtaacatttcaacattttaccatatttgcttcagatctcacttaagtaaaatattggttcagtcctactctcatccatttccccttcttcccaccccacaggtaatgattatattgaagttttatgcatgtgcatgtgtgtgcatgtttttctatgttttttatatatgtattcataaaacatttttcatttaaaagtataacaaaataatatgctgtatatatcatttgggaacgtttttcatttaacattgtttttgaattgtattcatgtcagtaaatgtacatctagtttgtttatttttcactgctctatagaattatgttatatcaataagccactattcatttcccacataggaagttattcccaatttttcattttctaattttctaattagtgctgtggtgaatatccttatatttgattccttgtgcacatgtgggagaaaatctccaaagaattacctagttttgtttaattcttgagcgatgtatgcaccaaagcacatagaagatacttagtaagtattacttaacactggatgaacattcagattctacattttatttatcttgttagtttatctgaatgaaatcattgtttgaaatgaaaaagtatggtgtggtgtatttgtttctgttaaaacaaatacagaatatatgaatacccaagatcaaactggtgtttgtaaataatgtgattataatacattaggcttgtaatgcctgctattaggtaggttgagataggaggattgcttgaactcaggcgtttgaggctacagtgatttataattgtgccattgtactccagtctgggtgatggattgagaccccatctttaaaattaaaaaaataaataaataaaaatattagcaacataaatagtaaaccttcaagtttacttttctaaaaaagtatgatggtgttcttatacattaacgtttttagcttctggctaggtgtggtggctcacacctgtaatcccagcattttgggaggctgatgccagaagattgcttgagcccaggagttggagaccagcctgggcaacacagtgagacccagtctttaaaaagaattagctgggtgtagtggtgtatgcctatagtcccagctactcaggaggctgaggtaggaggattgcttgagcctgggaggtagaggctgcagtgagctgaatttgcaccattgcattccagcctaggtgacagagtgagactctagctcttaaaaatttttttaaagtttctacaaataaaaatattcatgataatatttgggtccatggcgctttggaccttaaacctaacagaaacccaaaagagaaaattaaaagggtgaaaaatatatgtgatgttttgttttttatttaaggatggagccaatttgttttttagttgtctcctttttatttgtgaatgtaagcattttgagtgacttctgaattataatctaccatcttattttgatcaaggtcttggttgcacatcaggatcatctttgaaactttaagaaaatgcctgagagattttaattcagtggtttaggggtgggaatggctgtttttaaaaagattcttcagatgactctaatgtttagctcagggtgtgaaacactgccttagcagaactagggacaagagggaggctggagaggtttctgtaggttttcttcagtctgtttatcaggagacagtacagaatgggactctgcctttttcccccagtcgttctgatgttttgctgccaaaatagatatacctgcaatgtcttgtttgtctttatttggaaatagtagacagtattgatatggagtggatagtggagtacacatagaaaaaaggcagtttaatgacaatttatgtatagtgttgaagtaaatattagcaaggaaattggtaatatcataaaattaccaagtttttacataccatattgataggatctgtgcagacaattccaatgagaataaaaacctttatggcatacttaagtgtaggattgcaaaagaatctgttccgtatatgttacttacttccccattctttaaggactgatactgaatttatttgcaaagcaataacaaaataagagctcttggcccctagttttagaactttttatgggttctcttaatgttatttcaagttgtaaaaaatggcatttgcatctgtaaaaggaaacaattaggatttgtaacttggaatttgccaaggttgtcatgtgcttagtaagtcgataaaatattaaccttttttacttgtgtccaatatgccatttttctaaggattatgaggtatttcatgtctaatacaaaagttacaaaatgctgactaaagtaagtatctttttctgtgtataaatgtgtgaataatagccactcctttctcctagaagatgggcttcatgggattgtgagctgcactgcttgtggacaacaggtcaatcattttcaaaaagattccatttatagacacccttcattgcaagttcttatttgtaaggtatgtaatgatctgttgatatttcataccgtaaatatttgaatgcttaccatataccaggcctttgagggcacagtcttgaagaaagatgaaaatggtatctgcccttggaagacttctactatagtggggaaaatagacgtacaaagcctaagtgtcatgataggggagatactgtgattatgggagcacaccggaagcctgtgtaaataggatttggatggctttctagtggaaagctgtatgtgaaatatgaataagaatcagcctggtaagtgagattggttcatcatgttctgggaagaggcaacatagtattcagatactggtagttgagggagagcttggtgtgtttgaaaatctcaagagtggatgtgtgtaatgtttgtgttttataatctttccccttatatatcctacttccccaaatgtaaactatctatgtggagcagggttttgacataacttggagatgatagaattaaaaatgttttttatgtgttgattataattttaacagtctgtgccacttttttgttagtaataccttggagttaattttaaatatctataaatgtgggcctggcatggtggctcatgcttgtaatcctagcactttgggatgctgaggcaggtggatctcctgaggtcaggagttcgagaccagcctggctaacatggtgaaaccccgtgtctactaaaaatacaaaaaattagccgggcatggtggcgggtccctgtaatcccagctacttgggagactgaggcaggagaatcgcttgaacccgggaggtggaggttgcagcgagtcgagatcgcgccattgtactccagcctggacaacaagagggaaatttcgtctcagtaactacctacctacctataaatgtcaaggttatggttttcttaactcatattcctgctaagattaatcctatgttagtttgtttcccaataaaaagctgcctttgaaatgcagtggcaggccatgttttccttggaattctagctctagatcttttcttgcatgaatttttgatagattcagacatgcttaaatgaactgtactttgttctttagcaatttgtatccctcctttccttgaattcagttcagccaggggcctatctagggtatgtattagagagtttcattttaaattgtgacagtagaatctaatattgctggatttgtgacatgtatttgcctttctgttttcttatctatgtgattgtcttttttcaagaaccagtctgttgagcctaggccatttcactaatcggtagtttgtatcagtgagcaccttttccctttctgcagtcccactggaaagactttgaagtcagtcaaacttggatttgaataacagctttgcctcttactagttgtatgactttagatttatttacatattaatgaaagttagccttttctctcataatatgtcctaccttgcatggtaggtatttggtatttaaagataatatagattaattgtttagctgtatacatagtagctgtttgtatatggtggctattaaaattgttaagtacccaaatctaatacatttttatgtagagctttagtagctagatgtatgagaccagaaattagctttactaaaatcttttgtaaacttttttttttttttttttttttttttgagacggagtcttgctctgtcgcccaggctggagtacagtggcgcgatcttggctcacgacaacgtccacctcctgggtcaagtgattctcctgcctcagcctctcgagtagctgggattacaggtgtccactaccacacctggctaatttttgtatttttagtagagacggggttttaccctgttggccaggctggtcttgaactcctgacctcaagtgatccacccatctcagcctcccaaagtgctgggattacaggcatgagccaccaaacacccagccaaaaatcttttatacacttttaaataaggaatagtggtacttgagtgtatggaaatctgtttcaaggcattaattcttgagatagttagatgtctggaaaatacagacattgggtagtgggtagcagtgtttattttatttatttatttatttttgaggcggagtgtcactctgttgcccaggctggagtgcaatggcgtgatcttggctcactgcaacctccgcctcagggttcaagtgagtctcctgcctcaacctttagaatagctgggattacaggcgcttgccaccacgcccggctaatttttgtatttttagtagagactgggtttcgccatgttggccaggctggtcttgaactcctgacctcaggtgatccaccctcctcgtcctcccagagtgctgggattataggcatgagccactgtacccggctgcagtagtgcagtgtttttgctttgagtctctgaaacatgcacacatactcccttttttaaaaaaaaattgtttgtatttttaaaatttttgtgggttcatggtaggtgtatatatttatggcatacatgagatgttttaatactggcgtgcaatgtaaaataagcacattgtggaaaatggggtatccatcccctcaagcatttatcctttgagttacaagcaatctaattacattctttaagttatttaaaaatgtacaattaagttgctattgactgtagtcaccctattgtgctattaaatagtaggtcttattctttgtatttttttgtactcattaaccatccccacctcctccctatcccctcactacctttcccagcttcttgtaactgtccttcatgacatccttcattagttcatccatgagttcaattgttttgatttttagatcccacttataagtgacaacatgcagtgtttgtctttctgtgcctggcttatttcacttaacataatgatctccagttccttccatgttgttgcaaatgacaggatctcattcttttttatggctgaatagtactccattgtgtatatgtaccgcattttatttatttacttatctgttgatgggcacttaggttgcttccaaatctttgctattgtaaacagtggcccaacaatcataggagtgccagtatctctttgatatactcatttcctttcttttgtgtatatactcagcaggtggattgctggatcatacggtatctcaatttttagtttttttgaggaatctcccaactgttttctatagtgattgtactcatttacattcctaccaacagtatacaagggttcccttttctccacatccttgccagcatttgttattgcctgtcttttggatataagccattttaactggggtgagatgatatcttattatagttttgattaacatttctctgataatcaatgatggtgagcagcttttcatatgcctgtttgtcatttgtatgtcttctttggagaaatgtccagtctaatcttttgcccattttttgattggattatttgattttttcctatagaattgttggagctctttatatattgtggttattaatccattgtcagatgggcactttgcaaaatgttctcccattctgtgggttgtcttttcattttgttgattgtatcctttgctgtgcagaagctttttaacttgatgtgatctcatttgccaatttttgctttggttgcctgagcttgtgtaatatgctcaataaatctttgcccacaccagtgtcctggagattttccccagtgtttttaattacttaaaaaaataaagtttttgtcctttatgaatgttatcaatttcgaattaaatttccccttcctcttttcttttaatagaattgctttaagtattacatgagtgatgatattagccgtgactcagatggaatggatgaacaatgtaggtaggtaatatagatgagctaacattcagtgtttcctacttttgggaggaattgttacataatcatttatgaggtttgtctttcatagtatcgtcattgatgtctttaatgaaaggttgttcttttccataaaaccctggatttatgtctagtttaagtttctaataaagagtaagcagatgacctaaattaccactaaaattactggcagtaaaatttaaattgcattataacaaagagattaaaatgagttttgttgggaataatgtttatttttatttttttacatatcttttcagtttcctgaaagaagggaataatgttttaatctttaaaacatttcaggtggtgtgcggaaggtggaaacttgatttgttgtgacttttgccataatgctttctgcaagaaatgcattctacgcaaccttggtcgaaaggagttgtccacaataatggatgaaaacaaccaatggtattgctacatttgtcacccagagcctttgttggacttggtcactgcatgtaacagcgtatttgagaatttagaacagttgttgcagcaaaataagaagaagataaaagttgacagtgaaaagagtaataaagtatatgaacatacatccagattttctccaaagaagactagttcaaattgtaatggagaagaaaagaaattagatgattcctgttctggctctgtaacctactcttattccgcactaattgtgcccaaagagatgattaagaaggcaaaaaaactgattgagaccacagccaacatgaactccagttatgttaaatttttaaagcaggcaacagataattcagaaatcagttctgctacaaaattacgtcagcttaaggcttttaagtctgtgttggctgatattaagaaggctcatcttgcattggaagaagacttaaattccgagtttcgagcgatggatgctgtaaacaaagagaaaaataccaaagagcataaagtcatagatgctaagtttgaaacaaaagcacgaaaaggagaaaaaccttgtgctttggaaaagaaggatatttcaaagtcagaagctaaactttcaagaaaacaggtagatagtgagcacatgcatcagaatgttccaacagaggaacaaagaacaaataaaagtaccggtggtgaacataagaaatctgatagaaaagaagaacctcaatatgaacctgccaacacttctgaagatttagacatggatattgtgtctgttccttcctcagttccagaagacatttttgagaatcttgagactgctatggaagttcagagttcagttgatcatcaaggggatggcagcagtggaactgaacaagaagtggagagttcatctgtaaaattaaatatttcttcaaaagacaacagaggaggtattaaatcaaaaactacagctaaagtaacaaaagaattatatgttaaactcactcctgtttccctttctaattccccaattaaaggtgctgattgtcaggaagttccacaagataaagatggctataaaagttgtggtctgaaccccaagttagagaaatgtggacttggacaggaaaacagtgataatgagcatttggttgaaaatgaagtttcattacttttagaggaatctgatcttcgaagatccccacgtgtaaagactacacccttgaggcgaccgacagaaactaaccctgtaacatctaattcagatgaagaatgtaatgaaacagttaaggagaaacaaaaactatcagttccagtgagaaaaaaggataagcgtaattcttctgacagtgctatagataatcctaagcctaataaattgccaaaatctaagcaatcagagactgtggatcaaaattcagattctgatgaaatgctagcaatcctcaaagaggtgagcaggatgagtcacagttcttcttcagatactgatattaatgaaattcatacaaaccataagactttgtatgatttaaagactcaggcggggaaagatgataaaggaaaaaggaaacgaaaaagttctacatctggctcagattttgatactaaaaagggcaaatcagctaagagctctataatttctaaaaagaaacgacaaacccagtctgagtcttctaattatgactcagaattagaaaaagagataaagagcatgagtaaaattggtgctgccagaaccaccaaaaaaagaattccaaatacaaaagattttgactcttctgaagatgagaaacacagcaaaaaaggaatggataatcaagggcacaaaaatttgaagacctcacaagaaggatcatctgatgatgctgaaagaaaacaagagagagagactttctcttcagcagaaggcacagttgataaagacacgaccatcatggaattaagagatcgacttcctaagaagcagcaagcaagtgcttccactgatggtgtcgataagctttctgggaaagaggagagttttacttctttggaagttagaaaagttgctgaaactaaagaaaagagcaagcatctcaaaaccaaaacatgtaaaaaagtacaggatggcttatctgatattgcagagaaattcctaaagaaagaccagagcgatgaaacttctgaagatgataaaaagcagagcaaaaagggaactgaagaaaaaaagaaaccttcagactttaagaaaaaagtaattaaaatggaacaacagtatgaatcttcatctgatggcactgaaaagttacctgagcgagaagaaatttgtcattttcctaagggcataaaacaaattaagaatggaacaactgatggagaaaagaaaagtaaaaaaataagagataaaacttctaaaaagaaggatgaattatctgattatgctgagaagtcaacagggaaaggagatagttgtgactcttcagaggataaaaagagtaagaatggagcatatggtagagagaagaaaaggtgcaagttgcttggaaagagttcaaggaagagacaagattgttcatcatctgatactgagaaatattccatgaaagaagatggttgtaactcttctgataagagactgaaaagaatagaattgagggaaagaagaaatttaagttcaaagagaaatactaaggaaatacaaagtggctcatcatcatctgatgctgaggaaagttctgaagataataaaaagaagaagcaaagaacttcatctaaaaagaaggcagtcattgtcaaggagaaaaagagaaactccctaagaacaagcactaaaaggaagcaagctgacattacatcctcatcttcttctgatatagaagatgatgatcagaattctataggtgagggaagcagcgatgaacagaaaattaagcctgtgactgaaaatttagtgctgtcttcacatactggattttgccaatcttcaggtatgcaaaaataaataaaaaattcataatttgtacttccccctcttgagttactacattgtttaatttcctctgaagctaatcaaatttagggttactacttaggagaataccacttaaaaattatttaggagtttattaaaaaaagtttccctatttatttttatgctgccattggaagatattttgaacattgctagtattcagtatcagggatctcaaatttgttgagtaaatgacaaaatttctttatcaatgtttagtgcttttctctggagtaatgagcagaaggaaaagcggactggtgccagtggttcagtagctatttagttatataatggaagtgagtgcttggtactggtatgacatggtgtgtcaaaattttaactgccatgcatatggctttttaagtttgaacagataactttgtgtctcatgaaatcccctttaattatttttaatttacctcattaaaaccctttgttgatgcttattaactagtttctaatgacatgaacagatgtttttcttttaaaaacactgtcaaaatgaaggaagaaaatccaaacattagctggattagcctaccctgatgaggtagagtactaggaacattaaagtttgggtcagctggtgaatgaaaatatttttatgaattaattaaaatctttaaaatttatgaaaaataattttaaaaataagtttttattattgaagttattttaaaaatcagttgtataataaatgtgtattggtcatttgtctttttttttagtcagtaagacctgtcagttctatggatactcagaatttatttaaaaatgtttataaagtgggttttacataaaattgtatttccaacataggtagaatttaaaaatttttccttccagttcttatgttacagttttcaatttatcccaattggattttaatggaattaatttgaatcttggctattttttaaattttaatttttaattttgtagagatgaggtcttgctatgttacccaggctgatcttgaactcctggcatcaagcaatccttccacctcggccttccaaagtgttggaattacaggcatgagctactgtgcccagcaaaatcttgttttttaataaaactttacatttcttttatggagtacttatgacttgacttgaaaaccacatgtgatatgcagtgtgtgtgtttcaattgaatgctctgctatatcagatgactagatggagctctgtttgtgtggctattgtaacttcaagttcacagtttcttacctgaaattcttggggtctgttgtgtttcagaatttgcaactttttggtttttagaaaaataatagagagaagttactatatattttataaaagctccagtggggcctgatgcagcaccagataatcaaacacatagtatttctgcagcaaaacatttgaagattcacatttaaaggaataagcagtttagaccaggttttgctgccagattgtctttggtaccctcttacagaaactttccattttgagagtgttttagatttcaaaattatatataagggattgtggacttatattaaaaatacagaatctaatatttactttgatgtcaaatcaatgttttagttgttaggttagctgtgaaaatccttattaaggattagagtttaagaataataaattgtgtttaaaaattagttaaaatccattaaaaattatatgtcactgagctaattttatttctggttttatttatttggatcttctctctttttttcttagtctggctatttttaaactttggaaaattggtttctgtgattaaacagtttcactggtgaaatcagtatgtttgatttcaagtattttactacttttcttaagatctcacttgatttattgatacctatgaaagtttctgttatgcacctctcatgttgagaattattaatatttagtgtaataattaatatgaattcattaggccttaagaagggatggtgatatatggcaaatactcaattgatgcatctcttgataattacttatctcagcactgatctagatcactgtgttccattttgatttatttaactttgatctgaaggacaaataggctgatggggagtaaactttttctcaggtgtgtatcaagagaaactttgagaattcgtcacttcagcaaattccaatccttcaactgcttggtgaaataagccttgttgagattttctttaccctggatatttttgggggctaagctgattatttgggatgaaataagaaagaagataaatttgttagggaatttaacctgtgaaaaattgggccttgtcaatagaaacaagtagaatagaatatgagtgccttgaaaataagcgctgtaaaaagttctgtttttaaagataagtttgcgtgtgagccagtgttatgatattccttcagaatttacttacatgcttatgtaagcatgctgaatttatgtactcctctgtctaacttaattttaggtcacagttttagaaggttaaaagaaaaaccctgccccctattgagtttagaggattccagtttattcgcagtatttgggtatcatattacagctacagtattttcctagaaattggggcttggtaatggcatgaataaccaagatgaagaacatggtcctaggagattgcagtttaatgcaagacagacatagagaaatcattaaaaaaagtaacagaagaaagatataaaactagaatggggcctgtaatcccagcactttgggaggccaaggtgggtggattatctgaggtcagtagttcaaaaccagcctggccaacatggtgaaaccccatctctactaaaaatacaaaaaaattagccaggtgtagtggcgcacacctgtaatcccagctacttgggaggctgaggcaggagaatcgcttgaacccaggagatggagattgcagtgagccacgatcgcgccactgcacttgagcctgggcgacagagcgagactccgtctcaaaacagaaacagcaacaaacacaacaaactataatggggctacacaataaatggcaagtgaactacttaaatatttggggaaatatttagaagaatagttggcatttgaacttcaaaggataggtcaaattttgaaaggtgtagtaaagagggagtgacagtactgttactaattatatttcatttgaagattggtctgtttgaatgagatatttattgtgagtttgctgggatattatgaaatctcttctctctctctgtctgtctcttttttttttttttgagttgaagtctcactctgccacccaggctggagtgcagtggtgcaatctcggctcactgcaatccctgctcactgcaacctctgccttccgggttcaagcgattctcatgcctcaggctcctgggtagctgagattacaggtgcatgccaccacattggctaatttttgtattttcagtagagacagggtttctccatgttggccaggctggcctcgagctcctgacctcaagtgatccgcctgcctcagcctctcaaaatgctggcattacaagcttgagccaccacgcctggccttatttagtgtatttctatcctgagcctgtaggtgtctgtttcctttatagattttttcctccatttcccttcaacattttattgtgaaaaacatttaagtatacaccaaagcatctaccattaatattatactgtattttcttgataacatatctatatatccttctgtctatccatcagtatatcttttttttgcctttttagctttttattttgcataattataaatccacagaaatttgtaaaaaaaaaaaaaaatacagggaggtctcagataacctttacttagtttccctcaagggtaatatcttgtaactctagtacagtgtcaaaaccagaaaactgaagatttattcagatttcaccagtttcacatgcactcatttgtgtgtgtataagtatagttcagtgcagttgtaccacgtgtgtatctttgtataatcaccaccacaaccgatatatcaaaccagttccattatcacaaggctcccttgtgatactgctgtccttacctccattcctgacatctggcaactagtaatctgttctttatcactgtaattttgctattttgaaatggaatcatgaagtatataaccttttgagattggcttttttcacttagtataatacccttaaaatctttgatgcatttcagattaaacggtagacatcagcatacttctcctgaaacacttaagcatgcatagtattaacctacagtttaatatttcagtttttcttttgaagtaaaatttatatagaatgaaatgcccaaatcttaacctctttagattttttttttttttttgagagagttgttacccaggctggagtgccgtggtgcgatcttggcttactgaaacctccgcctcccaggttcaagtgattctcctgcctcagcctccctagtagctgggattacaggcacacaccaccatggctggttaatttttgtgtttttagtagagacgggattttgccatgttggccaggctggtctggaactcctgacctcaggtgatccgcttgccttggcttcccaaagtgctgggattacaggcgtgcgccacctcacccggccctctttagatttttaatcaaaatatagaaatgcagctttttataagaaaataagttttactgtactgaactgtatctctgggtaactcaggtcacaaataccatacacattcaactgcattttaaaattacttgctactaccaaaatattaatactgtttttgctattcctcgaagatacagcaccagttaacgtcaaaattaaaatggaccagtacgaaggttattgtggcaagaaacttatgctaatatgatggctgttgatacagaattgttactgagaagggtggactttaaaagccttgtgccctgggaaggaactctgaaatatataaggtccagctatttatcattttactgctggcacttcacaaataacctgttatgttttctataagaatgctttttactcatattttggagtccagagtttagaccccacttagtttgctttaaagtttttggctttcagttttattttacatggttttaattatatagcttatttaaagctaattttaagtacacttttttccctcaaggagatgaagccttatctaaatcagtgcctgtcacagtggatgatgatgatgacgacaatgatcctgagaataggtatgattccatctgtaaggactttaaaaagattataacacaccctaggcatgggcacaaacagcagcaacggaacagcaagcaggttgtaaaaaccaggagtgcctgccttagaaagactcgctcacagtcttcctgcaagtttgaaagaaaggccagaaaatgggctaaaactcagaaaccttaagagaaagtaatatcattatttacacacctagcatagggtgtgttataaatacagaactgtcaattttatgttgctatgtaaactgcagtaatttttttggaataatttattttgacagattattgatgaaagtaaatcatatctcagtaaattggtaacaacagacatctcctctatatttgactattgttaattgccatccaatatggtggtcctatttattaaggcctgttgagaagaaacaaaaagagagattactcagatatttaagattaagaaattgctttcaaaataagtgtcagtttacaaggtatctagactgagttagagtttaaccagttttcaaataaaatagaaatacacggtatgagagcatttactttaataagacttaataggtttaaatgtcaacagtgtagcctatacagatatacttaagtaaggggtggctgggtgaagaaaaaaaaagacactatcagtgtagtgaagaataaggaaaacaacagtattaaagactatagctataatgtttcaacataacttttaaacacttcctggacaatagcataccccatgctcataatcttcaacaagaagacagcatggtatagtgcatggaattttggaataatgggcataagggtatctgatttctaacatttttaacaactgtctgtgtcatcatgggcaagtgactttactttttgtcaaaaatttactatatttaagaagaaaaagttgggcgaaattttctgtaattctagtaccaaaaaatccatgatagatttgagatgatttcattaaagagcactacattaaccattcatttattcctaatagtaagttctaacattaagaaaacataaaaatatacatgtaattttctgtcataattttgtaagaaattaactgacttagtaaatgccctgggttcagctgttagtttcgctcttttgtatcttgctgatgctgttaggtttctctgtttcaaaggtcagcattctgctaattaacagaagaatgtttttattaaggtgaatgaacagttttattttacagttttgaatagagcttaattgtggacacaaatattcagattctgcttgcctacttttttaaattaaaaaatgtatatccatttattttatgggataggtggtaggttccagaatggagtgataagggcatacaatttattcatcagggattttacattatatcatcacagccagatactgaaagcatttaaaattttactcttttttaagatgctttaatttttcttcatttatatttgctatttgattttctatacatcatgaggcctcagatgttactcaaaggctaataatgttttaaacattctatatcttaatttaactgtgaatgatttactttaatttcatatttaaccaccaaataagagtgttgttaaggtataatttttttgtgtgtgttagagcttgtcaaaatataaatatcattttcaacttttaagttacctgatcgtatctctctgtaactggcaagtattttattggaaagtatctttaattccaccttgaatttgtgattaaaaaatacaaccctgttgagtacttttgagaagaattgaattttatcttgagcatgtctttctatactcagtttaatttgtttttataaaatatacaatttattaacttgtttaatattcactataccaaagaggtatctaatacccatgggttatgtagtcatgatggggatacaaatactttcttgcactattttagtatagattatatatttgagcatatttgaatatgcactaagcaacttaaaaaattcatttgcagatcacgattaagtcttagaattatttttctaacttcctaatttttgagtaggttgtattttggtagacagcatattgtaattgtatgtaaatttgtacacaattgtgtgtaaattgtgtataaatcttatatgctttgtctttttagcagtattgtaatacattttcagtgttggtgtttatgaagcgatagtgtattattgcaaatggttaactatttggatgcaataaatttttgtaaaccttttttcttgttcaagcatttaattttaataataatgttacttttttatatcatgagagttgacataatttgttattaaaatatagaggctagtttgtagccaaagaagttttgaaattttgaaatttaggacgtaaatacttttaattcccctaacatatatacttatatatatttgtgtgaaagttttacaacagatttaactactatttactttttctgttttaaagctatgatggcttttgggggcatttaaaaaacttagtcatatcctgaatattttagtaaatgtgaatacatttctgttttagcatgctattatgtagcgtcactcatatttgaaagtaaatgtataatattatgagacagtggtctaacctataaattaatttctatttaattggatttacttaatgaacaaggacagaatattatagattgatcaacacttgtatgtttctggtttagctttttataaaaaaaagtagactaatcatatattttgaattttatataactgaaaatttagagcttaggctttatgtagtttctcaatggcagaataataataccaaataggttgtcaggttttcacatttatacacgtaattttaaagtaatatacttgaaagtgccattagggtagggtttcattggcctttcaaatacctgttagttggattttaaattggttctttctctgaaaagacatctattcatataatttatttcaattcaataattagcctggcattgaaaatacaccataattcctttatatgttcaatataactggggatattttgaccaaacattttctaataatatcatatattttaatttaatatctgtactgggaatgagcctcaagtaatacgatagtagtgtgttcaagttttaacagtattagttttgaggatcattaaactaggcttgtctttagagattgcatactgaacaatcactgaagagaccatttatcccaaaaaagaattatcttttgaaatttctttattcgcttattttgcaggatgtgagaaatatttacaattgagcttttgagagcaaaagaccaaagtgctaggtttttctaaataagcattctttctccctgacaactttgactaagagctgagatttctacatggatgtctgctcccctaacaaacacatttactttattgttgaaatgtgcttaattgggtctagtaatactccacattttttctcataatttctctgtgggtgcgactaaatgctttttttttcatagaagcgaaatttgatgtggagattgctaaaaaaaattgtcccattgttatatttaattatattgggactagaccatagcattttaaatttccaactgttgttgtatcatttgatgataattttgtgtttcaaactagaaaatatgctaatgatttttttttttcctactggcttggtgtgggtatgctgttgatgacggctctgtattgttaatccagcatattttcggaggaaactaatgatttctggatgttatttatgcctaagaagatatttaatgattgtttacctgatttcagcacaattaatggcatggatgtatcacaagtcccttaatcgtttgatgttcactttgctttcattttaaacactttttcaaatgtctgtctcctacacatgttgtctattctctatgcaaatttgctaaatttggaataatttttttctgtgattttttttttgtggtagttctgtttcgttagcaaaactgctttgattctcctttattgtacttgaaaaacaaaggtggcgttttaaattaagtattttacttgtttttccatttgagtaagggttttaaatatctagcaattttacggtaatttttttttcaatttcctttgtctgtatagcacaggtaagtattgcaagtcatttaagtataacacaggtgtccagccagtagataggatctacttgtagatatctgaactggctgtagttgttactggctttcttttttctactagaattcccagtcaggaaagacatatgatgtgtagtggtgacctttgtccttctatggtcaagatttaaacattataaccagtgtttctttcttgttctctgttctttggtgatattgggactttcagaaaataagaaataggtcttcctcaaaaaagaaaaaaaagaaaaagagaaaaaggaagagtttggatttctagtgttaggaaaagtgattcatttttctgacttaatatcctttgtctttaactttgaaatttcaaaataaaattttgaaatttgagatgagtaaattctgtgttttcatttttcaagtataaaaatattgaactagttatttaatatgatcaaatttcccatattaatttgaatatattttttcttgttaaaatgcctctaaaactggtttagatttttgtataaaattagggaatacacatgtaataattcaggcctattgaaacataagtctgtatgaattattaataactgtgggttcttaatttcatagtttttattgttctacctccaagatttttttaaaaagtcatttgatattaattttcctggtaccctcaccaaaaaggatacagagctacttttcattaactacccacattgtaggatttgcgactaaaaaaaaatatttcaaaccattgtttagctttttgattatttggtgacttcattattatctcgtgaattccaccattttggggtacagatcattatgccttagttttatatatatatatatatatatatatatatttttttttttttttttttttgagacagagtctcactctgtcacccaggctggagtgcagaggcatgatctcggctcactgcagcctccacttccctgtttcaagcaattctcctgcctcagcctcctgagtagctgagattacaggcacccgccagcacacctggctaatttttgaatttttagtagagatgagatttcaccatgttggccaggctgctctcgaactcctgacctcaagtgatccacccgcctcagcctcccaaagtgctgggattacaggcatgagccaccgtgcctggccagtcatattttttaatagaaaacttaagatactaattttgaacctgagttgaaatatatactaatatgaattttgaagaattccatattccataactttttttttttttttgagacagagtctcgcgttgtcacccaggctggagtgcagtggcatgatctccgctcactgcaacctccgcctcctgggtacaggtgattcacttgcctcagcctcccaagtagctgggactacaggtgcctgccaccatgcccggctaatttttgtatttttagtagagatggggttttgcaatgttggccaggctggtctcaaactcctgacctcaggttatttgcctgccttggcctcccaaattgctgggattacaggcgtgagccatcgtgcccggccacatgttttgttttttaattcctatcctttaaatatatgacatttattaaaacaaagcctcacaccctactaaaatatttaacattccttggctatactcctttgaattattttatatatcaaactttaaaatatggtgtgatgctttagtactacatatacttaggtacctctaaagagcatgcatttaaacccattatcttatttataattctgtaaattaagtactctattatgatattgtacacaaaaaccaatttttaagcaaattttatcaccttgtttatggatgcccagtattttggccttctaaaaatatatttttttccagcaattttcttcaaacctgttctcagaacctcttaaaagataaaatggtcattgtagaatgtatctcagatgacctatcgtgcattttagagtgcatactggattaaatatgtttaaaactccttttatcatctttaaaaactcaagctggttgcagtggctcacacttgcaatcccaatgctttgggaggctgaggtgggaggatcacttgaggccaggagtttaagaccagcctgggcaacgtagtgataccttgtctctactaaaaagaaaaaattagccgggcatggtggtacatgcctgtagttccagctactcaggataccgaggcagaatgattgctttagcccgggagttcaaggttacaaggatatgtgtttgtgccactacattctagcctgggcaacagagcaagactgtctctaaaataaaattaaaaaaaaaattaaagcttgagttcttgcatttctaaatacataaatttaaaatatgcgaaatacacttatttttaaaaatgggggtcagcgcggtggctcatgcctgtaatcccagcactttgggaggctgaggtggatggatcacctgaggtcaggagtttgagaccatcctggtcaacatggtgaaagcctgtttctaataaaactacaacaattagctgggtgtggtggcacacacctgtagtcctacgtactcgggaggctgaggcaggagaattgcttgaacctgggaagcagaggttgcagtgagcctccctcactccaggttgagattgtgctactgcacttcagcctgggtgacagaacaagactttgtctggaaaaaaaaaaaaaaggcatcatctgtatttgcccaggcactcattagcatacaagtattaacaagtagagggtatagtgctggcacagtaaaattaatagcagattgggatttaggatcttaggttctactcctgactttgccactagttagctttgtttctttggctgagtcatttcctatatctaagcctgtttcctcatctgtagaatgacaaagctgtactctgaggtttgtccttctggctctaacattttgtattgcttttgttaatggctcgaaagctccctggtgcaggaggtccttctcttgattgcattttaagaaactcaacatttcgaattattgatttacctatcagcaagaggtggtttactttcctttcctgtttgagcgtttaaacaagcgacattactcatttcctttctagataggattggagttaataaaggctttcttggctttctcctatgtttttttttttttttccccgattgcttgtttgtcattgtgttgttgggctcacttcttattattttatttgtgctttcttttagtaatggtgttatcttggtgttcattatgtactttggaagacttagtatatgtgggttttggggtcctatttattttctcatgcgccagttccgatcattgtttgtttgtgggtttttacccttcctcccatattgttttgctttctccccctctcccttccctccctttcaggaaaatggaggagtggctccattacttctggctctgcccaggttttctgccacaagagtggcacggcctgtgcctctaatgcttctgatagagtcgtgactgctttggatgctacacctgccccaagatgtaatattgagcattgagattccaggggcagtacatcgtcctggaaagcctcaagaaaggaaacttcagagcaaacagaatcaactagggatcatgactatacatccagcatgatccagcatgggtccagccgaggcctccaaaatgatgctttgccagcctcagctggttctcaagtgatgatatccttgaagtctctgtggcccgtgactccagagttaaggtagtggagtttccctttaaagcatctcacagcaggctttgtagatgggacacatctcacttcaacatgcttgctggctactcaggttgaaggtcagcctcagcccttaggtccgttaaattaagttctaattttgaaatgtaggttattatgttataggctaggtttatggtagactgggtctttgacatattggacttcagtaataacttatgcaaaatgattcaacttattctttttagggcttaatttacatagctataaattaggttttcctttggacaaaaggtgttagagggcaaaaataaaacctttagccaggtagtctccatcactctgtatataatttgtgatttggagaaaaatgacctgaagtttgtaattttttggcttctgaatgtactatgattgttctatatgttatgatcttactgaaagttgtcgctaagttgtacttctacagtatgtggatctgatttcactttatatgatttattaataggtatacaattgtattttatctcatgtacatcatatttcttagtctaatgacaatccagaacttgagaatgcattaagtaggtttatgtattgtgactttccgttttttagtagacatattctttggagactgggatttgaaagaagaaaaattgtgtgatttcctacaattaacaaccaaatctttatagttaataggaattttttaaagactttttttgaacttgtaaacacaaactgaaatcaggttgttgaactaggctttcaagtaactagattaggaattgtatttttgttggctgtttagtgttcaacccaaatgatggtatgagatcttgtacttgcaagtaaactgtgtttttccatttctaatccagtattcaatgcttcacatattttatacacacacacacacacacacacacacacacacacacacacacacacatatttattcgtcccaaaattcattattcagattagtttgaggaagtttttctggtccatgagaaatgacagtgtagtattactaaagatggttttaatatataccaacagaaaaaaaaagtgctgtgccagacatagaaatttgctgctaacattttattttagtatcttctagtcttttttagggacatacaaattttagaagttttttttttttaaatagaactatattgtggtttataaattactttttcactgaatattaataaatattttctatcttaatcttatttagaatatcattttaatttctatctcttatggataatcatgtgaaaatactatttaatcagtttctgatattgaatgtttaaacgttttctcaccctttgctattgcagacaacattataataaacatacatgaattttttttttcttttgagacagagttttgttgctcaggttggagtgcaatggcatgatctcagctcactgcaacctccgcctcccgggttcaagcaattctcctgcctcagcctcctgagtagctgggattacaggcatgcgccaccacacccagctaattttcgtacttttagtagagacagggtttcgccatgttggccaggctagtctcgtacacctgacctcaggtgatctgcctgcctctgctttccaaagtgcagggattacaggcatgagccaccacacctggctgaaattttttttaaaaagatgattttagagaatttttccagaaagatgtatatcttcaatttaaagggtttccctttattctgaaactgtttcctaatttggggagggtatgttgtaaatagtctttattttataaatgatgaaagtaaatggaatttgggtttaaatttctttttttggcaaaatgaaaagttggcaaccctgtatttgtcccattttaagaaagcttacagtgtgcaaaccattgatctagaaatgtaagagcaaaactttatagctcaactttagtaagatttaaattggtgtgatctaatcttcactttattgaaatacaaatcagggcagaaatcctcagaaaagcaaacccatctgtggcttcctttagcaattgatgattctgtgtgttgtctaaatattcctgatccatctgtttgagggagaaagcaccaaaaggcatataataaacatttatggaagtgattgcctattttgcttcagtctatttagatgcctttgctatgcatctttgaatatgaatagtaatgaacaatctgtcaaataaaatttaggaggcagctaacatgcattaatatctcctgccattgaatgaattcttcattgaaatgtgggtgcgtgctaagaagtgtaaagaggggtttcaaatccagaaataacaaatgttccatcatctcagctacaagtttttgacttagagagtcagtcttgattgcagagaacatgtttatcccatacagattagctcatggcagactgtcaggatcatgccatcttctttttgaacttttctataagctattttcttgttaccgtgatttgtgaatttatattgaaaggatacccagacttatcaaaacatcttgtcttgcacaaaagctgtatgattgctttaatcttacattttcagttatttttcttgagtataaacatggagatttcctaggaatatattttattttaacatatgatggtaggagtaaaagtagtgttttcttatgcttttagtaattgatttttccattagcaaattggtctttgaggagcatcttgagaaattttgttgtgagtgaagcaactgcactattttttttaaagtaacccatttatggtaattcgtgttctttttaccatgtatgtaattaatagcactcatgtcccttctttcccctgtcttgaatattattagagattatttattgctgtaatacttaacatttgtgtatgctttcatctggttcacagcatttatgtagtacattgaaattaaggtccaaaactatcatcctctagtttgaagcaaggtgtcattatatagtggtttattacacattggttttccaagaatatattttgctgttgaataaaacctctcgtggagttttatcttggaatgccatttatctgaacaagttcatttactgttgttgacctgtctgactttgtagttgtaggatggtgtcagcaaagcaaatagaggattggaaggttatgcagcatcaaattgcaattggtaaaaatagtcaatagaatatgtccttcagagttttcaatatattgcagaattgtatagaattgagaaataataagtgtaaagaacatttttaaaagtttttgtttatagcttaggttaaaacatggttttgctagttgtttatttacaatataaaatctattggcacatttatttctattttgattcaaagaagtctgtttttatttttaatttggtgtatttcacccccagatatatagttctttttttattgttttttactctcaagaattgccaagaagatgcttttagaagaaattaaagccaatctttcctctgatgaggatggatcttcagatgatgagccagaagaagggaaaaaaagaactggaaaacaaaatgaagaaaacccaggagatgagggtgagctccccagagagaagtttataatgtcataatttgattccttgactaattcagtctttgaagaatatctgaccaagaaatatcttaatatggcccggcgtggtggctcacgcctataatctcaggactttgggaggccgaagcaggtggatcacttgaggttaagagtttgagaccagcctgaccaacatggtgaaaccctgtctctactaaaagtagctgggcgtgatagtgcgtgcctgtagtcccagctactcaggaggctgaggcaggagaatcacttgaacctgggaggcagaggttgcagtgagccgagatcacgctgctgcactccagcctgggtgacaaagcgagactccatctcaaaaagaagaagaagaagaagaagaaaaaaaatctcttaatacttgtatttagagttcatggaaatgtttaaaactttattaccatgacttctcttgaatatcttgtaataattatggaagttactctaattttgtcagttactgccaataaacagatgattttttttttttttttgagacagagttttgctcttgttgcccaggcaggggtgcaatagcgcaattttggctcactgcaacctctgcctcccgggttcaagcgattctcctgcctcagcctcccgagtagctggaattataggcatgcgccaccacaccctgctaattttgtatttttagtagagacggggtttctccatgttgatcaggctggtcttgaactcccgaactcaggtgatctgcccacctcggcctcccaaagagctgggattacaggtgtgagccactgcacccggccctaaacagatgattttcaaagcaaaatattttataccttacaaagggttctataaatatataggtgatatttagtcaatatttaataatagtaatatgtcaagtctgatgtgtgagattacctgataacaccaatgataccaaagtatgtgtctaactctgatttttttcataagttgcagtagttgtcaacaggcaaaatagatatacgaggcattttaaaggctgaagaaggttttattgatttatttccttcatttagaagcaaaaaatcaagtcaattctgaatcagattcagattctgaagaatctaagaagccaagatacagacataggcttttgcggcacaaattgactgtgagtgacggagaatctggagaagaaaaaaagacaaagcctaaagagcataaagaagtcaaaggcagaaacagaagaaagggtaagatgttttaattctgaatgtaaagaacatattggaccagacagtggcttatgcctgtaatcctagcactttgggaagctgaggtgggcagattgcttgagcccaggagtttaagaccagcctgggcaacatagggaaacctcatctttatgaaaaatagaagaaatagctgggtgtggtggtgtgcacctgtagtcccagctacttgggaggctgaggtgggaggatcacctgagccccggaggtcaaggctgtagtgagcagcgattgcaccactgcattgcagcctgggcgacagagtgagaccctgtctcaaaaacaaaagcaaaaacaaaaaaaatactggttttgtaaactaattatagtaatgaaatttaagtgtatggccaggcacggtggctcatacctgtaatcccagcactttgggaggccaagtcgggtggatcacaaggtcaggagattgagaccatcctggctaacacggtgaaaccccgtctctactaaaaatataagaaattagctgggtttggtggcacgcacctgtagtcccagctactctggaggctgaggcaggagaatcgcttgaacccaggaggcggaggttgcagcagtgagctgagattgcgccattgcagtccaacttgagcggcagagcgagactctttctccaagaaaaataaaaaaaaaaaaatttaagcatatctgctcaaacagttgaccacttatattaagcaaatgtcagtacactggcaacaagtatactatcacatgagattaaaattaataatttagagtgggaagataacccagaaactttagatgacacaaagaatatttttaacctttagattataaagagaaataaatatgatttaataaataaaacattatgtagaaagtataagattgcatacaactgcagaattagtgctttcctgtagaagggtagaaaatgaaattaatttgggtaaatttatgcaagcttatatgcagaacttgactggcatatagtcagagtagatttccatttcattaaaagcctgagtccttttgcattgagggcttacatgtttccagcagtatggtgggcattgaggatacaaaaatgaataaaaatgtatctcagtgattctgataggtaactaggtttggcagtcactggtttagtaagaattattgacctttgtattataaaaaaattatagcaccatgagggacattttgtgtaacgtaattatataatgtggcacaaagaagggcttctttagcttcttgaggggtaggagttaccccagagaaggcttcacaaagaaggcttttacccaacagattaaattcaaaatgtgggagcacgtagattgttgtgaagatttacaacacaagcagggaaaaaaattttaaaacctgtgtaaaatgttggcacatgatggatgggatacaattaatatagtataagctgctctatagataggagtagggaaaggaacaacaggggatgaagctgggcctgtaaaacagagaccagatactggagatctttgtaagcctgtgtttttcacactggagtactgggtggtataccaaggtgtacatctctttggtgtctctatttataatttgaggtttggggaaggtcattttatgttaaataatatatattgggtaattaaatgtgatatttgcctgcgaattttgggtaacaaaaagttcaaagaatttttttgttgttgctgtggtgggctttttgatgactaggggtaaattttgaagactgttgttagtacccaacccatggatggcagatgaactcttctttgccaactgggaataggaacgcatttttgcaagtgtttgggaaatataataggctctaaaggatgcagagccattgaaaagtttttttttttttttcaattactgtatttatttttgaactctggacctctggttatccacctacctcggcctcccaaagtgctgggattataggcgtgagccaccgtaccggccttatttttaaattttttgtataacagctatattgagatataactcacaaaccacacagttcaccatttacagtatacaatttagcagtttttagtataatcatagaggattaccaccactttaaaaaatgttttatttgaaatgtatgtacaaagaagtgcacattatcaataagtagacatcttgatgaaaacgtagggcacccagatcaaggaacaagatgttgattactaacacccaagaatcacaatctcagcatgaccacttttttccctattgaaagattttaatcaaagatatcatatgatcagattagttccttactattcagtgagaatgaaggcactgaatgtttggaaggtattgctgtagttgatgacaaatggggttgttggagaagaggaagattgacttgagtcttataggaggttgaattgttaggtcttcttaattggtatgaaagggaaaagtctacaatgagtgtcaggtttttagagttgtcatggtgtatgtacaatatcacagaaatagttgaggttattcagtggagttgtaatgttttacaaatggaaagctaaggacatagtcttggaatcctaaacatttatagggcttttgggcaagagttattcactaaagatgagggggagaagttcttgccacacacatatacaattaatatgtcatggacattttaatgttaataaataatagtacatcattttgtgactacttgtcttataaatttcttttttattattattatttttttatttttattatttatttatttatttattttgagtcggagtcttgctttgtcgcccaggccggagtgcagtggcgcgatctcggctcacactgcaagctctgcctcccgggttcatgccattctcctgcctcagcttccctagtagctgggactacaggcgcccaccaccatgcccggctaattttttatatttttagtagaaacagggtttcaccgtgttagccaggatggtctcgatctcctgacctcgtgatccacccgcctcggcctcccaaaagtgctgggattacaggcgtgagccactgcgcccagcttgtcttataaatttctttgcaatatggctgcaagctcttacagattctataaaggaactgtgtgatttagcatgttatatatcacaacatggattcctgtgcctcttcaacaaaaggggcaatattgattttgcttctgaagcttagttcaatatatagacccttttaatatatatgattacatttgagatttgctttattaaaacctgagttttctgtgatctgtgtttctacagcctgattctgtgggtaatttattacccaagtggttttgttgttgttgttttttgtttgtgtaggagagagtaaacttctaaaatctcatcatatttgtgtttctaatatggattgtgatcatagtggttgatatatagttgaagttgcatgattttctgagttttgtaaattctaatgttcctatattatttggaaatttgaattgagagatgggaaaaaatcagtagtgaatagtctgcttattaaatctagttgaattaaattgaaatgcattgaagaggtataagaacaaagtgcaacatgtgaactctaattttctcctaaattagaaaaatgttacaaaattattttagtgacaatttgaaattgtaaatattgccttcatattagatgatagtaatttttttttcagatgtgataatggtatttagttatgtagggcagtatccttatgcttaggggtaaagtgtcatccgcgcttaatatcacatggttcagtgtaagaaaagttgtgtctgcctgtgtgtgtgtgtgtgtgtgtgtgtgtgtgtgtgtgtgtgtgtagagagagaaagaaaaaaagcaaatgtggtaaactgctaacaataagtgaatttaggagaagggatacaagtgttcattcaataattctttcaaatttttggtagatttcaaaaattttaaaatgctgggtgaacaattaatactaggcttaaaattatacttaattacaggatttttttgtgtcagtgtgtgtgtttttggtattctcccagctttccagttgcttagctattctttttttttattattgtggtaaaatatatgtaacataaaatttaccattttacccatttttaagtgtatgattcagtgacattaagtacattcacatttttatacaaccataacttctgtctgtccctaaaacgtgtcgtcattccaaatggaatctctttaaccattaaacaataactctttgttcccctctcccccgacatttctttatagcatttatgttctcccatttatagcatttctgttagcatttatgttctctcattttttaaaaagctggaatagatctttgattctgatctcaggttatgatagatttttttaaaaaattattttgaaacaattcttgatttacagaaatgttacacaaatagtgcagagttctgtgtatctttcacctagcttccctgatttaataccctatcatagtaccatgatcaaaaccaggaaattaatattggtacaatactatcaactaagccgggggtttacaaactgcacctgtgggccaaatctgatcctctgcctgtttttataaataagcttttattgaaacacagccatattcattaatttactgttttcacatatgtacaatggcaaagttgagtagagatgagtagttgcaacagagaccatacggtccacaagtcaaaaatatttactatcaaactttttacataaaatgttttatgacctctgaagtaaactatagatcttattcagagattagttttcccactaatgttttctttctgctctatgattcaatccaggatctcacattgcatcgagttataatgtctccttaatctacttcagcctgtgacaattcctcagtctttactttgatgaccttgacacttgtggagtgttgattccttattttctcaactgttccttgatatatatttgtctaatgttttctcatgatcgaattgagattattatgcattttgacagaataccacagaagtgatgttgtgtcttcagtgcatgatatcaagaatagatgatgtcagtatgtctttttttttgagagaagacctcgctctgttgcccaggctggagtacagtggtgcgatcatggctcactgcagactcaacctcctgggctcaagtgatcctctcgtctcagcctcccaagtagctgggaccacaggtgtgtaccatcatgcctggctaatttttaaattttttttgtagagacagaatctccctatgttgcccaggctggtctcaaattcgtgggctcaagtgatcctctcaacttggcctcccaaagggctgggattacaggggtgagccaccatgcccagccgtcaatatgtcttattactctcacggttaacttttgttacttgcttaagttggtgtctgctggtatttttccactgtaaagaagaaaatattatttttctatctatatttagtattttgttgggagatactttgtgaccatgcatatatcctgtttcttatcatacttaagcccactaattttagtatgcatcttgggtgaagcagttagtactgtggtatttgcctagttgtaattttctatttatttcattacttccacatttagtaattgtaagggagatttgttttcccctatttatttattgcattatttatatcaatatgacttatagatttttattttaccagttataatcaaatagtatcatttattttattgctcaaattgttctagctttggttgttgggagctccttcaagttgaatcttgtgtcctttcaacatgtgcctgcccatgtttgaacactgctttgttttctggcactataagatgttgtaagcttatcttgtatttttttctgccctgcttcctctggccagaaagaggttttctcctggaattttatatgcttccattactgtgttaattgtgagaaaaagaaaattgaggattccacatgtagagcctgattttcctggtgttgtggctagaaatagggatttttcttcacagtcttgttgtcagtaccgtctgcatacctttggaatttagcctgccttctggtcaaaaccaggaaacaaagaaagaaaataaccatacgccctcacagctctctcccctccaccaattgtagaggggtcattattcaagttttgatttcagtctccaatctgcctattattgtttccctttccgagttcttcggttgtgtcatcattggtggagacaatctgtaatcttactccatcttggccagcctaccttgcttgttttgaatagccaaacttctttttcattaatttacctttggtaattacatatattttattgacaggtaatttattcttattctgtcaattcatatacaattgaatacttatattttaatgtacaaccacagttttataattacattagaaatacatctgaattttatgtatatcatgtaaagcattaactggtatattctatattatgtattatccattcacatatatacctctgatgttcttacaatgctctgttttaatgtcgagtcagtggtaaattaagtgaattaggtttctattgaaaaataattaataattttatgtattttttaaaattcaagtgagcagtgaagattcagaagattctgattttcaggaatcaggagttagtgaagaagttagtgaatccgaagatgaacagcggcccagaacaaggtattataattggtttttaaaaaattttaggaattaatctgaatgaccatgccttcaaatgatttatatggttactgttaccaataaagttaagttagtgtgatatataatattttgatttgaaactaattgttatacttaatagtttaaaaagaatctaagcatattttatgtgtagttgaattatgtattctaacctgggtagattttcagtctgcaaaaccactcgtgtctgcagtgttttattgttacgggggaaattgtaggataatagtaaagaggctttatagaaaaactgcctcagtctaactttgggcttttctactttctgtttgtataaataatctatgcttcagtttcctcatctgtaaagtgggggattacaatatacttgactgactattgtgggcattaaatgagacaatacgtgtacaaggtttataatagtacctacctggcaaatagtaagtgctcaatatataaattattggtctcagtagtactacagtaataatgatatgcttgttcttgtaacacgaacagtcactgatctagattacctgtaatttaaaatttggcttccttcttagtatggtatgttagataatactactactacaattttcttatttcccccagaataacataatctttctacagtttatcaaatgaacaatctgtgtgtgtttgtgtatgtatgtctacaaaggtgtctatctgcatttgtaagttttagaacattcgaggtttttttaggttaatacttaccaggttgtgcttagaatatagcaatatattatactttaagtcaatataaaatgaaaatgataagatatgatgagaggttttttttttttttaaaccaagatacaattcagcatgttatactgtggaatacagtggtcttcagaatatttgcaaagttgtgcaacaaacaccactctataatttctgaacatttccatcatccaagaaaacaaccctgtacttactagcagtcattttccattccccatgccctcgtactctaataaacactaaaatctactttctgtctctatggatttgcctgttctggatattttgcatgagttgattcatataatgtatatccttttatgaatggatttttttttcacttagcataatgttttcatggttcatccatgttgtagcctgtatcagtacttcattctttctttaatgattatttttaatagtggtaaaatgcacataacatttaccatcttaaccattttttttctttcatggtattactgggaatttttattttcatcttaacgatttttaagtgtatggcttagtagtgttaagtacattcactttttttgaaccaatctccaaaaccttttccccttgcaaaattgaaatgttactcattaaaccactctctttttcctcttccctgaagcccctggcaaccaccattctattttctgtctctatgaattttactactctaggaacctcatataagtggaatcatacagtatttgtcttttttgactggcttatttcacttagcatcatgtgctccagcttcatgtatgttgaggcatgtttcagaattttcttccttttaaagacttaatgttccattgtataccacgttttgtttatcaatttatttgttgatggacatttgatttgtaaccttttggctatcatgaataatgctgctttgaacatgggtgtagaaatatctcttcaagtccttgctttcatttcttttgggtatatacccagaaaaggaattgcatggtaattctatttttaattttttgacgaactgccataatgtttccatagcagctgcaccattttacatttccattaatagtgaacagggtttcactttctccacatccttactgacagtggttattttgtctggattaatgtagctttgtgtaccaatttctaagcccagaaatatttttctcaccaaaagttgttacttttttttttaaatctctgtgacctgttatgaagaaaacagtattcaaatttgtaatctgcttttttttagtgatgatgaatgttttttagtatgtctattggctgtttgtattttatactagaagaatagtcttaatgtccttttatgcatcttcttactcatataacaaacctcccctcaggatactgtaaaatgttgatcattggattaaaatgaagggttaggctgctgctggaatatccattttgaacctattgattttttttctgtttgtttttaggaatgcatacagaggtagaacagttttaaaatagtacataacttattgatggaagtttatcatgaaatattttattttgtgttttaaattttcgtcaggtctgcaaagaaagcagagttggaagaaaatcagcggagctataaacagaaaaagaaaaggcgacgtattaaggttcaagaagattcatccagtgaaaacaaggtaataatgacatttaccacatgcttgaattataaccagtacagtagactatggtaattatgctgttacctctctgttccattcattcattgtattgtactggcttatttacattttacacttgtggaaggattggttattgaatatatatatgtaaaagtattgatttgacattatcatttttttctattccttaatttctaatggaattttatttaagccattctaattcattattttacatttgtagtgatgtgagtgttctattttctgaagacaaaatactatcctgaatgatgactcatatatgaataaatttcttctcatagtgaaatcagccaatttgaatttttgtatttaagcaggcttacataaagtaaaaggtgtctgtaatatgtttgattctgtcaacacaatgctcttcagagggatatttgtcttttgaaaattaacttttaaaatattttaaaatgtacagttcagtggccttaattatattcacaagcagaaactcttcactcattaaacattaacaccatttccttctatcccccatcccctggtaacctctattttcatttatgtctccaagaatttgtgtattttaagtacctcatatatataagttgaatcatgcaatatttgtccttttgtgtctggcttatttcattgacataatattttctaggttcatccatgttttagcatatatcagaatttcattccctttttaaggtgaataatattccattgtaagtgtgtgccacattttgttagcccagtcatctgttgatggacatttgggttgtttctacctttcggctattttgaataatactgctatgaatatgggtgtttacatatctgagtccctgtttttaattattctaggtatatatggaaaaatggaattgctacatcatatagtagttgtatgtttaacttttggaaaactccacactgtttttctctggtatctgtaacatttgacgttcccgttagcaatgtaccaagattccaatttgtctgcatctttgccaacacttcctttgtttctttctttttttctttttttctttttttttttttttttaacaagaaacatcctaatgagtgggaagtggcatttctttgtggttttgttttgtattttcctaatgactggtgatattcaacatcttttcatatgcttatatcttcttttgagaaatgtttattctagttggtagcccatttttaattgagttgtttgttttttttaataggtgttgaagagttgttttttttttttgagacagagtctcgctctgtcgcccaggctggagtctgatggcacgatctcggctccctgcgagctccgcctcctgggttcacaccatcttcctgcctcagcctcctgagtagctgggactacaggcgcacactgccatgcccggctaattttttttttttgtatttttagtagagacggggtttcaccgtgttagccaggatggtctctatctcctgaccttgtgatccacccgcctcggcctcccaaagtgctgggattataggtgtgagccaccgtgcccggccgaagagttgtttttttttttttaatactactctattgctgaatataattctaaaggttttcagcatgttttcttccaccttttcctgctgtgttaattaatggaatatgaaatggataaattaaatgactttgtactgtttacctctaattgtttaaattctgtagagtaattctgaggaagaagaggaggaaaaagaagaggaggaggaagaggaggaggaggaggaagaggaggaggaagatgaaaatgatgattccaagtctcctggaaaaggcagaaagaaaattcggaagattcttaaagatgataaactgagaacagaaacacaaaatgctcttaaggaagaggaagagagacgaaaacgtattgctgagagggagcgtgagcgagaaaaattgagagaggtaactaatttctttcttcttctttttcttttgtagctacagggtcttgctctgttgcccaggctggcctcgaactcttgggctcaagtgatcctcctaccttggcctcctaaacttctgggattacaggcgtgagtcaacacacccagccttaatttatttctattaatgatttattttatttggtatatgacttcaatatatttcagcattttaagagtagaatgttgtaatctaccacagatttcttttttttagacggagtctggctctgttacccaggctggattgcagtggcatgatctcagctcactgcaacctttgcctcctgggttcatgtgattcttgtgcctcagcctcccaagtggccgggactacaggcatgcactaccacacccagctaatttttgtattttttagtagagttggggtttcaccatgttggccaggctggtcttgtgctcctgacctcaagtgatccacctgcctcagcctcccaaagtactgggattacatgtgtgagccaccttgcccagcctcaaccacaggatttctagttgcaattgatttttcctactgtcactatttcatgcaacttaaaatagtcattaagctttattaatttaattaagtgcatggaaagcattgagattcttgaatgatcaccaaaatggttatgttgtattttgggtagagaaatgtttcaaaattacttcttaaatccataaaagatttcagttttttaaatggactttatgttacaaaagttttcaaattcacaggtggagagaataatataataattctccctggatctattaactcagtttcagcagttactaacacaggacgagtcttgtttcatcttttttttttttttttttttttttttttttgagatggagtttcactcttgtcacccaggctggagtgcagtggcccaatctcggctcactgcaacctccacctcctgggttcaagtgattctcctgtctcagcctcctgagtatctgagattacaggtgcacgccaccatgcctggccgtttcatctattctttttccttcagattatttcagagcaaatctcagaaatcatattctgtttataaatagttgggaatgtattgttaaaagataatggtattttaaacattactgcagtgccattattaaactgaattctctcattgcctcacatagtagttttaaaaaatagttggtatgggcctggcgcggtggctcacgcctgtaatcccaacactttgggaggctgaggcgggtggatcacctgaggtcaggtgttggagaccagcctggccaacatggtgaaaccccgtctctactaaaaatacaaaaaaaattagccaggtatggtggtgcacgcctgtgatctcagcctcttgggaggctgagacaggagaattgcttgaacctgggaggcagagcttgcagtgagccagggttgcaccattgcactttagtctgggtgacaagagcaaaactctgtctcaaaaaaaaaaaatagttggtttgaatcagggtcttaacaagggccatctgcatattctgttgtatttggatgttacatctcttacctaattttaacctagtttctctttggttctttctttttctttacccattcttacagttcatttgcttaagaaaccagattatttttgtaaaattttctatattctgagttttgttatttgcatccctgtggtacagtttcactggcttctatatttcgtataaattggtaataagatctagagtcctgatcagatttagattcagttctctttttggtagaaatactcatgggcagtaatatgtacttccttttggatctcattaagaggtactttaaaactgcttgtccctttttttgtggtacagctcctctaactttgttccactttttcagaatctttttggatattctcagttctttgcatttccacatagtattacgttgttggtttttacaaaaatccctgtggaatttctgttggaattttgttgaatctttcttgtaatgtggccagaagacatcttaacagtgttttgtctcctgttacatgaatatagtgtacttctctatttatttaccttctctttaatttctcttaggaatgttttgtagttttctctgtacaggtctagtacatattttaaaaaatttatccccaagtaattcctgatttttgatgttacattgtattagtccattttcacgctgctaataaagacatacccaagactgggcaatttataaaagaaagagttttattggacttatagttccatgtggcttggggaggcctcacaatcatggtggaaggtaaaaggcacatttcacattgtggcagacgagaagaacttgtgcagggaaactcctctttttaaaactatagatcttgtgagacttattcactatcacaagaacagcacaggaaagacctgcccccgtgattcaattacctcccactgggtccgtcccacaacatgtgggaattcaagatgagatttgggtggggacacagccaagccatatcatatagtaaatgtagtttcacgtaatgttggcataatgaccttgtgtcctaagctctaaatttacttactcgttatagtagcttttttgataaattctttgtgactttcatgtatacgtttgtgttgtctgtaaagaaaaactattttgctaattccattccaatctgtcatttatttttttaaaattataaatggtgaatttcttcaaatgcttttcattgcatctgttggagtgacctagaaaatgtcttgtattccttgaataaaccttgcttagtcacgttatattactccttttatatattgtattgcatttgctgatccttccttccttccttcctcccttccttccttccttcctttctttctttctttttctttctttcaagatagggtcttgctctgtctctcaggctagagtgctatagtgtgatcatagctcactgcagcctcaaactcctgggctcaagcaatcctcttgcctcagctttccaagtagctgggacaacaggcatgtaccaccatacctggttaattttttattttagagattgggtctcattatgctacccaggctggtcttgaccccctggcctcaagtggtcctctcccatcagcctcccaaagtgctgtgactatagtagggagcctccacacctggcatattccatttctttaatacatgtagaactatttagatcttttctttttctttaggtctgttttggtaaatttcaaacttaaggaatttttccatttcatttaagtagtcaaattatttatgtaaatttgtttatagtctttcattatactttgtaggttctgtcatttattgtttctgttaggaatttgtgttttatcattttttccttgattaatctgtgcaaaaagttcacaattttactatctcaaaaaaaaaaaaaaacgcagctttggatttcattaattttttttctattgtttgacccttttctatttcattgattttcattcttctttttactgtgtttatccttctttggacttattttctgttctttttctagctacttaaggtggattttggatcttctttaacgtatgcatttttaaaggtataaaatttgccactgtgcatactgtttaaacactgcatcttacagattttggtattttgtgttcatttttactctgctctgaatcttttctaatttctgtgagccagaatatgatctgtcttggtggatgttcaatgtttatattctgctgttgttgggtgacatattctataaattttgatcagattatattgatggctgattatattcacatcttctgtagttttaatggtattctctccaatcagaggagtgttgatgtctccaactataattgttaattcatctctttctccttgtaggtctctcagattttgcttcatgtttgctggaagttgttttgttaggtacatatacatttaggattacatctttctggttaattccccctttaacaacatgtaatgtgactctgtattatctggtaattttctttcacctgaagtctgctgtatttgataataatggtaacgacatcatcatctttcttttccaacatcttaggaaaagtttcatttatacagccaggttgaaagtatttcattgatttcctgtaaacttacttcctagatttttttcattgtcatatttttcattttcatgtttcctttattacattcctatttatgtactaatctttatctatcagtacatctttttatgcatttcatagtaaattgcatacatcatttcatttatctcaaatgctttagcaggtgtatcattagctaaagttcaatatttatgtgttttcctttttatgtaaaaggaaatttacttaaaatgaaaggcaaaaatcttgtgtacatttgtttttgaataatatgtggtgtatattttctcattatttttttctagtaattttgttcccccacaattttatcgtgaaatttgtaaatatatggagagaattgtaaacatgaacacgaatgtacctaccatgtagcttcttcatttcttaacatgttgctgtatttgctttattacatatctgtcttatctatgcatccatcaaccattttattcgtccctgctctaatctgtattatttccttttattctctagctagggtttagtttgtgcttccttttctggttccttaaggtgtaaagttaggttcttgattgtgatctttcttcttttctactgtatgcctttatcgctgtaaatcctcttcttagtactgttttctctacgtcccatatgttttgtattttgtgttttaactttcatttgtctcaaagtgttttctaattttccttgtgatcttttacttgatcctttagttacttatttaatttccacatatttgtgttctttccagttgtcttctgttatggattttttgttgcattcccttgtgactggaaaagatacttcagtctctttatatttattaaggcttttttgtgcctgattatatggtctgtccttgagaatgtgcacttgagagaaaatgtatagtctaccattgttgagtggagtgttctttatatgtctgttaggtctattttttttttttttttaaagacacagtgtcttgctctgttgctcaggctggagtgcagtgacgtgatcatagctcactgtagcctcgaactcctgggctcaagtgatcctcctgcctccgccccttgagtagctgggaccataggtgcatgccaccaccccagctaatttttttaaactgttttacagaggcagggtcttacagtgttgcccaggttggtctccaactcctggcctcaagtgatcctcctgccttggcttcctaaagtggtggaattaaggcatgaaacactgtggccagctccaattggtttatagtgttattcgagtcctatatttccttaattatctttgtctacttgttttacgcttttattgatattgggctatttatgtctccaactgtttctctctttttttgttttagttttcccctactacactgatgtatatttctccttttagttctttcagtgctttcttcatatgtcttggtgctctgttgtttgttgtatttatgtttataattacattttttgagaacctggctttattatcaatacataatatcctatttgtctcttgtaacagtttctgacttaaagtctattttgtctgatgtctatatagtcatctcagctctcttttggttgttatttgcatggaatgtcttttactattctttcactttcagtttatttgtgtctttagatctaaagcgaaccttttttagataaccagtatttggatcattttttaaaaattattatgtccatctatgtctttttgatccaggagtttaatccatttacacttgaggtaagtagtgataaataaggatttacttctgccattttgtgttttcctttttcattttgttcattattttgttcattatttcctccattactgctttcttttgtgtttggttaattttttgcagtgacatattttgattcccatctcactttcatttttgtatattctatattttctttgtggttatcatggagattacatataacatcctaaagttatgagagtcttacttgaattgatgtgaacttaacttcagttgcatacaaaaattctactcttccacagctccattcccctgtatattatgtggtgactctgttacaattattgatatcacaaattacatttttatacatgtcgtgaatggtaacatatattcataattgtattttatgcttttgtcttttaaatcctaaagaaagtaaaaagtgaggttatgaaacaaaattttgtgatactaggttttatatttgcccctgtatgtatctcttctaggagatctttatttctttatatggctttgagttacttctagcatcctttcatttcaacccaaagacttccctgtaggaagcattttttatagggcaggtctagttttaacaaattcatttggcttaggagtgtcttaacttgttcctctattttgaaggataattttgctgggtatagaatcctcagctgatgcctggcacagtagctcacccctgtaatcccagcactttgggagaccgaggcgggaggatcacttgaggccaggagcttaagaccagactgggcaacatagtgagaccttgtctttacaaaaaattaaaaaattatctggatgtggtggcacacacttgtggtctaagctacttgagaggttggaggattgctttagccaggggttcgaggatacagtaagctatgattatgccattgtactatagcctggatgacagagtgagatgctgtgtctattttttaaaaaagaaaaaagaatcctcagctaactttttttttcattcatcactttgaaatatattgtcacactgccttctggcctctaaagtttttgatgagaaattaggtgatgatcttattgaagtttttttgtatgtgttgacttgcttctctcttgctgctttcaatattctctttgtctttggccttcgacagtttgtgtgtaatgtgttttgatctatacgtatttgagtttatcccagtttgagttcattcctgtatttgtagatttaagtctctctccttcaatttgggaagttttccacaattatttcatcaaataattgttgcttctttctttttcttttctccttctgtgactctcgtaatacataagatgttcttcatgatggtttccctcccatccctttttgtttcttcactttagtttttttttttccctttttgatcttcggacttgaggatttcagttaatatcttcatattcactgattcttctgcctgctcaaatctgctattcatcctcttttgattgggccatattttcctatttggctgtatctttgtgattttttttaatactttaagttctagggtacatgtgcacaatgtgcaggtttgttacataggtatacatgtgccatgttggtttgctgcacccatcaactcgtgtgattttttaaaattgcatattgtgtatttgactgttgtaacttggcaactctgcatatgaggttctctcccttttcaagggtttgctgggattttaaaatatatataaattgtagtagacctattgttttaagactcccccacattattttttcaaagagtgttcttgttgtgtgtcatcagtaaagtctctgtccctttcattcatgttcaactaatgttttgaaagatttttttgaacgtctgctgggtgtggtggctcacgcccataatcccagcactttgggaggccaaggcaggcggatcacctggattcaggagttcgagaccagcctagccaacatggtgaaatcctatttctactaaaaatacaaaaaatttagccagacatggtggcacgtgcctgcaatcccagctactcgggaggctgaggcacaagaattgcttgaacccgggaggcagaggttgcagtgagccaagattgcgccattgcattccagcctgggcgacagagcaagactccatctcaaaaaataaaagaaggctttttttttttaatgcctgctctctctgtttgtagattgattgtgctggtgcactcctttaatccataactaggcttccactaaacctaaagataagcctgaggggaaaacttaagattttaataaagatcttttctgagcatgtattttacctggacacacatatggctttctgaattatcctatatacctggttgcttttgagtgtcccaaatttaaaagtagctgcgtgtggtggctcatacctgtagtcccagcaactctggaggctgaggtaggaggatagcttgagcccagttgtgtgaggccagcctgggcaacattgtgagaccctgtttctacaaaaataaagactagttgggcgtggtggtgcacacctatagtcccagctacttgggcggttgaggtggctagatcggttgaggtggctagatcggttgaggtggctggatcaattcaacccaggagttcagtgctgcagtgagctataattacaccacagcactccagccttggtgacaaagcaagaccctgtatcttgaaaaaaaaaattccaaaagtgtcctatctctagctatttgggccttaggtggtgttttgggagtgttcccctgtaatgccttgccccaggcctgtagtcacgttgcagttgttttgtgtgtgtgtgtgtgtgtgtgttttaaagctgttcttgttgtccttctcaccagagctctgagttaggtgaagaaatgatgagagccttatgtcagtccttcaagtatccttcagacaggttagataaaatttacacaataatttgtaaataacatctgctttgctccctctggtttgtgggaggatactgggaaacagggtgctgctgctttgagactaaaaccttcaccttctggtaggtggtggggcaaggacaagtaaaaatgctgtaaaacgttcctattgtattgaaggtgactttttttctttttcgttattttagagacagggtcttgctatgttgcctgggttagcctcaaattcttgggttcaagcgattctcctgtctaggcctagttgtttgtactacaggcggtcaccaccatgcctggctaagatgttgttttcttgattgggtatttgcttggttgctgtaaacctttgactgtgttccagagctctgacaaagttggttcagaaagtttctacttgtttacaaaatagttctgtgtgggaactggagtttggagcttcctaatctattgttttgttgatatctacattttcccttcttttttttttttgttttttttttggagacagtcttactctgtcacccagcttggaatgatgcagtagcatgatcactgtagcctggaattcctgggctcaagcaattctcccacttcagccttctgagtagctagaagtacaggagcaagctaatctcttcatttttgaaagttgttttccctgggtatagaattctaaattgatactttaaaaaaatctctttaaagatgttacttctttgtgacattttgtttgttatctttctcctttttccttcatctttgctcctctgcatgtgccttttatttcttggaaagatagtcttaaaagatttttcagtattttaagattttctgttaatgtctggctttcggaaattgaagatttttattttctttgtttatcctgctctgggttccttgaacttgttggatctgtgagtttatagtttcatcaaatttttgttggtttgttttagagacagggtcttactctgttgcccatgctagagtgcagtggtacgataattggtcactgtaacctcaaactcctgggctcaagagatactcttgcctcagcttctggagtggctaggactagaggcatgccctattgctaatttttaaacttttcgtagaaacaaggtcttgctatgttgcccaagctggcctcaaacttgtgacctcaagtgatcctcacaccttggcctcccaaagatcttggattacaggtgtgagctaccatatccagcttccatcaaatttttggaaagttcacatcattattttttgaaataatttttttctgttctatttttctttgggacttatatattatgctctttaatattgttccataggtttcttattttcccccctctgtttcattttggatagtttttcttgctttgtcttcaattttgttgatcttttcttctgcactattatgatattaatccacttagtgaattacagtgtactataattttcatcactaggaattccatttagttttttgaaatatcttctatttttgttttcattgtgttcatgttttcagtgtttgggcattttttttttttttttttctgagatggaggctcgctctatcacccaggctggagtgcagtggtgcgatctctctgctcactggaacctccgcctcctgggttcaagcgattctcctgcctcagcctcctgagtagctgggactacaggcgtgtgccaccatgcccagctaattttttatatatttttagtagagacgaggtttcaccacgttgcccaggctggtctgaaactcctgagctcaagcgattcacctacctctgcctcccaaagtgctgggattacaggtgtgagccaccacacccggcctatttgggcatttttaatcagctgtctcactttacttgtctgcctatttcattatttctgttacttcttgtcccatttttgttgactcttttttcccctggttattcttcatattttttttcttcttgacaaacctagtaatgttttattaaaaagttcagtttaattttgaagcttttaaaaaagcctggttaatgcgtttcttcaatactctttaatttatgaattgctttgacccactgctaagatttggtctcttcgtggtctctactgaatgccctgggttataaacgaagaggctactgtgcctcctctgaaatcgaatgcctcccagcaccatgtgatcactgggagctgtttagctcacagcttcttggtcatgctctgcctggcctcacaaagtttcactcctcatgtgtgcattttaatgttcagctatgactcaaagtgaatcctgtcttgattttgagttctttttgtgtagctcttttttctttgtagttctgccccacaacttcagtcatctcagcctgacctttgtttcttcaacttgatatatctccagtgctctccttgggaatcccttttccctgatccttcaggcaccaattcaaggggaatataggggtcttgttggttttcctactctgagggatcagggtcccgtggtgtctttatttaatgactgaaaaaaatttttttcatatattttgcctacttttctacttgattacagcaggaaggtaaacctggttcctaataaaccatcatgactggaagcagaagtttggctcaaccttttaatattttggtcatatgattttttttcctttattttcccttcaattcagatatgggagatatttcatgtctgtatttatttttactacaccttaagtgattatttgtcctaagtttttctcctatttcattgctgtgtatttatcattttttaaaatttcagcttttagtttagatacggggtgggggggtacatgtacaggtttgttactaggtatattgtgtgatgctcaggtttgggatgtggatcccatcaccgtggtagtgaacatagtacccaatagttgttcagcctatgccctcttccttccctccccctccagtagttcatagtgtctattgttcccatgttgatgtccatgtgtgctcagtgtttagttcccacttgggagaacatgtggtatttggttttctgttcctatgtgaatttgcttagatttatagcctccagctgcctccaagttgctgtagaggacatgattttcttctttatggctgcatagtattccgtggtgtatatgtaccacattttgtttacctaatccaccattcatggtcacctaggctgattacatgtctttgctattgtgaatagcatggcaatgaacttatgagtacttgtgtcttttttggaagaattatttattttcctttgggtatatacccagtattattagttaaataaagtttccttatattatagcttgagtgcataaacacatctacttagtcactaataggcagatgatttctttttaacttatctcctcctacatttaggatgaagatacactaatcctcaatcctgaagacaacacttaataacaaaagtatcatcaagtcactgatgaacatatggttcagaaatcttaattaaagccttgtatattagttttttttattgtggcattaaaatgtaccacacacttaacctcttaagacaaacttatttgtctcacgggtcaggaagttgggaatagcttagtgagcgtggctctactgggttttctgcttagtttcccaccaagccgaaattaagatgttaactagagttttgctttcatctaagactttgtatccttttccaactcacttgttggtagaatttagttcctttcagttattacacttaggtccttagctactagagttctctctccacaacatggcagattgtttcatctttgagatcaatagaaaagcatttcagtcatttaaagggctcactttaattaggtcaggctcacctagaatatctcccttttgattaaatcagagtcagcttattagtgggccaattatgcgaatgatagcccaatcatatttacaggtctcaaccatactcagaaggtgaggggattatgcagggtgtttatatcagatgacggtaattctggggccattttaggattctgtgtaccacaccttgtaaacaggacaagacatttagggaattttccatttttatataatggctttaccccagtgatatgaagctactacatatccaggctaggacacagtaataatttagtgaatacttagcctatgccagatactttgcatacattgccttattcagtctccagaacaaccttgtggaaactattgataatcattcccagtttgcagattcagacacagaagctaagagggtttaggtagcttgatgaaatggaatttgggtctgaatggcctatgctatttttacttcaccacactgtttctcagcgttaatcttggtttgtatatcacaattttatgtaagtacaatatctattcagataatttactgcaaatctgtgacttatttgtagttttttggatgtgacaatgatcgtatggttttacaaagaggaagtgtccttttaaagagacatttacaaacattttatagatgacattgcatattttcttgtgttcgcttcaaaatgatttgtgggatctggggaactggacaatgggtaaaatgctgtcagtgaaacaaaactggccttaagttgataattttctttttcttttgagacggagtctcactctgtcgcccaggctagagtgcagtggcgcaatcacggctctccgcaacctccacctctcaggttcaagcgattctcctgcctcagcctcctgagtagctgggactataggcgcgcgccactgcgcttggctaattttgttgttgttattgtatttttagtagagatgggatttcaccatattgaccaggttggtctcaaactcctgacctcatgatccacccaccttggcctcccaaagtgctgggattacaggcatgagtgaccgtgcccggccttaagttgataatttttgaagctgagtgatgggtaataggatttattattctcttccatctacttttgtgtatgtttgaaaatttctatattgaacattaacaaattcatttgttaactagttttaattgtaaataagaaaaaagtgcctaaaattttatttcttcaccattgtaatttttgttttttaatttttttttaaagttttttttgtttgtttgtgttttttttttttttttttttgagatggagctttgctctttcacccaggctggaatgaagtggcacgatctcggctcattgcaacctccgctgccaggttcaatccattctcctgtctcggcctccagagtagctgggattacaggcgcccgccaccagcctggctaatttttgtatattttgtagagacagggtttcaccatgttggccaggctggtcttgaactcttgacctcaggcgatccatccccctcagcctaccaaagtgttaggattataggagtgagccaccgtgcccaactgcgtaatgtttttatgattttaaaatcacgagtttctatttttttttcatggaaccataaaactgtttatcacaagcatttattttactaaactagtattttgtaatgtttaagagcatggactcgggggatcaaccctctgggtaaatctcagtgtcatgatactcaatagtcgtatgaccttgtgcaggttactttacttctctgtccctcagttttttcatctgtcaaatggtaatacttgtacctatcttgcgtagttactgaatatactatgtaacggatagagattaggataagacagcaaaaaatatatgcacacacacacttgttacctgtgtgcatatattatatctacttaagttttattctaaataaggagcttgtgataattgtttccgttttgtaattagaaggtattatatgttcctatcatgatttttgagcctgtggttctgaaaccagtgtttctaaatatttttttcttttcacatcatgtatttacagtgtttttcagtggtagtcatgttgacatcctgagtcgcacagttcttgtttgggactgtcttcttcctcctccttccttcttcctccttcttctttcttcttcctcctccttcctcctccttccttcttcttcctcctccttcttcctccttcctcctccttccttcttcttccttcttcttttttcttcctcctccttcctccttcttccttctccttcctccttccttcttccttcttccttcttcttcttctttcttcttcttcctcctcctcctccctcctcctccctccttcctcctccttccacctccttcctccttcctgcttcctcctcctcctccttcttccttctccttcttcttccttctttcttctttttttttttttggcatagcaaccaacaacagggaacactgcttttttcacaactctgtgtaataaatgttgttgaaatatccagggtgagatctgttgagctaaattactgacattatcagagtgatttaaaattttttggagagttttgattttagaagacataaaaccctgggctctgtcctggctttattgaagcaaaatagtagtgtattagttctgagattgggtaatttataaagaaaagagttttcattgactcacggttttgcaggctgtgcaggaaatatagtggcttctgcttccggggaggcctcaggaagcttccaatcatggcagaaagcaaagggggagtgaggcacctcacatggtgggagcaggagcaagagagtgagggagaggtgctgcacagttttaaacaactggatcttgtgagaactcgctcactgtcacaagaatagcaccaaaggggatggtgttaaaccattcatgagaaatccaccttcatgatccagccacctcccaccaggccccacctccaacattggggattacaattaacatgagatttggtggggacacagatccaaatcataccaattggatttgtggtgtgggagtaaatgtgtctatattttggaaaatctcccttggtaagactgaccattgcttgaatgatttctttgagcttaactatcaacaactccttttcttgtaggtgatagaaattgaagatgcttcacccaccaagtgtccaataacaaccaagttggttttagatgaagatgaagaaaccaaagaacctttagtgcaggttcatagaaatatggttatcaaattgaaaccccatcaagtagatggtaagaaactattagatgattcaataatttttagttaaatttttaccaatatttgggtgtgaggcagctgcctcacatcctgctaagtcctggaggtaaattggtgagtggggtggggaatccacaattcccctgcctttatggagctcataaacaaatgaggaagaacaaaattgggtgatttcaaacacaatgagcgttataaaaagagaaagaagtgctacttacaaatgggtagatatagcaagtaggtttcacctaattagcaaagactggcctaagggcagctaggggttgggaagagctgtagctagctaaaagcctttttcagaaaatgctatttcagcatttttaggtatgttttctttattagagttgaatcagtaagtcagttttgagtgtttatgtgaattaatcataagggaggttctgtagttcctaccttttgagttgctagtcccctttcttgctcagtgtttactatcgaataaaggaaaagatgatgaaattatctcatgggtttttttttcctgattgactcaataaactcaaaggtatttttgataggaagccattctctttttggataaagttgctctctttttacaaaaattattattattattttttgagatggagtctcgctctgtcactcaggctggagtacagtggtgctataacagctcactgcaatctctgcctcctggcctcaagtgattctcccaactcagcctcctgagtatctgggactacaggtgcacaccaccaccacgcccagctaattttttgtattttagtagagacggggtttcaccatgttggccaggctggtctcgaactcctgacctcaagtgatctacccgcctcggccttccaaagtgcttggattacaggcgtgagccactgtgcccggccacgtttctcttttagagtattcttatgtttctttgaaccatctcagggaatacagaacatctactgtggatagcttagagaagatgaaggaaagtccccctgttctatgtttgtgttaacttgtttctgctttagtttggtgggaaaaaatcccatttagatgtaagaaattatttagctaagtgtttttttaatgctgtttcttagaagttttggttatgtttttgatgtgtttatgtaaaggaagtttttaacttggacctttaaatttaacttaatgaagctgttatttttaggtgttcagtttatgtgggattgctgctgtgagtctgtgaaaaaaacaaagaaatctccaggttcaggatgcattcttgcccactgtatgggccttggtaagactttacaggtaagagctgaagaatatgaaggtatcctgtttttgtggattcattaatatatattggattctattatgtttcaggcacagtcgtaggggctgaagataaagcagtgaacaagaataacaagatctgtctccaaggagcttatattctagtggaggagagagctgctaatcaaataagaaatatgtactttcagaaaatgaatgttaagggaggatattgagttaggaaaggcatcttttaggaggtaatgtttgagcagaggtcctaatgaagcgaggctgtggggtttcaggtatggccaacaacaactgcaaagattctaaggtagaaattaccttttttttttttttttttttttttacaacttttaacggtttatgatgttaaagtaatgacaaagtaaagtatcttttactattaaaattgctgcatttctaaatggcaggagttgtagcagagatgtaaaattggtgaatgtatttgtacttttaaaccataaagtaattatagatttaatgggtcagaacacattaaagtggaaaaatattatgtaacatgattctcttctaaatgagcgatggtattttttgaaagactatagggacattctgtggagacctaggacttagtattggtatgggatcattttatactattcacattgatcatagaatcatggagctttagagttggaagagcctgatacatcatctagttgaactttggcattttactatctctttccctgtgccttgcctggtttggaaattctggccgtttattgtttaagcaaaacaaagctataatattgtaagattgcttaatttattaaatttttttgtggatatttaaacgaaggtgacaatctgttttcttataggtggtaagttttcttcatacagttcttttgtgtgacaaactggatttcagcacggcgttagtggtttgtcctcttaatactgctttgaattggatgaatgaatttgagaagtggcaagagggattaaaagatgatgagaagcttgaggtaacttattttaaatgttttctattattaaaatagtcacatgaaattcatatagtaaactatttttaattttttttaatttttaatgttttttaaccagtgatgcatatttcagtgggaatatttaatattcacatgtttttagtagctacttaaaaaaatctttatttccccacaaaaggtttctgaattagcaactgtgaaacgtcctcaggagagaagctacatgctgcagaggtggcaagaagatggtggtgttatgatcataggctatgagatgtatagaaatcttgctcaaggaaggaatgtgaagagtcggaaacttaaagaaatatttaacaaagctttggttgatccaggtaaggtattaatagacagtgacataaagaagcaagttgaataaaaaatgtgtttatattttaacaaatagtaattgcacagctactaagtatctggtctttgttgtggttatccttcaggtttttgccttttagaaaattcttagtatttcaatagaataaaatcacccttaatgtcgccagctgttcagaatttatttgctgagtctgaaagtgtttagggttttaggggataccttgtaaacacttaaaaatgcatcaaatgcctgtgttgcaatcaaagattcttccagctatccaaatattaggtgataacaagagctctctccatatcctgaaaacagtttgtgtctttccaaacttcatgtcattagaagaattgctgcttgcttatctccttttaaggggccatcagtatgaaaggttaatattttcaatactgttgatccttatgtgatagtaatctgatgtgagagccagatgttgatatatttgccacttggaaaagcaacacgttgtactgtctgcaaaactaaaattattttttaatctacgattattaatttgtgcaactttttcttcatatgtttatcttgtcatatcatatttaagacactattgaggttttatttttgttgagaaagtctgggtaattgtcattgtcaaagtgatagtaatctttagaatccttggctttgcctcttttttaaagataatgaggtagttaatacatagcaaaataactgccatcacaaatctaaggcctaataataagtttatctctttcccacgattaaataggtgtttataaatcttgtggctggtttattgttgaaaaattataagctagtgtctagtatcattgtagcagattttttccacaagatttccttgaaactgtttaatacaacagtttcaggtgcttagtgtacttatttgttcatgaaaaaaatgaagaaaaaaaaaattaaagcttctaacatgaagggtaacatttgtcattgccatattttatcatttagtgacatttaaaaaaaatttttggccgggcatggtggtgcactcctgtagtcccagctactcaggaggctgaggcagaagaatcgctcaaacctgggagctggaggttccagtgagccaagattgtgccactgcactcccatctgggtgacagagcgagactccatctcaaaaataaaaaacaaaaaaacaaaaaaaaacttttcattttggaataattttctgtttacatgaaagttgaaaaggtagtgcagagagttcccatataccctacatctggttcctcaattgttaacatcttacattgccatggtagatttgtcaaaactaagaaattgacacattattattaataacttcaaactgcatttgtattgcaccagtttttctatccagggttctacattgtatttagctgtcatgtctctaacagtcttctggtctatgacggtttctcaatctttattttttcattatctcatcagtcttaaggaggaccgtccaggtagatatcctgtagagtgttctctgatctgaatttatagtttttcttgtgattagactgagattagactgaggttttgaaagaatataccagaggtgacataccctttttgtcacatcatatctcatatcgggggtacatgataagcacttgctgttactgatgatgttaactttcatcacttggctagggtagagtttgtcaggtttctctcctgtagagctgctacttttacctgtccctcatctgttcattggaatccagtcactcaatctagcccacctgaatgggaggatggtggaaattaagctgtatctcctatagtgggtaatatctacacataaaatttggatttttttaaagaaaaaattatcttttcttacccatttatttagcctttgatttatataattatatactcatctatttttagttcgtgcattggactataaaccattactgcattttttttttttttttgctcaaattgtttcactttgaccattgggagctttttttaaggtgaggtcctctaccctttgatatgtccctatccttttggctttgagcactttattactttctggcattacaggatgctccaggttcatgttatattgtcctggccccagaatcagccatttcttgaagacatcatggttccttttactgaaaattgacatttacaaatgtaaacacacccatataatttgcaaatatatccttccattctgtgagttgtctttttacttttttatatcatcttttcagtactaatctttaaaattttgattacatttaatttacctatttttttcttgtgttgcttttgcatttagtgcatatccaagtattcattgcttaatcgaaggtcatgaattttttcacctgtgttttcttattttatagttctagctcttgtatttatgtttatgatctattttcagtttatttttgtatatggcatgaggtgggagtccaacttcattttttgtattttgatatccagttgttctaacaccatttgttgaaaagactattctttcttcattgaagagtcttgacaccattgttgaaaatcaattgaccatagatgtatgtgtttatttctaggctctcaatattattgtattgatctatatgtctgtccttatgccagtgtgacattgttttaattactgtagctttgtggtaagttttgcaatcaggaagaagtcctacagctttatttttctgtctcaaagttgttttgctatttgaggttccttgaaatttcatttgaatttgatgattggcttttatatttcctcaaagaaactagctgggattctgttagatattgcattgaatctgtagattaatttgaggaatattgccatcttaacaatattaaatcttcccctccatgaacatctaatttctctccgtttatttaggtctttaatttcttttaataatgaaatttgatttaggtcctttaatttctttagtgtaaaagtcttggacttattttcttaaatttattcctaaatattttattctttttgagccttttggaaataaaattgttttaattttattttcagataattctttgttagtgtatagaaatacaacagatttttgtatactgattctgtatcctgcaacttagttgagtccatttataagttctaatagttgtatgtgtgcgctcacgcgtgtgtgtgcgcgcgcacgcacgcgatttagttttctattaagaaaatcatagtctatgagtagaaatagttttactttttcctttccaatatgaatatcttcaacttctttttcttgcctaattgcccttcttagaaatttccatacaatgtcgaacgtaagtggtcagagcagttggttgtcatgtttttgatctcagggaaagctttcagttctccaccattaagtatgacattagctgtggatttctaataggtgtcttttatcaggttgagtaagttctacattgggttatattttttgtttgttttgataattaaaaaaataaatacctagattacccttgttaaaacttaagaggggctggtttctccattaggttttactggatgttcttcaggaaactgaagctctacttttattttcttttccagagtatatataagtattagagatagttcctctgccatagctgggtaaccatctgcaacaagaatattctaatatccatcatgtataacatggaatatattaaaactgttgttaagttttaaggtttagtgatagtatctagatataattttctttgccacctaagtctaaagtgtcaggatctgttcagtacttctaaatttattagaagggatctgttcagtataacacttaattttccagtacatgttttccattttatgcccaatttatcttctctgatttggaacaaattagtgatagtgaagaatcatataaatggcagcagagtatgtgaagactgaagtttgggtgtaatgttaaagaaaagtctaaattgaagttcaagatggaaacaaaatgtcagaaccagacagttttgggtatgagattcttaaggatgagctgaggttgtaaacttataaggtaggctattagatcagaagcctggaaaattgggagtatgtattaggattggaaacagtgtttagagctgaccagagttaagatagtagtgttcatctttcaacttagctgctctggttatctcttcctgcgtaacaattatcccaagccttagtagcttaaagtgacaagaatcagctgggtgcaatggctcatacctgtaataacaatactttgggaggccaaggcaggaggattgcttgaggctgggagtttgaggccagcctgggcaacatagtgagaccccatatctacaaaaaaataaaagaattaaccaggtgtggtggcacacacctgtagtctcagctattcaggaagctgacatgggatgattgcttgagtccaggagttcaaggaagcagtgaactatgatcactgagatcataatcatcacagagtgtgagacccagtttcttaaaaaagaaagtgacaacattttgttaactttcctagttttactgggtcagggatttaatagaggtttacttggacagttctaaacattttatcaacttttctctctaatatctttatggttttttatgtaaaaaaattcaccaataggtggcaatgtaacactgaaaaataatttgcatttgttactattataatagcatgtgacaaaacctttatttgacctttcttccctaacttaccatttgttttgaggcatatttttctacttaatgtacttaaacaatctggtggagttttctaattcacattactgtttttagaagaatgttccacattttgtagcttgagaggacataatttttatgtgtgtgcatgaatgtgcatatgcacaggattaactcaaggtactgtttgctttaagcaataagatatatctatgtaattttataaaataatgacaggtttccatagtgtattgaaccatcttaagttaacagactcttttagtcaggcttgaatttttgaacagaagaaattttcttcaagtctttctctaaattcctgttcttctgctctccagagcctcatggctgccattccccctgtagtttctgtataattatttataagtgtaggtattttgaaaccctcctatctgatatatatatgtcattgtttgggaattaagttttctagaaagtatataaggtaacaaacatttcattttatgtaagtatgtatgtatgtatttagggggcagggagatggggatctcattctgttacccaggctggagtgcagtagcatgattatagctcactgtagcttcaaatcctgggctcaagtgatcctcccagttcagccttctgaggagctaagactacaggagtgtgccgccatgcccaactacatttttttttttttttttggtagagacagggtcttactgtgttgcccaggctggtctcgaactcctgacaacacctagataattatttggagatgaggatctcactatgttacccaagctggtctcgaactcctgacacacaactaattttttggagacgagggtctcgttatgttgcttaggttagtcttggcctcctggcctcaagcaatccttctgcctcagcctcctgagtagtagctggcattacaggtgtgagccaccaagtccagctaaaacttactcctttcgaacattaaaaatacttatttttaattttttatgttagtaaatgttatatacatttctatcttataattcatattctatttaatatgatgaataacatgtttaatatatgaataacaattttaactttttcattgactcagggttattaatgagtgcatttacttttatttttattttatttaatttttttttttgagacggagtctcactctgtcacccaggctggagcgcagtggcgcgatctcggctcactgcgagctccgcctcccgggttcacgccattctcctgcctcagcctcccgagtagctgggactacaggcgcctgccaccacgcctggctaatttttttttcttgtatttttttagtggaaacggggtttcaccgtgttagccaggatggtctctatctcctgacctcgtgatccgcccgtcttggcctgccaaagtgctgggattacaggcgtgagccaccgcgcctggcttacttttattcttaattcttctagttcttcagatatccgtactaaccatagggctaccactctccttccattgccatgccaacaaatagttcttttaagttaaagaaattataaaagtaatacatatccttaagcaaaataaaaacagaagaaaatgttgtatattgaaaagtaaaagttccctacctcctagtctcattattgtttcatttatatccgtataggaattttttgtgcttacagaagcatgtattctccttatttggtattgcaacatttaggtggtcctcaaagccaccctcaggcttggtaactcataagaaggactcacagaactcagaaaatccattagactcatggttatggtttattacagcaaaaatatacaaatgggatcataatatggataactattctgcaacacactcctttttatttagtaatatatttgtcatatctttcaaggtttgcacatagagatatacatcattttttcagattatttatttttctataagttattggggtacaggtggtatttggttacatgagtaagttctttagtggtgatttgtgagatcctggtgcatccatcacccgagcagtatatgctacaccatatatgttgtcttttatcccttgccctcctcctactcttaccccaaagtccccaaagtccgttgtgtcattcttatgcctttgtgtcctcatagcctagcttccacatatcagtgagaacatttgatgtttgcttttctattcctgagttacttcacttagaataatagtcccaagtctcatccaggtaattgcaaatactgttaattcattcctttttatggctgtgtagtattccatcatatatatatatatatatatatatatatatatatatatatatatatatatatatatgccacaatttctttatccactcattcattgatgggcatttgggctggttccacaattttgcaactgtgaattgtgctgctataaatatgcatgtgcaaatatcttttttgaataatgacttcttttcctctgggtagatacacagtagtgggattgctggatcaaattgtggttctacttttagttctttaaggaatctccacactgttttccatagcggctgtactagtttacattcctaccagcagtgtagaagtgttccctgattgctgcattcacaccaacatctactgttttttgattatggccatgcttgcaggagtaaggtggtatcacattgtgtttttgatttgcatttcactgatcattagtgatgttgagcattttttcatatgtttgttggctatttgcatatcttcttttgagaattgtctgttcatgttcttagcccactttgtggtaagattgtttggtttttttcttactgatttgtttgagttcattgtagattctggatattagtcctttgtcagatgtatagatagtgaagattttctcccactccgtgggttgtctgtttactctgctgactgttccttttgccatgcaaaagctctttagtttaattaggtcccggctatttatctttgtttttattgcatttgcttttgggttcttgaccatgaaatccttgactaagccaatgtctagaagggtttttccaatctcatcttctagaatttttatagtttcaggtcttaggtttaagtccttaatccatcatgaggtgatttttgtataagatgagagacgaagatgcagtttaattctcctacatgtgggtagccaattatcccagcaccatttgttgaaaagggtgtcttttccccactttatgtttttgtttgctttgtcgaagattagttggctctaagtatttgggtttatttctgagtcctctattctgttccattggtctgtgtgcttatttttataccagtaccaagcttttttggtgactgtggcctttacagaatagtttgaaatcaggtagtgtgatgcctccagatttgttctttttgcttagtcttgctttggctatgcgggctcttttttggttccatatgaattttagaattgttttttctaactctgaagaatgatggtgttattttgatggggattgcattgaatttgtagattgcttttggcagtatggtcattttcaccatattgattctacccattcatgagcatgggatgtgtttccatttgtttgtgtcgcctatgatttctttcagcagtgttttgtagttttccttgtagaggtcttttgactcctttgttaggtatattcctatctttcttgtttatttatttatttatgtatttatttatgcagctattgtaaaaggggttgagttcttgatttgattctccacttggttgctgttggtgtatagaagagctactgatttgtgtacattaatcttgtatccggaaaccttgctgaattcttttatcagttctaggagctttgtggaggagtccttagggttttcaaggtaaacgataatcgtcagcaaacagggacagtttgacttcctctttactgatttggattccctttatttctttttttctttttctttttctttttttgagatggagtctcgctctgtcgcccaggctggagtgcagtggtgcgatcttggctcactgcaagctccgcctcccgggttcacgccattctcctgcctcagcctcccgagtagctgggactacaggcaccggccaccacgcccagctaattttttttgtatttttagtagagacggggtttcactgtgttagccaggatggtctcgatctcctgacctcgtgatctgcccgctcagcctcccaaagtgctgggattacaggcgtgagccaccgcacccggcccagatcccctttatttctttcgtctgattgctctggctaggacttccagtactatgttgaagaggagtggtgagggtgggcatccttgtcttctttccgttctcagagggaatgctttcagcttttctccattcagtattatgttggctatgggtttgtcatagatggcttttattacattaagatatgtcccttgtatgtcgattttgctgagggttttaatcatatagggatgctggattttgtcgaatgctttttctgaatctattgagatgatcatgtgatttttgtttttaattctgtttatgtggtgtatcacatttatttacttgtatgtgttaaaccatccctgcatccctgatatgaaacccacttgatcatggtggattatctttttggcatgttgttggatttggctagctaatatttttgttaaggattttagcatctatgttcattgaggataatggtctgtagttttcttttttggtcgtgatctttcctggttttgctattacggtgatgaatagggatgaattagggagggttacttctttctctgtcttgtgggatagtgtcaaaaggattggtaccaatgctttgaatgtctggtagaattctgctgtgaattggtctggtcctggacttttttttcttggtaatttttaaattgccatttcagtctcgctgcttgttactggtctgttcggggtatcaaattcttcctgatttaagctaggagggttgtatttttccaggagtttatccacctcttgtaggttttctagtttatgtgcgtaaaggtattcataatagccttgaatgatcttttgtgtttcagtggtgtcagttgtactatctcctgtttcgtttctcagtgactttatttggattttctctcttcttttcttggttaatcttgctaatgttctatcaattttattttatcttttcaaggaactagcttattgtttcatttatcttttgtattttttgttttgttttgtttcaatttcatttagtactgctctgatcttggttatttcctttcttctgctgggtttgggtttgttttgtttttgtttctctagttcctagtgaccttagattgtctgtttgtgctctttcggactttttgatgtaggcgttcagggctatgaactttcctcttagcactgcctcagctgtatcccagaggttttgataggctgtgtcattattgtattcaggtgggtgtattcagctcccacgcaaaccgaaaggctggtcttgtctcactcccatggtgtaccgcaccccctacccctccagcgccgaaacagccccgagtgtgtttgagtctggcttgaaaacttgtccccggctttccacctccaagctgcaaaagaaaagggctttagttcatcccccacctgtgaagtctgcaatctggatttgcgccctccccggagttctggccaggaggcttcttgccccattcaaattgttaaaaagttcagctagagaagtccttctccctgtggagttttaccctctgctctgatggccatcctcctgatggatccctgtgttgccaggcaggaatgggctgcttggggatccagcaagctcccagtgcctttctgctacttcctctacccctgtatttcgctcggcttggctttctaacttgactcaactccagctaaagtcaggaatttctccagcaaacagaccttcagcttctccagtgggggtgtgtctacctcattaattttaactctgtgacttattccattatcccatggtttaagccccatttaccagatcccctctgacaaatttttaggttgttttcaattttcctccgtaacaaaccgtgctgcagagaacattcttttatgtatctttgggtgcctgtggaagagtatctttgggaccaattcctagaaattgaaatatgggtcaaagggtttacacattttgcattttgataattattgtaaaattgacttccaaaatttttgatactaatttagactcccacagagtgtatgagagtacccatttcaacgcatcctcatggataccgaatattaagtggtaaaaccatttaaatcactgctgtaaaaggcatttttttctctgtagaaaatgttttcagattcaaagtaagggatgcataatttttaaatacaaagctagagattttagttttacaaaatattagtttttttttgttgttgttgttgttgtttttttttactatttgtgtagccccaactgaatactgaataacagttgttattatttgatctgtcatactgaagctgttacttttgaagtcatgtaaaagttgcattttctctaatgcttaccagatgggagatagtttgacagctgctttgttgaaatcagcaattaagtaatatgtgtgtatatgttaaccagcaagcaaatagagtatgtattatgccctggaaaaaatatatatcagctgggcgtggtggcttatgccggtaatcccagcacttgggaggccaaggcgggcagatcacttgaggtcaggagtttgagaccagcctgaccaacatggtgaaacctcgtctttactaaaaatgcaaaaaaattagccaggcatggtggcgggcacctgtaatcccagctactcgataggctgaggcaggagaattacctgaacccgggaggtggaggttgcagtgacccaagattgtgccactgcattccagcctgggcgacagagggagactccatctcaaataaaaaagaaaagaaaagaaaaaaaatatgtatgttattttaacaaataagcctttagtatttcttctaaaagagtccacagatgctgtggaacatatttgttcaggtacaaatgcattccatagtaataaaatgttgttattttttatattgcaatcccaaatattttctgagtttaagcttttaagatcttttatagcttaaaagctgttctccctaccctccatacccatgtaacaaccagtttcactttcttttatcagttaaaatttttccccagcaatgaatgttagttatttggactaagtgggaagtattatatggtctgttgtgacatatattattcttaaagtgtaacttttgaaatttgtcttttcatgtatatatacattgctcttagtctttgctgatagtttaagttgatatactaatgctgaaatagctttaaagacttttcaattttaaaagacatttttaaaaataggctatgtctgttgggggaactttttccctcttgttgtttttatttttgcttatttttgtaaactcagaggaccctgactaccatttatagtggtatttcaatgctctaccatttggatataattaatatagttagtgctgtattaaccaaatacgggagcagataaaatatgtttatacttacaacgatgtcattttatcttcctgtaagatcagcactttaaagggattaactttatttacttaaatggatcacattttcagttttattatatattaattgtgttatttttctgtttatttttgtaggccctgattttgttgtttgtgatgaaggccatattctaaaaaatgaagcatctgctgtttctaaagctatgaattctatacgatcaaggaggaggattattttaacaggaacaccacttcaaaataacctaattgagtgtgagttaatatctctgattatgcagtagaatattggtatttcctcagatatatttttgtaacgttaccatttacctttcttctacttattctagtatagtcctagaccatgatctacataggttcatcttagtctgctgtgaaagaataacatacttttcaaatgagatgctttataaatgagtggtaaaatacagttaagagatacgctattgtgaatgttcatatataaatatggaatgtgaattattgcaagagtatcagaagtcttaatgattgctttagaaagtacataagcatatgtgattactccagataattttaaggggatattccagttttggggcatgtactgtcaagaaatcagaaagaaatgggaactgtgaacattttagtaaagtggagatgggagaaggagaggtttgctgaatccatggcaggacagtttgctgaggctaaaggtagttgatgtgaacctagggaaatgacttgtgaattaccctcattttcgtatgtctgtggtgacactaaagaagggaacatgagattattcagcaagtaactaattgaaatttcctgttataatctctcactttttttctttttcccactgtaatggctttttgttatttttctctgtgttacattcctttagtgtatttatggtaactttttgctattttattatttgtaatactagtcatttcactttagcctatactttatgtttgtttttatctgttccagttttcctcttttctattctgttaccctatttatagaaatgctgtttcatattgtggtcctatatagtatgggacaagtgatggctctgttaatttttacaaaatgggttagtcttacaaaatacattagtaattaattttttttttttactatttgtgtagccccaactgaatactgaataacagttgttattatttgatctctcaaatattatttggttattctggaaatgaatcagttaatataaattaacttgcttagtagcttattacctcctatttattgttttgacttagtatctcctttcttcacaagatagcctcactgaccataaaatcatggttagattaatggaccacttgttttatacttcatatctcttataaagaataatagtgagtttgaataaactgtccttaggtatttttaaaaaacgttcatgtctagtatttagggatggtttttacttcaattttctctctcgttttggtaattcacttgtagatcagacttataaccatgtttattctatacttagcttgatattctttctttatagcttaattctaatgcatgtgtttttgacatgagcatttcattggggaatttttctaagtctttttaacgattgttaatgttgttaatgaataatgtcttctctcttagatcattgtatggttaattttatcaaggaaaatttacttggatccattaaggagttcaggaatagatttataaatccaattcaaaatggtcagtgtgcagattctaccatggtagatgtcagagtgatgaaaaaacgtgctcacattctctatgagatgttagctggatgtgttcaggtacaaatatgttccatagtaataaaatattcttacttttttatataacaatcccaacatattttctgagcttaaagtttaataattttgtgttttctttcccgctctttcagtagatagttttacagttatatctccttgcgttgtcttaaaaaatttctgctgcattcaacttttaaaaaagaagttccgctgagtttaaaacatagttgattcatttgccaggtgtaaagcctcatatcttattatgttaatgtttagatttttcatccttaagatagggagttccttaagaggaacatagctactatgatgaagttcctatgctcaccctaattctgtagtacagtattataaatctcacttttttgaaatggttataggagaggccagtatgaattaagagaggagccacttttaaagtaatcctggagaaacagttttgttactttcaagtatatataataacctgaacagactagtggtgtcgtttacatacagattttcagtgaatctatattaatgaatggataagtgtctagagactgagctggcagttaatagatctcaagatacgcactttctctgtagatgttaggtactgatgatagcctcaaagatgttttaacaaatgagacaggctattcttttggttggatatacagtttgccctccatatctgcaggttctgcatccatggattcaacctaccatggatcaaaaatatttttttaaaaaatagataaaatggacagaggctaggtacagtggtgcacacctgtaattccagcactttaagaggccaaggtgggaggatcacttgagcccaggagttcaaggctgcagtgagctaaaatcatgccactacactccaggctgggtgacagagcaagaccctgtctctaaaaaaagttttaaaaaattagccagccacggtggtgcgcacctatagtctctgtcacttgggaggctgaggcaggaggattgcttgagcccaggaattcaagactgcaaggagctaagattatgccactgtacttcagcctcaatgatagagtaagaccctgtctcttaaaaaaaagaaagaaaataattaagaaaaaaatggatgattgtgtctgtactgaacatgtacagacttttttcttgtcattatttcctaaacaatagagtatagcaactatttacatagtatttgtattgtgtgaggcattataagtaatctggggatgatttaaagtatatgggaggatgtttatatgttatatgcaaacactacattatttatataagtgacttgaactttcatggattttgctatctgtggaggtggggtgggttctggaaccagtctcccatagatactgaggcatgactgtacttgccatcattataaggagtagttgttccgtttggtcaggttggctacatgtgctagcaagtaccctgtttctgtattgctgctactacccaggcagcatttttctttctggtttaaggagtaatttctatttagcacattggtgttctgtttttctactcttacaataaaatggtttcaagagtgcttgtagaggggttgctttcttaattgggcaaatattccctctaaaattatatgttattgtttgacatattagcatatctttctaagaagccaactcagactgcattagactttgattcctaggttttattacatgattaaagcaaggcattttgctcacactacctactacatcccctccataccttttgttatttttttttctgtacagagaagactattttgaaaacttaaattgctcacttggtaatgtgattgcttcaatttaaaacctacctggtgtgttgcagtgtctttttaccagtgtaccatattgtatagtcatatgaaatacattgtgtagataattgtgggtttagaaagggtaaatatatttaagaaaatgttttcttatatgtttagtgcctatttatttatgtgtatatttcagttataagcaatgagaacttgtagttcattcctgttaaatatttagattaattttcattctctttcttgttaattacagaggaaagattatacagcattaacaaaattcttgcctccaaaacacgaatatgtgttagctgtgagaatgacttctattcagtgcaagctctatcagtactacttagatcacttaacaggtaaacaatacaccttgttgatttcatcttctctataaagacattctttttccaaagaagattatttcagtcatcttactatgtctgttgttctttttcagttttgcatttgaataaaatgggtatgcttaaaagcataaaatatttctaattaaaacactgatgctgtcaaaattaaaatcaagaagcaaattgatgaaaaagatatacagcacatatgaataatgcccttaatttgtaaagagcttttatttcagaaaaattatgaatgtgaataaatccataaaagaagatatacaaaattccagagtatttttttaaaaagtatttacccacattaataataaaaggtgtataagttaaattcatgagtttgtttctcagttatttaattaacaaaggttgaaggcaaaagtaaaatagaaggcaaggcatgtagtatgcctaaaatacaccaaaatgctaacagaagttgttttctgggtgcttttgttatgaagaccttctagtttatttcttgtatttttctatgctttaaaataatacaatgaatagtttttgttttaccatcaataagctttttgtgtgtgtgtgtgtgtctgtgtctctctgtgcctgaagatgtctgtcttcacacaacaaaacctaatctttggactggagtgagatttcttacttgttgatcacttattctggtacctttccccaaatgatattactgatttaattaggagatacaggttagagggtgctctttggccaattgtgaatacagtaattgatcaaaaaaaaaaggaggatggaagtacgtacacacatattaacatgataattatagctaaagtggtactcttttttaatagcagtgcatcctagagagtaaaatatgatggttctcaagaaacattctgctggggaaaacagtgtttgaatcttagtattttatggaactgcttttttgcttttataaaagcaatttttgtattgacttttggaagaaaatcagttccaataaagcacacattttcatttgtatatctgtcagaagctgatagatttactatactattctgttttgaataataaaaattgcaggcataattaaataaccaaatagttatcccaatgagagagttgctgtatagtttaagagacagatgttcagatctgtctttaattaatctctgagtaataaggagtaataaatttggtcatttaatattttttccttttaaaatgttttatattagggaaaatgctcacaatagtgttttcaggttttatagaattagttgtctttaataaccaatcataggctgagcatggtggttcatgcctgtaatcacagcactttgggaggctgaagtgggaggattacttgagctcaggagttggggactagcctgggcagcatagtgaaaccttatctccacgaaaaatcaaaaaattagccgggtatggtaatgcacacctgtagtcccagctacttgggaggctgaggcgggaggtttgcttgatcctgagaggtcaaggctgcagtgagacatgattgtgccactggatttcagcctaggcaacagagcactaccttgtctcaacaacaacaacaacaaccaccaccaccaatcacaaatggtaacagctcaggtataaatgttaagctctactcttttgagttgacctcatggaggtagatagaatgatagatacccgaatctgggaagtatgtgtgtgttgagggagggatagagagaggttggttaatgggtacagacacatagttagatagaaggaataagttctactgtttgatagcagaatggggtgactgtagttaacaacagtgcattttatatttcaaaatagctggaagagaggactcgaaatgtttccaacatataaaaatgataaatactcaaggtgatggataccctgaataccctgacttgatcattgcatattctatgcatgtaacaaaatatcacatgcactcccaaaatatgtaaaaataatatgtatcaatttttaaaaattttaaaaaaacactctttttgagagcaatgcaattatttaagaatttagggggctttgctttattctttgtgactatcattgataggagtaaatatctaaagcactaattgccatagctaaaatctaaaagatatgattgttaaattatcacctggtaccgtgaatctttaagttttagggtgtggggttttccccttaccaaatgcaatattacccatagagtagaataacctgagttaaatagcctctttgaaaaacattcataaaaggccaagtgggttatatgaatggctactctgtcttgattctcagtacaaatcttcacagtatttctcttgaaatatcacctgcctattttacttgcatttaaaatgtttggtattttgtctgttaaatattccagaaattttttgtttctacattaggcttttttagactgtggttacttttaagaagttcacccaaattttgtttttaacattagcagcagtttcatattaattttagtgataatttataatatttgcagaatgaaagtcctaagggactggcttttaaagaatattgaggaaatctaaaatcctcttaatttttcttagttttctttttttcagtgtaattctatggtttgccttttattgtcaggtatcagaagtttataataacatgtaagcctctgcaattcagtaaacacttaaggttttataagcatgtagatacttaattttttaataactaaatattagtctggctttaaacttaaaatccacacactgtcttattttgacaactgtgcaaaaaatagaacacaggaaaagatagcccatggaatgtgagaaaatattgcaaaacatatatctgataagggattcacatgcagaatatagttgtcccttggtatatgtgggggattggttctaggacctgcctgtgtataccaaaatttgctcatacacaaatcccgcagaacctgcatatatgaaaagtcaaacataggtttcacattctgtgaatactgtattttcaatcaacatttggttgaaacaaagtctgtataagtggacccgtgtggtttatacctttggtgcgcaagggtcaactgtatgtaaagaactcctacaactcaacaacaaagaaacagtctgtttcaaaaagaagcaaaggatttgaatagacatttctctaaagaagatatacaaatggccaataagcacataaaaaaatgctcaacatatctactcattagaggaatgcaaatcaaacgtacagtgagataccatttcacacccattgtggtggccattataaaaaaaaaaaaggaaaataagtgcttatgaggatgtggagaaagtggaaccctgtacattgctagtaggaatgtcagatgatgtggctactatggaaaaacattgtagtaactcagaaagttagacatagaattaccatttgatctaatagttccacttataggtatacccagaagaattgaaagcaggaactcaagcagatactgggacacttatgtttatagttgcatcattcataatggcaaaaaaaggtggaagcaacccaaatgtccattgatggatgaatgcataaacaaaatgtggtatggacatacttcagtggaatattagccttataaaggggggaaattccgacatttactaccacatagatgaagcttgaagacattaatgctaagtgaaatatatcagacacaaaaaggcaaatactgtatacttctgcttaaaggtacctagagtagccaaactctacgagtagaaagtagaatggtgattaccaggttctgggggacgaagggaatgggaagttactgttaatgggtactaagttctgtttggaatgatgaaaaagttctagaaatagagagtgatgatgtttgtacaacattgtgattatacttaatgccactcaattgtgtacttaaaaggtagttaaaacagtaaattttttattttattttatttttattttactttaagttctgggatacatgtgcagaacgtgcaggtttgttacgtaagtatacatgtgccatggtggtgtgctgtacctatcaagccatcatctagttttcaagccccacatggattaggtatttgtcctaatgctcttcctccccttgcccctcaccccccaacaggccccagtatgtgatgtgcccctccctgtgtccatgtgttctcatttaaaacagtaaatttttaaaatgtatattttaccagaatttaaaaagtacccccaaatggagcacagtaatatgcttttgtctctaaaaatgcatggacccaagtgccactctttagagattgattcaaaaggtctggagtagggccgatgcatctacagttttatgagccctacaggtgattttgatggaccatcagcttaagaaccattgctccaaatttttttctttggtaaggggtgagctgagacctgagatgagtgaactagacaaggggaacatggagaaatgacactgaaatgttaactttgatggttttctctaagtggtggaaatattaattcttttgtattttacttgttatatacatttctgcaaaattacaaaatccaagaaatatacatatatgtaaaacttccataatcagaaaaatactttaaagtttcattttgtttttaattgacacatggtaattgtacatattaatgggcacagagtgatattttgatacatgtatacattgtgtagtgataaaattagggtaatttagcataactatcacttcaaacacttgtcatttctttgtggtgagaacattcaaaattctcttctagctgttttttaaaattatatttcttttaattaaaaatatttatttaaacattttttatatagagagatggggtcttgctatgttgcccaggctcgtcttgaacttctgggctcaagtgataccccatcacagcctcccaaagtgctgggattacaggtgtgagccaccatgcttgcatgaaatagcctcatctggctatttcaataagttattaagttaaatttagtgtttaaaaatattatgactaacattggaatagtgtacttcaagctgggaaaagaatgtataatagtaatttccaaatgtggttgtactgtcagaatcaccattaaatgcagaacactactaaatttacaaagataaaatgatactaagtgtttctgaggctatagagaaatgagccctcttgatggtaacataaattggacagtaatttggaaagggacgtcaaaattaatttcaattgtatgcttttttccaaaggaaatggtcagaaatgtatgcagagatttatattaaaagatgttaatctcagggtttgtttcaaaacttagttttctggctacagaaatagcaatgtgtgttcattgtgaaatatatatgaaatattgaaaggcactaatacaataaaaactacctataatcttataaactagaagttggaactgctagttatttaatatttaatatcttgctttccagtttttaaaatgtatgtgtgacacttaaatgtcataaacacacactacataaacacacaatacatatacattgtgtttatatactatatatatatatttatttatttattatttttttaatggctggaattatattatccagcttgtgacctaaagtgaactgttacttgttgtggcattatttataataatgaaaaattgaaaattaacccaaatcctcaacttttggggatagtttatattatggtatatcaccataatctaataccatgcaggaagatacattaaatattataacatagaatattgtgtgttaatatttaggaatatatagaatatattatgtaataaagatgaaatagtacccatttctgtgaaataaaaaggatatgtatgaaaatgcatagcaatgtgatcaaaaagataatgccacaaaatattttttagtgtacactctaatattttcaaattagtagaattgtgtttataatgtgtattaaattacctcttcaaattggctctatccccttctctctgttttgatatgacatttatcagctcttctgactccatcaaccacgtctcaagatctcttccacattcctgatcattttaactctgctgcattaagttagtatattctgacatatcttccagctaagtagtttttgtctttggatgtgtgtcttatgctattaagaggaatttaattgaaatgtaaaactcaatggctttctcctgaggtcaggaacaaaacaaggatgtcacttttgcttcttatatttaacattttctagaggttctggccaggacaattataccagaaaactaaaagtatgccacagtgtcatggaaggggtaaaactatttcagtttgcaggtgacatgatattgtatagagaaaaaatttattgttttaagttttgtgggtacatagtaggtatatatatttatggggtacatgagatattttaatgcagccatgcaatgcataatcacatcagggtaaatgaggtatccatctcaagcattcatccttaaatgacaaacaagtcatttatattattttatttattttaaagtgtacagcaaattattgttgcctgtagtcaccctgttctataaaatattagctcttattcattctacctaactatatttttgtacctaatgtccatctctcctttccccctgccctactacccttcgcagcctctattaactgctgttctacattctatctctgtgagttcagttgttttaaattttagctcctggacgggtatggtggctcatgcctgtaatcccagcactttgggaggccagggcaggtggatggcttaagggcaggagttcaagaccagcctagccaacatggtgaaaccctgtctataaaaaaaaatacaaaagtcgaggtggcatgtgcctgtaatcctggctactcaggaggctgaagcaggagaatcgcttgaatctgggaggcagaggctgcagcaagctttggtcatgccactgcattccagcctttgtgacagagctgcctcaaaacaaaaaacaaaaaacttagctccccaaaataagtgagaatatgtaaaatttgtctttcgtgctgtttcatgttgtttgaaatgacaggatctcattctcttttatggctgcatagtactccattgtgtacatgtaccatattttctttattcattcatctgttgataaactttgggttgcttccaaatcttggctgttataaacagtgctgcaacaaacataggagtgccaatctcttcaatatactgattttctttcttctgagtatatatccagctgtgggattgcaggatcatatggtagctctatttttgcttttttgaggaacctccaaacttttctccatagtggttgtactaatttacattcccaacagcagtgtatgtgggttcccttttctccacctcctcgccagcgtttgtctgtcttttggataaaagccactttaaagggtgagatgatatcttattgtagttttgattagcatttctcagatgaccaatgatgttgagtaccttttcttatacctattttccatttgcatgtcttcttttgagaaatgtctactcagatcttttgccaattttttaattaggttgttagaatttttttccatttgacttgtttcagctccttatatattgtggtcattaatcccttgtcagatgcgtagtttgcaggtattttctcccatcctgtgggttgtctcttcactttgttggattgtattctttcctatgcagaagctttttaacttgatatgatcccatctgtccatttttttgtgttggttgcttctgcttttgaggtattactcaaatctttgcccagtccaatgtcctgtagagtttctccagtggtttctcttagtaattccatagtttaaggtattagatttaagtttttaatccatttgaatatgatttttatatatggcaatagataggtgtccagattcattcttctgcgtatggatatccagttttcccagcaccacttactgaagagactatcctttccccagtgcatgttcatggcacctgtgtagagtatgcgttcactgtaggtgtgtgaacttgtttctgggttaattattctgtttcattggcctatgtgtcttttttttttttttttttgagacggggtctcgctctgttgtccaggctggagtgcagtggtgcaatctcggctcactgcaagctctgcctcctgggttcacgccattcttctgcctcagcctcccaagtagctgggactacaggcacccaccactgtgctggactaatttttcgtatttttagtagaggcggggtttcactgtggtctcgatctcctgacctcatgatccgcctgcctcggcctcccaaagtgctgggattacaggtgtgagccactgtgcccggccggcctatgtgtcttttttatgctagtacgatgctgttttgattacagtagttctatagtatactttgaagttatgtaatgtgattcctccagttttgttcatttagctcaggatagctttcactattctgggtctttcgtggttccttataaatttcaggatagttttttcaatttctgtgaagaatatcattggtatttatttcatagggattgctttcaatatgaagattgctttaggtggtgtggacattttaacaatattgattcttttgatccatgaacatggaatgtctttacattttttggtgtcctcttccatttcttgcatcaatgttttatatttttcattgtagagttcttttacttcttttttttttttttttttttttgagacagagtctctgtcacccaggctggggtgcagtggtgcgatcttggctctctgcaacctccacctcctggtttcagtgattctcatgcctcagcctcccaaatagctgggattacacgtgtgcaccaccatgctccgctaatttttgtatttttagtagaggcagggttttgtcatgttggccagcctgctcttgaattcctggcctcaagtgatccacccgcattgatctcccaaagtgctgggattacaggcatgagccaccgtgccctgcctcgcttcttaaattcctgaatattttgttttatttgtagctattgtaaataagattactttcttgatttcttcaaattgttcactgttggcatatagaaatgccaatgatttttgtatattgattttgttacttgccactttactgaaattgctgatcagttcgaatagttttttggtggagtctttagttttttttctttcccaaatataaggtcatgtcatctgcaaacaaagataatttgacttcttcctttcccatttgtatgcgctttatttctttatcttctttgattactcttactaggacttccagtatgatgttgaataacagtaatgaaagtgggcatccttgttgtgttcaagatcttagagcaaagactttcagttttttcccattcagtatgatactagctgtcggtatgtcgtatatagctttaatatgttgaagtatgttcctctgatacccagttttttagggctttttattatgaagggatgttgaatattatcacatgtgcttccagcatgaattgaaatgattatatggtttttatcctttattttgttcataacgatgtatcacattgattgatttccatatatgtgtgtgtgtatatttatatgtgtgtatgtatgtatttttgtgtgtgtgtgggtttttttttttttttttgtagagatgaggtctctatgttgcccaggcttgtcttgaactcctgggctcaagggatcctccttcttcggcctcccgaagtgctgggattacaggtgtgagccatcacactcagctgatttccataaactgagccatcgttgcatccctaggataaatcccacttggtcatgatgaatgacctttttaatgtgttgttcaatttgttttgctagtattttgttgaggttttttgtatgaatgatcatcaggaatattggcctgtagttttctttttttgatgtgtccttgtctggttttggtatcattgtaatactggtctcagaaagaatttggaagtattccttctctattttgcagaatagtttgaggaggattggaattagtacttcttggaatgtttggtaaaattcagcagtgaaggtattaggtacctggcttttcattttttaatttttctttgggggatggggttggggctttacatgccataatatgtttattttattttattttacattttcattttaggttcaggggtacatgtgcacataaattggggtaaatttacccatacatgtacccatgaacctaaaatgaaaattctttaggtaaattggggtctctaggttttctttgctttggagactttttattattactttgatctcattacttgttattggtctgttcaggttttggatttcttcctggttcaatcttagtagattgcatgtgtctaggaatttatccatttcttctaggttttccaatttattggcatatagttggtcatagtagcctctaatggtcatttaaatttctgtggtatcagttttaatgtctccttttccatttctgatttcatttatttgggtattctctcttttttttcataagtagtctgactaaaagtttgttgagtttatcttttcaaaaaaccaagtgtttgtttcattgatcttttctacttttctacttttaaactttttgatgtgttgttgaattaggttagtattttattgagggttttaatatctatgttcatcagtgatattggcctatggttttcttttctttcagcatctttgtctgcctttggtatcagggtgatgcttacctcacaaaaagagtttggaagtatttcctgtaattctgttttttggaagagtttaagaattggtattcatggttttttgaatgtttggtagaattcagttttgaagctatctggttctgggtgatttttgttgggaggtttttttttattactacttatttctttttcttaattctatttttaatttaattattttgttttgttttatttgagacagagtattgctccatcacccaggctggagtgcagtggtgcgatctcagctcactgcaacctctgcctcccaggttcaagcagttctcctgcctcagcctcccaagtagctgggattacaggcgcccaccaccatgcttggctaattttttgtatttttagtagagacagggtttcgccatgttggccaggctgttctcgaactcctgacctcaggtgatccacctgccttggcctcccaaagttctgggattacagacgtgagccatcttaattttattcgtataaatttatggggtacatgtgtaattttgttacatggatatattatagtggtgaagtcagggcttttagtgtatacacagaataatgtacattctacccattaagtagtttctcattcactcttctcgtttcccccgacccttccaagtctccattgtctgtcattccacactctacatccatgtgttcacattatttagccccacttataagggagaacatgacactatttatctttctgtgtctcaattgtttcacttaagataatggcctccagttccatccatgttactgcagaagacatgcttttgttcttttttgtggccaaatagtattccactgtgtatatataccacgtgttctttgttcatcttttgatagacacttaggttgatttcatagctttgctattgtgaatagtgctacaataaacatgtaagtgcaagtatctttttttttatgtttttgatataatgatttctttctcttttggtagatacctagtagtgggattgctggatcaaatgttagttctatttttagttctttgagtaatctctgtactgtttttcatggagtttgtgctaatttacattcccaccaatagtgtaaacatattctctttcctccgcatctttgccaacatttattttttgactttttaataatagccattctaactggggaagatatgtcattgtggttttgatttgcatttttctgacgtttagtgatgttgagaattttttcatatgcttgttggccatttgttatatcttcttttgaaaaatgtctatttatgtcttttgcccactttttaatggaattatttgttttgttttgtgttgttgtttgagttccttgtaaattctagatatcagtcccctgttggatgtctagtttggaaatattttctcccattctgcagattgtttgttcactcagttaattatttcttttgctgctttttatttaagtcccatttgtctgtttttgttttagttgctttgcttttgaggtcgtagtgatgaattatttgcctaggccaatgtccagaatgattttctccaggtttactttctctaggttacttctctaggtttacttctagtatttttattgtttcagctcttacatttaagtctttaatctatcttgagttgatttttgcatatggttagagataatggtccagtttcattcttctgcatatgggaatccagttttcttagaaccatttattgaaaagagtgtcctttccccagtatatgtttttattgactttgtcaaaggtcagttgactgtcagtatgtgtctctatttctgtgttctgtattctgttccattgatctttgtgtctatttttataccagtaccatgctgttttggttactgtagccttgtagggtaatatgaagtcaagtaatgtgataccttcagctttgttcaagaattaatattattggccaggcacggtagctcacatctgtaatcctagtactttgggaggccgaggcaggcggatcacttgaggccaggagttcaagaccaacctggccaacatggcaaaaccctgtccctactaaaaatacaaaaaaaaaaaaaaattagccgagcatggtggcaggcacctgtagtctcagctactcgggaggctgaggcaggagaatggcttgaacccgggaggcggagattgcagtgagccgagattgcgccactgtactccagcctaggcaacaagagcgaaactccatctaggaaaaaaaaaaagaattatattattaaaatgaccatactacccaaagcaatctacagattcaaacctaactctatcaaaataccaatgtcattttttatagaattagaaaaaacaatcctaaaagtcatatggaaccaaataagagcccaagtagccttggtctctttatttgtaattggtctgttgaggctatttcttttttattcagtgttgatatattgtatgtttgtaggaatttatttcctgtagattattcaatttcttggtatataatttttcatactagttctttatgatccttctttatttctgaggcattggttgtaatgtcttcatgtctattttatttatttgagtcctctctcttttttcttaataggctaagggtttgttggcttggcttatttttttcaaaaaaacaacttttccccctatatcttatctattatttgatttactaatgctttgatccttatttccttccttctgcaagctttgggtttagcttattctttttctagctcctagaggtataaagataggttccttatttgagatctttttttgacataggcatttatcattaaaacattcctcttcttactaaagtattttctttaaccacattcaaatgaaattagaaaccaataactgaaggaaagtttaaaaatttacaaatacatgtaaattaaacaacatatatctaaataaccaatggaccaaagaagaaatcacaagggaaattaaaaaatgcttagaggttaatgaaaacaaaaacacagggtactagaatatgggatataacttaagtaatacttagagagaaatgtatggtggtaaatacctgtattaaaaaagaagaaagatctcaaatttataattcaaccttctactttgcaaattaaacccaaaacaagcagaaggaaggaaataataaagaaatgtgaggaacagaaaaacagtagggaaaatcattgaaaccaaaggtaggttctttgaaaagattaacataatcgacaaaccttccttcacttacaaagtaatgaaaaaaaaaggcacagctaaaataagtgccgactacagtgggtcatgcctattaatcccagcctttcgggaggccaaggcagaacaatcctttaaagctaggagtttaagaacagcctggtcaacaaagcgagaccctgtctctacaaaaaataaaaaaaagaattagccaaacctggtggcatgtgcctgtagtaccagcttttgggaggctgaggcaggcagatggcttgagcccgcaggagttcgaggttgcagtaagctatgattgcatcactgcactccagcctgggtgacagtgtaagaccctgtatcaaaaaaacaaaaacaagaacagaaagaaaaatgacctaaagtaaggaatgaaagagtatcactactaaccttacagaaataaaaagaattataagtgaatattgtgaacagctgtatgccgagaaattatatacctcattttcatagcagtgatttctgttacacaatggaaataacctctatcaggcaaaataatactcagcagatttttatgcattattaatgtttcatatcactactaaattttctctcactcgtggaggcaaaatttgctaattatttaaacaacttacatagtttaaaaccgtggataggaaaatatgttattgcttaaatgctgttttttccttttaatcagttttgttcttttgcatattaccttcttgataattttattatattaatgaaacgtgcattcattttctttatgttttataggaaaatgataattctgttgaaattattctggatagagcagagctaatatttacattttatacatcaaaaacataatttttggaaggtcttttttttttttttttaagagacaaggttttgctctttcatccaggcgggagtgctgtggtgcaatcatagttcattgtaacctcaaactcctgggctcaagtgattctcccacttcagcctcccaagtatctagggtatctagggctataggtgtgtgccatcatacctggctaatgtttttgtttttcttggtggagacagagtctcgctgtgttgtccaggcctgtcttgaactcctggcctcaagcggtcctcctgcctcggcctcccaaagtgctgtgattacaggtgtgagctactgtcacttgcctagaagtaatttttttgagtgagcatagttggcgagagtcagtaaaggactatctgcatggagcaaagtttatttataacaggagtttgtaatctagggtccatggatagaatttaggggattatatgtacctggataagaaaaaaattatatattgatttcccttaacctctagctaaagcagcagcatttttcccagtgatgaatagaggcaacaatctatagtagtgttagtgataaccatgactttgttaccaatagaaatcagaaatatttttacatgttgttcctgatacctcaaaatcatttatgtttatcaatacttcagaattttaggtatttattaaacctgtgcatattttgttacttaatgcattaattttaaaaagcacatatttctgtagtacaaattctttaatattttgataatttctatatgatgggtttcttttgtaatcctatttgttttatgtgtttcaaaacgatattccaagagaatttataagcttctctacactgccaaaagtgtttatgtcacaagtaagattaaaactcctaatctagaaacttggttgatatagacaatttttgtgtctttaaccatatttcttttgatcaggtgtgggcaataatagtgaaggtggaagaggaaaggcaggtgcaaagcttttccaagattttcagatgttaagtagaatatggactcatccttggtgtttgcagctagactacattagcaaagaaaataaggtaagtcaggtaacttagtttaaaagcatctattggaagcagaataaacttagacaaaaaattgacctacagactgtatattcaaattttctattgctttgttctattctatgtcttatttctaatttctatatgtcttgcatgtattatgattataggagtgttaaatgttattttattgagcccattttaaaaaactttttattttgaaataattttatacttatagaaaagttgcaaaaatagttctgagaattcccctatacctttgacccagtttcttctaatatcagcatgttgcattagtatagtaaagttatcaaaactaagaaattaactttggtacaatactattaactaaatggcagactttatttggatttcttcaatgtttttacttatgtcttttttgttttccatgatccaatctaggacctcccattgcatttagtaagcatatctgtcctgtcttctttgtctactaaaatctgtaatagttcctcagtccttcctcagctcgtgccaattaacttattcttaaatgaacatcaatataatttccagtgtaagttgagatattctattaaaatagtggtcatttttttttctctagggttattttgatgaagacagtatggatgaatttatagcctcagattctgatgaaacctccatgagtttaagctccgatgattatacaaagtaaatcgaatactttttcgtgccatcctgtattgacaaagttaaaacccctacttgctgattgacctcttataattgacgtttacatctttcctatgcttttctaacaatctgaatgtgtttttttgtttgtttgtttgtttgtttttagaaagaagaaaaaagggaaaaaggggaaaaaagatagtagctcaagtggaagtggcagtgacaatgatgttgaagtgattaaggtctggaattcaagatctcggggaggtggtgaaggaaatgtggatgaaacaggaaacaatccttctgtttctttaaaactggaagaaagtgagtctaatgaatgttgcctttatcatggaacagtaatttggaaaatgtcatgtcgttagtccttttttcagtcacttacctgactaattgactcaaaggaatctttcctcaattgatgagtctaatcaagtactcataattacagtaaatatctgatgaatctttaattataagcaagctactctgtgctctctggtatttgggggaaaggtaaaaagaaaaactaatgtttatttacttgtatatacctaaactctattattttcactacatgtgttagctaactgaattcttgagcaggcttgcaatgtagttgatagttttaaaaatgagtaggagaactggtattcagacctaaaaatgtctaatctcaaagccaccatgatattttcacttaactgtatgggaataaatggaaacatttcagataatcaagtgtgattgtagttaatttttagtcagtaatatacagtaaaactaattttaatcatttagtgtttttcctttgtgattcttcataatctgcaattatctactttaggtttcctgtgtattatgtacagtttctatcacctcttttgttttctttctgtctctcttgtgcatgaaagtgaagtcttagattgaactctgcagtggtttaagttgtctttacctatatgtaagttgaaggattagtgttgagacactgtatcctactagtgcagcctgtatgcctaggagcttaaaaactgggaccaaatgtctgcctatttgaaatagcagattatgaagagagaacaaggtagtggctctaaatatttggcatttgggagttgtggagcaaagcagttaactgtctataaggagaagagagttgtgggggccacctaggttagtgatcctgtgatcagataaacttggctggtctcaggcctacagctgaaataacttggtgattaattattttaattttatttttataatttcaacttttatattcgggggtacatatgctagttgattaacatgggtatattgcatgatgctcagctttggggtatgattgatcccatccccaggtactgaacatagtactcagtagttagtttttcagtctttgccccctttctctctccccactctagtagtcctccgtgtctgtcgctctcctctttatatccatgtgtacccagtgtttagctcttacttatatgtaagaacacgccgtatttggttttctgtttctgtgttaattcacttagtatataatggcctccagctgtatccctgttgctgcaaaggacatgattttgttctttattgtggctgtgtatattctatggtttatatgtaccacattttctctatccaatccactgttgatgggcacctgggttgattccatgtttttgctgttgtgaatagtgctgtaataaatatatgagtgcatgtgtctttctggcagatttattttccttttgttttatacttgtaatgagattgctgggtcaaattgcagttctgctttaagttctttgagaaatctctaaactgccttccataggcggtgaactaatttacaatcccaccaacataaatgttcccttttctttgccccttctccagcatctgctgttttttgactttttaataatagccattctgactggtgtgagattgtgtctcattgtggtttggatttgcatttctcctgtggttaatgatgatgagcatttttcatgtttgttggctgcttgtatgttctcttttgagaagtatctgttcttgtcttttgcccactttttaatggagttacttgtttttttgctgttgaattaagttccttatagattctggatattcattgttggatacatagtttgtgagtattttctctcattctgtaagttgtctgtttactctgttgatagttttttttttgttattttgtgtttttgtttttttgtttgtttgtttgttttttgtttttgctgtgcagaagctctttagtttaattaggtcccagttgtcaatttttgtttctgttgcaattgtttttgaggaattagtcataaattctttctgactcggtgatttctttataaacatttctctcttcagtacctccatggaatagacagatggcagtctaacagtagactctgacttctcttaagaaatcaggggaatagtaaaaattaaactacaaaatttctcttctcattcttctcttctgttaccccataaaacagtttactatcaatgttcatcttctggatagatataaagaatatttttatcagaataataaattattatagtgtaatttaaggcaatgagaagttcctgtatctccttccctgctgctgctgccccaatctgccttttccacataaattcctcagtctctcatctcataattaaaaatatataaagtttacatgttcctggaaattattttcttaaaatactcttgttgaattttttctcataacttatggctaacaggagcagaagagtagaccagtcagtgtgcatcatcctgtgctataaatgggttacgtaagagtatactgagattttttttttaaagtgtactgagatattgatcctttgtcacttgggaatacaattagaatctgaggcagctggtttgcctccgtaaatgagtagtctcttctctttttcctggtatgctatataagcattaacgttttttacatatgccataatgtgaatgggttggaaagcactgggggcagaatgtaggaggctacatgttgtgagcccaaaaacacacagggaaggccatcagttccaaaagacaaattttgaccacttgtctaggatttttgtttcattttagttgtgtgcagtcaaatataagtcatttgtatatggatatattttatatatttttgtagcttatatacgtgtatagtatattagaagcattctccagaactaatagataataaaaatttatttttttctttgcatctaaattaactccatataaaatggagtatatcataatgtatggacatacgtagctggtattgtataactttaaaaaaaatgactttcttacagtaaatataagaaaatctgaataggaagtattaaggggctagtctgcctccttagcgcagtaggcagcacatcggtctcataatctgaaggaagtattaaagggttaacaatgttgtacctggaatttgaaatggatattaaataattaattacctataattgagctacaatatgatttttgccacatattttattttcacgtcaaagagttactgtttgctttaatccttttgtagtagctgtctcgtttttctgagaagcagcatcttgaatgagtcatttaagtttagcttacatcatccccatttctgtgttttaaatgttttttattagaaggagagttcatgatcacgaaatgactatgtaaattacttcaaagtgttagatttattattacttaagtatttttagagtaagcttcattggtaagcatttgcattttaaaacgtatgtaattgtatggatataaagttttgtgacagaatccttgtatatgatgtagagccgtaatattagtactaatataccatatttattcactcaacagatatttataaagtgcttactatatgcccagacataaggagggaactgataagcctaaatggtaaattgaagaaggtatgctatggaaatcctagggagatgctagtcttgagactagcagctttgattttcatttatccagggacaggatttgagacttcgagccctctataagttggagagttctgtgaccccttctcaaagctgaatccctttaaagtttacaatcccatcgacaatccagggagttgacaaggaagcttatctatttcagccagggctcttggttgggaaaaatagttacattgaatttacggtcatggccttcacctcacatactttatggtttgaatttatattactcatatagtctaaaagatccgaaactgaaatattaacttcacaagtaattctgagttggtgattccctggagacctggtagaagcaaatgtagaatcactctggagatatatgaccttaaccaaggctacccagaaatttcacagattgtagctacacctgagaaaataaccttaggaaaagctaggaacagaaagtattagtagtcaacctgaggaaagttagcatacaaaataaatggcatgattagattctcaagaacttctgataatagaagtatttgataaagactataagtatgtctaaaatgatatttttaaaattcctaatcataactttatgccagaaaatttaaaacttaaaatacacaatatttaagaaaaatatactcagcaatgagcattcgttgcagttatttcatattagccaaaaacaagaaacaatctagatgtctatgaggagaactaataaatgatagtgtattcatgcagtggaatactacatggtagttagaatgattgaacgggagctccatgtcaagcatgagtaaatctcgctttgagtgaaaaagtaatttgtaggattttacaaacagtatagccatttgtacagtttagtgatacacatgcagtaaaaaacataaaacactgcaaaaaatggtaaatatataatttaggggtttagttacctattggaaaggaaggaaggaaagagaatgggatcatgtaggatcatatattaggcttcagcttcatccgaagttttaacagtgttaaaatttgatgaagatggaatgtggaagcacatttgtttcttatatcttatatacttttctgagcatttaaatttttgtaacaaaaatatattttaaaatactttgcattaaaaagcaattgagaaagtgtataaacatgctaaacctgcatatttcttattttgaatcaaactatgtttaaatcttttaataaattattttatgctactttctccttccacctttcatagtcaaagtttgtggggaaaatatataagaacgaaatcatttaatatgatatgctgattctggggtcaattcttgttggcggtttccagatcctagtagcacagtgaaatgttttctacccccaaggtcttttctctcgtggtaactgagcctttccatctctgttgattcctgtctcatggagtatgtttgggggcattttactctcttagggcctggtgggaaggggatggtttctcttctctttgggtctctgtctttctgagctccactcctaccccgagggtttgtctcttacacttgcactctctcagagtcaatctcttgcttgttctcttatttggcatctccttcctttctctttttctatctagagctcactcttctgggatagtctctgtccttctgtgctgtatgtgcgtgtgcctgcctttctcttttttccctcccctctcccaagtccccatcagtttctttcttactctccccatgggtaggtctttttctgtctctcttgctctctttccatttcttttctaatttacctacttatgttccatttgtcttatttaggtaaagctacttcttcttctaatccaagcagcccagctccagactggtacaaagattttgttacagatgctgatgctgaggttttagagcattctgggaaaatggtacttctctttgaaattcttcgaatggcagaggaaattggggataaagtgtaagtgctttaccatatttattatataaattaaccttttgattatgtttttattgcttaaacaatgtatttgaacaaatctgttgcttttccttccttcctaaagatgtgatttatttggtcattgtagtgctaggccaatacaagcaactatcttttttgtaagccactagttctgattgcatattcaggttatttcttcagtgtaaatttctgcttctacctattgcaacttgaacttatttccttgggtagagctcttagttgaaatttgtgtttctccatcttcaaaatcatttttcggtttatgtagtgtgacttctaccgtgttgctttactgagatttccccctgtaaagtcactagtgaccttctaatcctcaaatctagtggacatctctcaggctttattttattttacctgcttgattattctttcttcttcttcttcttttttttttttttttcattatgagacagggtcttgctctgttgcccaggctggagtgcagtggcacaatcacagcttactgcagtcttgacctcccaggctcaggtgatcctcccacctcagcctctccagtagctgggactacaggcgcacaccaccatgcccagctagtgtttttatttttagcagagatagggtttcaccgtgttgcccaggctgatctcgaactcttgagctcaagcaatttgtgcgcctcagcctcccaaagtgctgggattacaggtgtgagccaccacacctggcctgattattctttctttatcatttattctttgttttttgttccacttctaacatttttgccaccattcctttctttgcatcttcaccccccttcaaattacttttccaaaaacattatttttttttttttgagacggagttttgctgttgttgcccaggcgggagtgcaatggtgcgatctcggctcatcgcaacctccgcctcccaggttcaagtgattctcctgcctgagcctcctgagtagctgggattccaggcacgcaccaccacgcccagctaattttgtatttttagtagagatggggtttctccatgttggtcaggctggtctcgaactcctgacctcaggtaatctgcctgcctcagcctcccaaagtgctgggattacaggcgtgagacaccacgcccggcctccaaaaacatatttttaaagttttgaacaagacttactgtctaggctgctaggtcccaacatctgattataaacgatttttaaaagtatctgagatgcttttttttttttttttttgagacggagttttgctcttgtcacccaggctggagtgcagtggcgcaatctcagctcactaaaatcacctccacttcctgggttcaagtgattctccagccttgcctcctgagtagctgggattacaggcacacaccaccacgcccagctaattttgtttttttaatagagacggggtttcaccacgttggcctagctggtcttgaactcctgacctcaggtgatccacccgcctcagcctcccaaaatgctgggattacaggtgtgagccaccgcgcctagcttgagatgcttttaataaaaattttaaataaggctaaaataaaataatcttttatgtttaaaaaaatctcaaaatatggtctgaaacaaaagagttcttcatgttgtctgcaactggaaaaggttaatagagagaaccattagtatagacatttaatcctaacaacttttttccttttctactgtaagacttctctgagttcagtggttcccagaaccagccttaattgctaactgactaaaatcaacctctttccagtatagtaacccagattgcagattaattccaatttaataattagtatttctaagactttaattttttcacttacgggaactttcaagaacttaatttgtagcacagaaagaattgattcaattatgtttttgattttgggaaagataaactactgaggggtcaaagcataggccttggtcatttgagctgagcaccaggagtcaattcattttcttaccaacattctagaagtagttaactgggagatagtagactccaacagtgtggagctcaggaagtcatacaataaaaaacacttaagtggttaactccaacagccgtttcatagcttcaattgttttcagttctactaaatctgaagatatgtagcagggaatgttgaaggatcttcaggagtcataagtaccttcttctcctatagtatagcttttagaataaaaataaaacttaaagcatacttgccacaggtatattgtttcttatatactgatctactttgtttgcatatataaagggcaatagaagacctcttatattctctttctagattttatttcttttctagtgtgtaagtatgttataaattctgtccagtgggttagaccagaatagtcattttagaactatttctcagagcccctgcaaattggtgaccgaaaggagagggtaagggaacagtaacatttttcctccttctcccgtaatgcctaaaacagcttgcttttataatttattttatttgaactctacacaaaacttgatgtgaccaaatagttttcatggctaaaaaggagttagaaaattactagggcagagaatgaggaatttgcagacatacttgaaatgtaatgacaaagtgttatagaatgcatgtaattttaaattactgaaatacttgtaatagggaaactttttacattctctaaaacagtgtcttttatagagcagaagttttaaattttgatgaagtctaatttatcaacttttaaaacaatgatactttgtgtcatgtgtaaataattttttacctaacccatgttatgaagattttcttctgtgttcttctaaacattctgttcttacagtttttacagttagatttatgctccattttaagttattttttgcataaggtatgcagtttaggttgaagttcactttttttcatgtggatgttcagttttgctaagaccattgtttttgtcatgtggatgttcagtttcgctaagaccattgtgtaggtttttttttttttttttttgagacagagtctcgctctgtcacccaagctggagtgcagtggtgcgatctccactcactgcaagctccgcctcctgggttcacgccattctcctacctcagcctcccgagtagctgggactacgggcgcccaccacagtgcccagcttattttttttgtatttttagtagagacggaatttcaccgtgttagccaggatggtctcgatctcctgacctcgtgatccacccgtctcggtctcccaaaatgctgggattacaggcgtgagccactgcgcccggctaccaagaccattggttaaaagactatccttttaccattgaaatgcctgggccctacaattaattatcctatgtggctctctatctggactctattctgttctattgatctgtgcctgtccctttactacactgtcttggttactgtaactttgtaagtaatgaaatcatgaagagtcagccctccaactttgtttttctttttcagaattgtcttccctcctctgaggtggcattctcatatacattttacaatcaccttgtaatttctacaaaaaaatcctgctgggatttttgttacaattgtgttaaatttgtagatcgatttaggaagaagtgatatctttactaggaatcttctaatccataaacactaatctgtttttttagccttgttttcagccagtccctcatatctctggacttgattgaagattttcttgaattagctagtagggagaagacagaagataaagataaaccccttatttataaaggtgagctacaaatatttctgtgtcgtaattttaaaaatactgatttaaacataccatacaaacattttagcaacaaaagaaacaaaactacccagtctcacaactctatcatatcaaaatttttttgcaatgtctatttgtccttatccatatatatgtatagtctttttcaaaataaaattgtattgtttatatttgaggtttacaacatggtgttatgggatacatatagatagtaaaatggctactgtagtgaagcagatgaacatatctatcatctcacatagttttttttggtgacaagagcagctaatatcaacttaagaaaaattcctaatacagcagtctttgttgttgaaattgttggataaattaaaactttttggtttctaaagcagttttattgagagataattcacatcctgtacaattcacccatttaaagtgtagaactcaatggttttaatatattcacagagatgtacaaacatcactagagtcagtttttgaacattttaatcactaccaaataaaactctgtaccctttaactattactcccctatccagcccaaaactccctcacataagcaaccactaatctcctttatgtttctaatagattcatatattctggaccagtcacataaatggaaacatgtaatatgtggtcttgatagatattagggttgttctcacctttcagctgttgtgaatagtgctgttgtgtacatttgttacacaggttttcatttatttaaacaaacggcaataccaaactgttttctacactgcctgtactatttcagtcctaccagcaatgtacaagcatttcagtttctccacattcttgtcaacacttgttatttttcatttttgtttttgttataaccatcctaatggttgtgaagtggtatcttatgattttaattttcatttctctaatgactaataatgttgaacatcttttaatgtacttgttgactatttctttatcttctttggaaaaaatgtttattcaggtcctttgcccatttttgaattggattgcttatctttttgttgttgaaatgtgttttaaaaaatatattctacatactaggcccctatcatatatatgatttgcaaatattttctctcattctgtgggttatcttttgctttcattaaaaaaaaaatagttccggtgatctgtatcactttcttttatttatttatttttaatttttcgtagagatgaggtctccctctatttgcccagactggtcttgaactcctgggctgaagcagtcctccctcgttggcctcccaaagtgctgggattaaggtgtgagccaccatacctggccatctgttgctttcttgagtgtgtcctctgatgcgcaaaaatattttattttgttgacatccaatttattttttcttttgttgcttgtgcttttactgtcatagctgagaaaccatttcgaaataaaaagtcgtgaagctttaacccctgtgtttgcttaaaagagttttatagttttagtccttgcacttaggtctttgatccattttgagttaatttttatgcatgatatgaggtaaaggctcaacttcagtcttttgctgtggttatccatttgtcccaggactgtttgttgaaaagaatattctttctttattgaatagtttttgtcactcttattaaaaaggaattgatgatggagacacatgtttgtttcctgaccctcaattctattccattgatctatatgtcagtcgctgtgctaatactgcactatttcattaccattgctttgaaagtgatgttgaaattggaaagtgtggctattccagatctcttggaattcaacatcaaccttagaatctcctataaatttctacaaagaagtcagcttagatgctaatagggattgtgttgaatgtatagttaattttaggaagtactgccatcttaatattatgtcttatccatgaacatggggtgttttgctgtttatttaggtctcttatttatttcaccaatattttatagtttgcagagtatacattttacacttttgttaaatgtatttgtacatattttatttctgaggctgagtgaaatttgttcttagtgaattctttaggattttttatatacaagatcatgtcatctgcaagtacagataatttcctttctaatctgaatggcttttatttgtttgcttatccagttgccctggttaagacctcaagtacaatgttgagtgaaagtggcaagagctggcatccttgtcttgtctctaatcatagtgtgaaggaatccagtttttcaacattttgtatgatgttagttttgtggatactatttatcaagttgaggaaattatcttctctttctagtttgttaaatgtgtttgtcatgaaagagtgtgacatactatcttgatttctctgcagctattgagatgatcatgtcatgttttttttttccccattctattaacatagtgtattactttgattttcacatgttaaaccaaccttgcatacctgggataaatcccacttgtcatggtgtataattctttttatatggtgctggatttagtttgctagtgttttttgttgttggcaatggaatgttttaattggctttttttgtcctgattatgaaagtattattatatcttgcatatataatattggctgtataatattctgtcatatggctgtacataacttatttaatcatttgattgctttctctaatttttcaactttttttttttttagagacagggtcttgctctgtcacccaagctgaagtgcagtcgagcaatcttggctcactacagcctctgcctcctgggttcaagcgattcttgtgcctcagcctcctgagtagctgggattacaggtgtgtgccaccatgcctggctaatttttgtattttttgtagagatggggttttgacatgttggctgggtcttgaactcctggcctcaagtgatccacccgccttggcctcttaaagcactgggattacaggcgtgagctaccacacctggcctaatttttcaacattttaaatttttgtacataagtttatatctgcgttttaaacttttttgcttaagatagattcctaagaggagaaatcatttaccaacaggtatgatcttttttaggacttttgaaacattgtcaacttattttccagaacagttggattagtactcctagtaggaatccttgaatgatcactacaccattgccataataactaaaacctttcttaatagatgaataatgatatcttgtatttgttttaatttgcatttattttataaccagtaacatagattgtctctgctaatctctttttgcttttactgctgactgatggctatgtttctgtctgcctgcaatgctctctccacccgcactatcttcttcacctgattaattcctatccattcttcatctttcatgtccagtgacactcctcagtactgacttccctcctcctgactccaatgtctgattttttccttttaatttttgtgggtgcatggtaggtgttatgtattcatgggttacatgagatattttgatacatgcatgcaatagataataattacatcagggtaaatgggatatctatcacctcaaacatttatcctttgtgatacaaaaaatccatttatactcttagttatttaaaaatatacaatttttaattatttttgacggtagtcaccctgttgtgctagcaattactagtttttattcattccaactatatatttgtacctgctaaccatcagtacttccaccccaaccacccactacccttcccagcctgtggtaaccatccttctactctgtatctccatgagttcaattatttttatttttagatcccacaaataaatgacaacatgcaaagtttgtctttctctgcctagcttatttcacttaatgacctccagttccatccatgttgttgtaaatgacaggatctttctcttttatggctgaatactattccattgtatataagtatcacattttcattatccattcatctgttgatggacacttaggttgtctccaagtcttggctattgtgaacagtgctacaatagacagtgcagatatgtcttcgatataccgatttccattattttgggtatatacctaggagtgggattgctggatccttttttttttttttttttttttttttttttttttttttttggtggggggagacaaggtcttgctctgtcacccaggctggagtgcagtggtgtgatcttggctcactgcaacttccacctcctgagttcaagggattctcccacctccgcctccccagtagctgggactacaggcatacactaccacgcccagctaatttttgtatttttttggtagagacagggtttcaccatgttggccaggctggtctcaaactcttgacctcaggttatctgcctgccttggcctcccaaagtgctgggattatataagtgagccactgcgtctggctgggattgccggattctatggtagctctatttttaattttttgaggaacctctgaactgttctccatagtggttttactaatttgtgttcccaccagcagtgtacaagagttcccttttctccaaatcctctctagtatttgttactccctgactttggataaaagccaagttaactggggtgggaagatatctcatagtttgatttgcatttttctgataatgaatgatgttgagcaccttttcctatacctgtttgccattggtatgtcttcttttgagaaatgattattattttgtccattttaaaatcagattattaaattttttttcctgtagagttgtttgagttctttatatattccggttattaatcgcttgtcagatgggtagttttcatatattttctcccatcctgtgggttgtctcttcactttgttgactgtgtcctttgttgcgcagaagctttttaacttgatgaaatcacatttgtctgtttttgcttttgttgcctctgcttgttgggtattactcaaaaaatctttgcctagtccaatgtcctggagagtttccccaatgttttcttgtagtagatttgcagtttgaggtctaagatttaaatctttaatccattttgacttgatttttatatatggcgagagataggggtctagtttttttctcctgaatatgtatatccagttttccccagcaccatttgctgaagagactgtcttttccccagggtatattcatggcaactttgtcaaaaatgagttcactgcagatttatacatttatctcagggttctctattgtgttgatctatgtgtttttatgccagtaccatagtgttttggttactatagttctgtagtataaagtcaggtaatgtgattcttacacttttgttcttttggcttagtatagctttggctattttgggtcttttgtggttccatataaatttttagggttgttttttgtatttctgtgaagaatgtcactggtattctatacagattgtaatgaatctgtagattgctttgggtagtatggacattttaataatatcgattattccaatccctgaacctggaatatcattctatgattttgtgtcttcagtttctttcagcatctttttatagttttcattgtagagatctttcacttctttggttaattcctaagtattttatttatagctattgtacatgggattactttcttgatgtcttaaaaaattttcttttaatttgtaagtttctttatttctctttcaggttgtttgctgttggtatatagaaatgctactgatttgtgtatgttgggtttatatcctgccacttcacagaatttctttatcatttctaatagttttctggtggagttttcagatttttccaagttaagatcagatcatctgcaaacaaggataatttgatttttttctttccaattttgatgccccttatttcttgttcttgtctaattactctagctaggacttccactactatgttgaataagtgatagaagtgggcatccttgtcatgttcttgatcttagaggaaagccttttagtttttctttctttagtatgatactagctatgggtctgtcatagatggcttttattatttttgaggtatgttccttatgtacttagtttttttagtgttttttcataaagggatgttgaattttgtcaaatgctttcttaccatgaattgaaatgatcatatggttttgttttttgttttttttttgagacggtctcactctgttgcccagactggaatgcaatggcgtgatcttggctcaccgcagtctctgccttgcaggttcaagtgattctcctgcttcagcctcctgagtagctgggattacaggcgtgtgccaccgcgcctaactaatttttgcatttttagtagagacgaggtttcaccatgttggccagacaggtcttgaactcctgacctcgagcggtccacctgcctcggccttccagagagctgggattacagacgtgagccaccacaccccggcgatcatatgggttttgtctttcatgctgttgatatgatgtatcacatcaatttgtatatgttgaactattcttgcatccctggagataagccccagttggtcatgatggatgatcattttattattgaattccgtttgctactgttttgttgaggatttttacattagtattcaccagtgatattggcttatagtttaatttttttatgtgtgtttatctggttttgttatcagggtaatactggccttgtaaaatgagtttggaagtattctgttctctacttttcagaatattttgagtaggatttgtcttatttcttatttaaatgtttgatagaattcagcagtgaagctattgggtcctgggattttccttgctgggtgactttttattatggcttcaatctcattactttttattggtctgttcagattttggacttcttcacggttcaatcttggtaggttgtgtgtgtctagaaatttatccatttcttctaaagttttccaatttatcggcatatagttgctgataatagcaactaatgattctttgaatttctgctgtaacagttgtaatatctttattttcatctctgattttatttttttgggtcttctctcttttttgcttagtctgtctcaaagtttgtcagttttgtttattttcttcaaaaaacctgttttttgtttcattgatcttttgtattgttttctttatttcaagtttatttatttctgctctgatctttatttctcttctactaattctgggcttggtttgttcttgcttttctaattcttctcttctcttcttttttgttttttttttctttttttttgagacaaggtctcgttttgttgcctaggctggaatacagtggcgcaatctcggctcactgcaacctctgcctctcaggttcaaatgattcttccgcctcagcctcctgagtagctgagattacaggcgcccgccaccatgcccagctaatttttgtatttttagtagagacagggtttcactgtgttggccaggctggtctcaaactcctgacctcaggtgatccacccgcctcagcctcccaaagtgctgtcattacaggcatgagccaccgcgaccagcctctgattctttaagatgccttgttacattatttgcagtttttctacttttttgatataggcatttatagctataagctttcctcttagtactgctttccctgtgtcttatgttttttggtatgttgtgtttccattatcattttttaaagaaaatttttgatttccttcttaattccttcattggcccaccggtcattcaggaatgtgttgtttaaattctatgtatttgtatagtttccaaaataccttgttattaatttctccttttattccactgtggtgagagaagatacttgatattatttcaggttgtttttgatgttttaagacttgttttgtgacctaacatatggatgatccacatgctgaggaaaaaaatgtgtattctgtagctgttggatgaaatattctgtaaatatgtattaggtccatttggtctatagtgtagataaagtgtgatgtttcttagttgattttctgtgtgtagtgttgaagtctccagctattattttattggggtctatctctctctttggctgtaacaatatttgctttgtatatgtgggtgctcccagggttgagtgcatatatattttaaattgttatatcctcttgtagaattgaactgtatcattatatagtgtccttctttgtctcttcttacagtttttatcttgaaatctattttgtcctatataagtatagctgttcctgctctttttggtttccattggcatggaatatccttttttatccctttattttcagcctatgtgtatttttacaggtgaagtgtgttcttgtaggcaacagatcattgggtattttttaaaatccattgagcccctctgtcttttgattggagagtttagtccatttacattgaatgttattattgattagtagggacctactcctgccattttgttatttgttttctagttgttttttgggctcgtcttctttccttccttcttatcttccttttaatgaaggtgattttctctagtggtatggtttagtttcttcctttttgtttgtttgtttatccattatatgttttttggtttgtggctcccatgaggcttggaaattctatcttaaaacccattattgtaagctgataacaactttacactgtttttataaacaaagaaagaaacaggcaaaaagaaaactaataaaaattctacaccttaactttgtccactttttagctttttgttgtttctgtttatatcttattgtactatgtcttgatatgttgttgtagttatttttgttgcttcaacatttagtctttctacttataataagagtaatttatacaccacagttacgctgttataatattctgtatttttctatgtacttactgtttttagtgagttttgtacctttagaggatttcttactgctcattcatgtccttttctttctgattaattacttcctttagcctttcttgtaggacaggtttggtgtggataaaatccctcagcttttgtttgtctggaaagtttttatttttcttttatgtttagaggttattttttccatttatataattctagggtgaaagttttttccttgagcactttaaatatttcatgctactcttctcctggcctgaaagatttccactgaaaagtctgctgccagacatattggagatccattgtatgttacttgtttcttttctcttgctgcttttaggatcctttctttatccttgacatttgggagttattaagtgccttgaagtagtcttttttgggttagatctgcttgatattctataaccttctacttgaatattagtatctttctttagatttgggtttctctgttattatccctttgaataaactttctacgccagtctttctctctacctcctgtttaagaccgatatctcttagatttgctttttttgtagctattttctatgccttgtaggcctgctttattcttttttattcttttctcttttgtctcctgtgactgtgtattttcaagtagcttatcttcaggctcactaattctttcttttgctttatcaattttgctattaagagactcttatgcattctttagtatgtcagttgcattttttgactccagaatgtctgctttgttcattttaattattccagcctcttcattaaatttatctgattggagtctgaattcctcctgtgttatcttgaatttcattgtttcctcaaatcagctattttgtgttctctctctgaaaggtcacatatctctgtctttcccggattttcccgattccctgtttagttcatttgatgaggtcatatttctctaaatggtcttgatgcttatggattttcgttggtgtcttggcattgaagagttaggtatttattgtagtctttgcagtctgggcttgtttgtacctgtcatttttgggaaggctttccaggtatttgaagggacttgggtgttgtgatctaactttttagtcactgaagctgtgtccacattaggggtcaccctaaggccagtaacgctgtagttcttgcagccttgtagaggtaccattttggtggtcttgtataagatccaaaagaattgtctgcattaccagatggagaatcttgttctcttcctttactttctcccaaacaaatggagtctctctgtgctgagttgcctggagctgggggtggggggtgggtgacacaagcacccctgtgactaccactgcgggtatagcacttggtcagatcttaagccagcagagcaatgggtcttgcccaaggcccactgtaaccactacctggttactgcctatgtttgctcaaggcccaagggctgtacattcagcaagtggtgaagcctgccagtactgggtctttcccttcatgttggcaaattctcttagtccctgggcgggtatagagatgctttctggagccagggcctggagccagaaatgttagaaatatacctagtgctttattctactatggctaaactggcacagaaataacaaaacaaagtccttcctactcttctctttcttttcctcaggcagaggagcctctcttcgtggccaccaccaggacaggcccgcagagagtactgccagtgtaccgccagtgttcacttaaggcctaagggctatttagtcagcttttggtgaatgctgccaggccagagactcacccttcagggcagtgggctccactctgccccaggctcagtccacaaattccattcaagagctaaggcctggaattggggacccaagagcccgtttgttgcttttgtccgctgtggccaacctggtagctacactgctagataaagtcccctttactcttccctctccttttctcaaacaggaagagcctctctttgtagccaccacaacttctaataagctgggtctcaccataacctaacacatttctgtctaatccatgccccacaatgtgtactacctggttattgctgctgatgattcagggcccaagggctctttggtcagcaggtgatgaatcctgccatgactgggtccctcgattcaaggcaatgggttgccttctggcccagggagctagggcctggaatgggggcttcacgattctgcccagggccctgtcctactgtgactgagctggtatccaagttgcaaaacaaagtgctttttctcttcccttttctctcctcaagtagaaagcagaggtctcttttggagctctaagctgcgctacctggaattggaggagtgaggagtggtggcataagcactctcttagccgccccagtggtatctgactaagtcaagtgcccccattttactggctccaagccctttacagcactaggacttgcccagaagttgcagtccttgtggcctagatagcctttcagttttatttagggccccagtgcactttagcccactgtggcgtgacttactaaaactcaacttctgatcactgtgatggatgattcccctctggtttgggcaggtttatatgctcccttcatgtgtgtaggctgagttccaattcaaagtcctatgatcactgcactctccttcccgcaagtgcactgattctctccctatgacacgtggccacttctgggggttgaggtagcagtggcattggcgattcaagattgtctttccccttctgtgcctctttcagtgatatgaagttaagatcaggtactataattgctcacctgatttttgtttcttatgatggtgcttttttgtgtagatagtcataacatttgctgtttatgctgggaggttgatcagtagcagcttctattcagccatcttattccacctccttccccagtactgccctgattgaatgagttggtatttgttcctgtttctgttttttggaattgtttgtaaagcattgagcttaattatttaaatgtttgttagaattcagcattgaagccatcttggcctgggctcttcttataggtagttttttttctttttagtattatggtaaatatatatataacataaaatttactattttgacagtaaaaaggcaacctaccatatgggaaaaatatttgcaaatcatacatctgataaggggttaatatcaaaaatacataaaggattcctacaacacaacaacaaaaataatatgatttaaatatgggcaaaagagttgatagacatttctctaaaaatgatatacaaatggccaagaagcacatgaaaagatgtctagcatcactaatccttagggaaatgcaaatgaaaactgtaatgagataccaccacacacccattaggatgggctactatgaaaaaacaataatgagagttggtgaggatatggagacattggaactcttgtgtactgttggttagaatgtaaaatggtatagctgctgtggaaaacagtgtggtgttcctcaaaaaattaaaaatagtattaccatgagatccagaagtactacttctgggtatatacccacaagaattgagttcagggtgtcagagaagtatttgtatttgtacgcccacattatagcagcattattcatgaccaaatcatggaagcaagtcaaatgtccatcaacagataactggataaacaaaatgtggtatatacatacagtggaacataatttagccttaataaggaaggaaactttgacacatggtggaacatgtatgaatcttgaagacaatatgccaagtgatctaagccagtctaaaaaggacaaatattacatgattcctattatgaggttcctagagtagtgaaatttgtagagacataaaatagaatggtgtttgccagggcctgtgggtaaggggaaatggggagtgtgagagaacagataactccacggggcttcccagagtgctccatgttgtatggggattatgtctgtctcataaatatatgtatcattggagacaggttcattactacccatttttgtatactctttgtctagcaccaagctagacatgtagtaggtccatagtaaatacttgttgaactggtaagggaataaattacccttatctgtaacttccctagtttttttatacagagaatgatgctctagttaggcattttcctaggtatatacttgcactttttatctttctcatttccccgctttctttgtttctagagtgagtttttggcatatctttaacatatatatgtgtagtatatatgtgtatttttacatttgactgtagttaaatataagcttaaatatattttttttctattatcactatacattttattagattctatgttctggcagtttttcattattgaaaagcctatgttacaaaaacataccaatttactaccatcaataaatggaaaatgcttatcttaatatgtattgtaactacattttcttcatctttaatgggtaaaaacagttgtcattgttttcattaataattttttgaccactagtagggttgtacttcttttatatgcttgctagtttatttctgattttgtaaattatctttagcaaatgtttactaatcagattggtctgcctttgagttactgctattaccactaccactaccattaccattaccactgtgtattgagcactgagcaagatttaaggggtactacaggaaatcatggtgtagaagaggaacagacacatatattatgtgccataatagaggcaggtgtaatttgtcatgggatcttgagtgataatattaagaactcagtaagcttttaattaccatgtgacaggcaccattctaagtagtttttaaaatattatctcattgaatcctcataacaaccctatgcaataggtactctgattatcttcattttacagataaagaaactgaggcacaaggagtttaattacttgccataagtgaaaatgttagtaaatggtgaaactgagattaaactcagggagtgtcactccaaagtctgtgttcttaactactaacctataatgactctatcagtttttaagtgttggattcatcgaggtggtattagagatattcatttgcattataataaaaggtgagtatgttgaaatgctttttaaaatagtcatatcattttccattcatttatgattatttattttaataattatcctgttcaagtgaacaattaatgcaaatgtgactccagcctcttacctttttatgcaagtatccatctcaaattctttttttcttggatgtgtatgcctttttttctaattgaaaaaaaaatcataaataaaatgactttcataagcattaatgaatttttaacaaggaaattctgggttttctatatcagtgaagatataggtaagaaacatggaaaagcatcttttttttaactaatgtactaaatttaaagagcttgctggaaagacataagtaaatctcagttttgttaactgttttattttaaggctctggggcatgatagaattttgcttggattggaaatagtagcattgtgtttacagttaaataattagaatagaaattatgtatgataaaatataaaagtgtcataagcccttaatctcttggtattttagtatcaatgcaagtcttgggtaaaatttcacctcacttcttcctggtgtagattaaaggaaaaaaaaaacttaaactcactgtctaaaattgacatgtcatatcattaactcataaagtcgtactcctttacacacacacacacacatacacacacaccacatttgaaatggaaacgtacactgaaatttgcagctaccccatagaataatttttggcacatagtaggcattcagtaaagatttgttcagtgaatgaataaaggcattctttatctctcatttttatttgatcattatcaagttgttgataaggagaaaaacgtggccatttacagatataacttaaaacatgcctcatgagcgaaatgtaagtttaatcatattcttttgacagttttaaggattctaatcaaggaaacccttttaagaaattctcatgtagatgaaataggctttaaaaatacctgtgctcatcactatctatttgaatgaaatctgtggttaatttatttataatgtaatgactccttgattaagaaaagtatataatgtattttgctatacaaatagaatatatataacccacttttaaatgatgagcaaggtggaaaatctgttcttaccagtaagcagagcgatatatcaaattccttttgtgttcttttgttaaattttcaggtgaggggaagtggcttcgaaacattgactattaccgtttagatggttccactactgcacagtcaaggaagaagtgggctgaagaatttaatgatgaaactaatgtgaggtaggaaaaattttctgtatatgtagaaacattaaaataattaattttaaaatttacataaagttcactatttttattgtgtatttgaatgtttttagcaaatgcaaggtacagtcaggttgcaaaacagtgtcatcactccctaaccactgaattcacttatggaatcatataatttgtagccttttgagtctcacttctttcacttagtgagatttatttgagaatcatttacattgttgcatataccaataatttttaaaaattgttgtatagtcttccattatagggctatatcacagtttgttcagctacttccacttgagggacatttgagttgtttccaggttttggaattaaaatcaaagctgctctaagctttcatgttcaagtttttgtgtgaacataagtatttacttaaatgaaacaaaagcctaggattgtgattgctgggtcatatagtaagtgtacatttatctttgtaagaaactatcaagcagttttccaaagtgactgtacaatttttcattcccacccgcagttgtatgagagttccagtttccttacattcttgtctgtacatggtattgtcattttttaaaaaaattattttactcattctaatgtatgtgtagtggcatctcttgtgattttaatttgctattccctaatgataaattatgttgagcatcttttcatgtgcttattgaccattttaatatcattaactgtagatacaaggcaatttgtgtgtgtattgatattgttttaagctgttagtaattgacaaaatcaagctacatttggaaagaaaaagttttatatatagtcatatgttgcttaacaaccagtatacattctgagaaatgcatcattaggcaattttgtcactatgcaaatatcatagagtgtactgtacatcagtaggctttctgtgatatagcttattgctcctaggctgcaaaactgtacagcatgttactgtactgaatactgtaggcaattggaacacaatggtatttgtgtatgtaacatatctaaacagaaaagatacagtaaaaatatgtattatactcttatgagattgcctttgtacatgctgtctgttattgaccaacacattatgtggcacatgactatacatacatctaaacatatgcacatacgcatacgtatacacatacacaaacataagaaagcatggcatttaagaaaaggataaaggagatggggttagtttagtagaaagatggctgaagtatgccttaataaatattttaaactatggagaatattatactgtgtgtttaaaacatgttttaattttagcagcatcatgaactagacctaggcttaaggctagagaaatttcagttacattttaggaagattattaattattgaaaacccgtagcctaagagagcttacaaagggatgatttgagtatagttaaattataaatgtatatgattgattatataattgtttaaagaataaatacatttttatattctgtgtttttcatgtttaaacaaattattatttgtacatgagtgtgaagaagtaattttattgagtaactcaaatttctcaaacataatctaaacctttggcttgctaggtttcccaaattttaaaatacgacagaggcatataatctgtcacgtgacatttatacttgatgactagtagggaaaaacattgaaatgtagatgttgagctgtcagcttggcttactcactagtgaattacccctaaacatatgccaaaaagcatgtcattcaaattcatgcttcaggcatatactggttgagtatttcttatccaaaatgcttgggggtgctagggacccgaagaatttcagatatgggatttttttcagatttttgaatatttgtattatattcttacctgttgagcataccaaatctgaaaatctaaatccaaaatgccccaatgagcattttcttcgagtgttacgttggcactcaaaaagttttggagtttggtgaatttaggatttcagacttacagatttgggctgttcaacctgtacatgtatattatggatttggggagttgctcttgagtagctgaacccatacacatgaaatccacagatgttatgctgtctctcaaaatgcacaaacaaacagaaaatgaaacaaaaaacaaaatgaaaagagcaaggaaaaaatccacaaatgttttagattatatctctgtaaattctaatttttcatgactcagtaattttcagtaaataggatataaatataatccttgtttatgccaaagcaatctgaaagacacattaaaataaactttaagataatgaccatttgtaacgttgttgttttgtgtgacctggaagtagttttcagcagtctcagagtgcctcgttagcttgatactatttttggtttgtttctcttttaatttagaaatgattatagattcacctgaacttgcaagtacagagaggtcctgtgaaccctttacctaattttccccaatggttaaatcttatatttcaatatcaaaactaagaagttgacagtgtttcaatgtttgcatatatctttttttccacatatacacaatcaagatacagaaatattccatcaccacaaagctcgctctctctcactacccttttatagtcacacccatttttactgccaaccttgtcactaaccttaacccctgacaatgactaatttatgctccatctctattattttatcatattaagactgtcatataaatggtatcattctctatatgtgacctcttgagattggcttttttcagtcagcataatgcccttgagttccatccaagttgtcacatgtatcaatagtttgttcctttttattacagagtagtattctatgggatggatgtaccacagatgtttaatcattcacttattgcaggacattttcattttgtccaggtttggctattataactaaagctgctgtgaacactgtgttccagctttttgtgtggacctaagttttcatttctctaggataaatgcccaggtatgctgtggctaggtcatatggtaagtacttttttaggaaactgccaaactcttaattagaatggctgtaccattttatagtcctaccaagcagtgtgtgagaaatcaagtttctctacatcctcaccagcatttgctattatcactgttttttattttaggagttctgataggtatgtagtggtatcttattgtggtcttaatttgcagttccctgacaaccagttatattgaacatcttatgtgtttatttgccatcaaatattgtatatcctcttgggtgaaaatctctttatgtctttttgtccattttcttattggattgcttgtttttttattgtagggttttgagagttctttatataatctagatatgtgtcctttgtcagatatatggtttgcaaatacttcctgccagtttatggcttgtcttttcatccccttcacagggtctttcagagaacaaagattttaattttgatgaaatctagtttgtcaatgtttgtttctttgttttgatcatggttctgatgtcaagtctaagaactcttcctcaaagccctaggtcttgaagactttgtcctgtgttgtattttacaagttttataattttaccttttatgtttaagtccatgttgtattgagttaatttttgtataaggtgtgaagtttaaaggttcatatttttggctgtggatgttcaattgctgcagcatcatttgttgaaaaaaactatctgtggcagtgcacagtggctcatacttgtaatcctagtggtttgggaggctgagcccaggaattcaagaccagcctgagcatcacagcgagaccctgtctctaaaaaaaaaaaaatacccaggcatggtgatgcacaccagtactcccagctactctggaggctgatgtgggaggatcacttgagatcaggaggtcgaggctgcagtgagccatgattgtaccacttcactccagcctgggtaacagaggaagacactgtctcaaaaaaaaaaaagaacgaagaaaaaaccatacttcctttactgaattggttttgcacctttgtgaaaaatcagttggctatacttgttttgggctgtttttcagtttgctattctattcctttattccatatgtctttctctgcatcattactacatagtcttgattactgtagctgtgtactaagccttaatatcacattgaatgattcttcccactttgttctacctttcacagattgttttagctatttttatatgaattttagaataatcttgtctagacctacaaaagttttgcaataattttaataggtattgtattaaacctattactaatttgtagagaattgatatcatttttcaactgtaatacttttagcagcagagaattgataactttattgttttctgatcagtgaacacagtgtatgtctccattagttgatctttgatttcttccatcagtgttttgtagttttcagtatacaggtcctgtagatcttttgttagatttacacccaggtatttctctttttgagttattgtaaatgttactgtatttttaatttttgtttccatgtgttcattgctcaaatatagaaatgcaattgatttttgtgttgatcttttgtctgtaatcttgctgacttcatttgttctaggagtttgttttatagatttctggggattttctaagtagatcattgtactatccacaaggagggatagttttatttcttcttttatgatctgtatgctgtttgtttccttttcttgtcttgctgcaagaaaagtctccaactataattgtgaatttgtctgtttctcctttaagttatgtcaggttttgcttccgatattttcagctctgtttattatgcatgtttagtattgctatgtccctccctatacctcatactagttaaaacttaagagtaatatagttagtagcaatggtgagagtggacatccttaccttcttcctgatcttaggagaaaagcattctgtcttcattaactatgatgttagctgtaaggttgtttttttgggtgggggggttgtttttgtttgtttttgttttgagacaaggtttctgtctatcaccatgactggagttctgtggtgtgatcatacctcactgcagcctcgaactcctaggctcaagggatcctcctgcctcagcctctttgagtaggaatgcacagccatgttgtactttttttgtaattactcttcatcaagttgaggtggttcccctctattcttaattttctgagtttttatgacgaataggtgtttacatttgacaaatgctttttctgcctcagtttgtatcatctgttatttcttcttaatctgttaatatggtgtgctatgtagattggtttttgaatactgaaccaacttttcatgcctggaataaaactccacttgatcgtaaggataattctttttatatagtacttggttctgtttgctaatactttgttgagagatatttatgagagttactcttatatattcagttgttttcgtgttgtcattgtctggttttggtatcaggttaatatcgacctcataaaataagtcaataattgttttctattttctgacaaaaattatggggatttgtgttaatcttaaatgtttggtaaaatttgccagtgaaaccagttctggccttgaagatttctttttttgggagtttaaaaatcactaattaaatttcctcagtagttttaggattattcaaatgatctattttatattgaatgtgttgttgtagtttgtgcttttgtaagaattggttcatttcatcgtaatttcaaatatatgtgtagaattgttcatagcattttcttaatatccttttcatgtctttagggtctatagtgatagcttctgtttcacttctgatactggtaatttgtgtgttttctttttactagtcttgctagaggtttgtcagtttcattaattgttacaaataactagtgttttattcccttgattttctttttctttttttttttttcctattttaatttcatcttgcttttggtttgttttgctcttgttctactttctggaggtagaagcttagattactaatttgatttgagactttttttcttttctcatgtaagcatttagtgttataaatttcgctttcagcactgctttagttatacaaactttgatgtgttatattttcatttagttcagtatatttttatttcagaattcatctttggctcagctagaagcatgttgtttaatttccatgcgtttggaggttcccattatttttctgttgtggatttctagttcaattatgttcaggaaatataatctgtatgatttcaattcttttaagtttgttatgctttgttttatgtctcaagtagactggcccttgaagagaatatgtactctgctgttgttgggtggagtgttctataaatactgattagattttgtttttcgatgaggttcttgtattcttctttacttttgctgattttttttttttggctatgtggttatcagtttttgagaggaaggttgaaatctccaactataattgtggatttttctgtttctccttcagttctgtcaggttttgcttctgatattttcagctctgttgtttattatgcacatttagtattgctgtgcccctgtctatccctcataatcttctttgctctgaaatctgttttatctgatactaatataaccactcttgttttattttgattggtgtttgcacggtatatagtttttcatccttttacttcaactcacctatgttgttgtatttgaagtgagtttcttgtagacagcatgtgattgggtcatgttttttgttttattttttatccacttaatttttcttttaaatggtgtatatagaccgtttatatttaatgtaaggcttcagtctaccattttatttttttgttcagttggttctctttcattttattttcttttgtttatgatttctttttcctcccttcctgtgggttagttttatatttttgaaattctattttgattcatctgtagttttttttagtgtttctctttgtatagctttgatagtggttgctgtaggtattacatcatacctatacacacacttattacagtctactggtgtcattttgccagtttaattgatgtgcagaaaccttacctctttatatccttttgattccctttttataatatgactgtctcaagtgtttaaccatatcagtcagtgtaatcattctttcttcaaccatagaatataatttagaaaacacaacagaatgaaattgttgtattgacttatatttattatttgctgttacttctccctaatgtttcagtattcctttttatatcatttgctttgtatttagagaacttattgtagccattcctttttttttaagcagggtcttgctctgtcacccaggctggcatacagtggtgcaatttcagctcactgcagccttgacctcctaggcttaagccatcctcccacctcagcgtcccaagtagctgggactacaggtgggcaccaccacacctggctaatttctgtattttttgtagagatggggttgtaccatattgcccaggctggtcttgaactcctgagctcaagtgatccacctgctttggcctcccaatgtgctgggattacaggcgtgagccaccatgcctggcctagccattctttaacagcaagtccgctggcaacaaatgatttccccttcattcttgaatggtatttcagctggatatagaattctgggttggcaattctttcctttcagtacttgaaaaatatgtgtcactaccttctcgtctccctggtttcttatgagaaacctgctgtttgaattgtttttccccccttagataaggtgtcgtttctctcttctttcaagattatttttctacgtttttggaagatgactgatatattttgtcacgtatttgtttgggtttatcctgtttgtggttcattcagctacttaagctgcaggtttatgtttcttaatacattttggtaattttcagtcattatttctttgaatttcagcccctccttccttctcctcttcttttaggactctaatgacaaaaatattaaatcttttgttatagtcccatgggtacatgagtctcttttccattccatttttctctgttgttcagattaggccatttctgttgtttagtcttcaaaatcaccaaatcttctgttctctgctttctactgaacacattctgagtttttaatttctgttatatttttcagttctaattttttttttttttgagacagggtctcactctcgcccaagctggagtgcagtagcaagatttcagctcactgcacactccaccttccaggttcaagcaattctcatgcctcagccacccaagtagctgggattgcaggcatgcaccaccacacccagctaacttttgtaattttagtacagacggggtttcaccatgttggccagactggtttggaactcctgacctcaagtaatctgcgtgcctttgcctcccaacttgctgggattacaggcctgagctgctgtgcccagcctaaaattttcagttgattctttttttatgtcttcttgtttctttgctgagactgtttgtttcatttgtctcaagtatgttaataattgcttatgaggcatttttataatgactactttaaaaatccttgtcagacaattctaacatctatgtcatctcagtgttggtgtctgttgattgtcttttctcgttgaacttgagatttttctggttcttattatgagaaagttctatttaaactgggcatgttggttactatatcatgagatgctggattttatttaaatcttttggtatagtaggcatcttctgacaaatgttttggcagggcatgagacgccctaccacattgttgccagttgatagtgggagttcagtctcctcactaggcctctactggtattaccttggctgggtggggggacagaggctcaagattacctgtttacttctttccagatggcctccactgacatcacagggggtgactcattagttattattggatggtggtataattccagtaggaagggaaggggttttcttgtaactgctgggtgtgggtggatgtattgtttccctacatggtcttcattgacactgttgggtcacagggaggaccttgtgaaatcagacttgtctgaccccaccctggtagtgccttgttataacttggttacggtagaaaggtgaggattcagctgcattttttgctgtactgtttggttggaattgagtggttatcctaacattttctgtcttgctgtgctgcccctttcctggtcctttggctggagggtaggcttttcttggagatttttttgacagcaccttctggagttcttcagcaaccaatctaggatacatgaggcagaaagaaagtctgtaacagctgggctcggtggctcacacctgtaatcccagcattttgggaagtgaggcaggaggatcacttgagcccaggagttgaagaccagtctgggcaacatagtgagaccctatctccacaaaaattttaaaaattagctgggtgcattagtgcatttctggagtcccagctacttgggaggctgaggtgggaggagtgcttgagcccagcaagtcaaggctgcagtgagctgtgatcatgccattgcactccagtgtgggtgacaattcaagaccctgtcgcaaaaaaaacaagcttttaaaaataaaaaggtagcccatgaaactcagtaccacattatcctttatatcctgagggccctacccatctgcctcatccttctgacttttcagagctgccttctgttccttgtatatatacaagattggtaatttgggcttcattaaaattaaggacttctgttcaccaaaggtgtgatagttaattttatgtgtcattttgactgcactaagagatgcccatgcagctgataaaacacttctggatatgtctgtgagggtgctcctgaaagggtatttgaattaatagactgagtaaagaagattgccctcatcagtgtgagtgggcatcatcctacccattgagggcctgaatagaccaaaaatgcagaggaagggcaaatttgctctctctttctttgagctgggacatccatcttatcgagcccttggagattggtaatcatggttcttcagccttcagactcagacagactaggacttataccaactgcccccacccacaaccctacccccggattttcaggcctttgaactgggaccaggatttatacgattagctccctggttttgcagcttgtgaacagtacattgtagcacttcacagcttccataatcacagtgaggctaatgccgtaatatgtctacacacacacacacacacacacacacacacacacacacgcatgtacacacaagttcttaactccttttggttctgtttctctggaaaaccctgactaatacaaacgtcatttcacattaagagtgtaaaggcaagccacaaagttggagaagctatttccaatatatagatataaaaaggtctcatccaggatatataaataactcttaaaaatcaattggataaactagacaacccaatagaaaaatgggcaaaaacttgaacaggactttacaaaagacgatatctgaatggccaataaatgtatgaaagcatggtgatccttattaattatcagagaaattcaagttaaaaatggttttgacaaaagatgcaaaagcaattaaatggagagagcatagccttttcaaaaactggtattgaaacaattagactttcataggccaaaaacaaacctttacttaagccttacccatattttaaaaaatcaagtcaaaaggaatcataaatctaaatgtaaaactattatacttgtataagaaaacagaagaaaatcttctgcatctagggttagtcagagttcttagtcatgatgccaaaggcatataacccattaaataaaaaatcaataattggacttaatcaaaaataaaaacttttgtctgtgaaagactcttagggaaaggaaaagacaacttatagacttggagaaaatatttgcaatttgcatatttaacaaaggactcattcagaatgtataaagaactcagaaagaaaacaacccagttagtaaatgggcaaaggacttgaactgacacttctctgaagaaggctatgcatgtcaaataagcatatgaaaagatagcatcactagccattagggaaatgtaatttaggtgaggctagtggctcaggcctgcaatcccagggctttgggaggctgaggtgagaggatcacttgaggccatgggttcaagaccagcctgggcaacatggtgagaatctgtctttacaaaaaattaaatacaattagctgggcatggtggcacatgtctatagtcataactacttaggaggctgaggaaggaggatcacttgagcccaggaattcgaggttgcagtgagctatgattgtgccactgcactccaacctgggagacagagtgagatcttgtctctaaaaaagaaagaaaatgtaatttaaaaccacatgagttgtcacttcacacctatcagcatggctaaaataaaaaatagtgacaacattaaatgcttgtgaggatatagagaaactagttctatcctacattactagtgggaatataaaataacaaccattctgggaaacaatttggcagtttaaaaaaacaaaactaaacaactaaacatacttgtcatataaccttgcaattacactctcagaaatgtatcccatggaaatgaaaacattttcacataaaaacctaaacacaaatgttcacagcagcttttatttagaatggtcctcaactagaaacaaccaaatgttatttaacatgtgaatggataaacaaattgtggtatatctatgtagtggaatgctgctcagcttactgatccaagcaacaacttatatggatctcatgctaactggaaaatgccattcttgatttgacagaagtataatgatagagaactgatctgtagttgacagggtttagggttaggggaagggcatgaatacgaagggataacacaaggaaggtgtttttttgtgatgacagaacagttctgtatcctgctatggtaatggttatgtgattctacatgcatgataaaattttgtagaactatacatcaaacaaaaaactgatgaaacccaaatgagctctgtacttgagttcataccaacatcaatttcctggttttgacaatgtattgttgttatataagttgtaggttaccattggaagccgagagtgaaggatatatgggagctcgactgctgtaatttttgtgaaccttaaactgtttttgaaaggttataataaaaacaaaaagatagtaccatgagttgtcaaggacctgaacaactggaagcctcatataatgctggtgggaatatgaattggaataactactttatagaacaatttgttcagtttaacagtgcatgtaaataccctatgactcagcaattccactcttagatatgtacctgacagaaatgcttttatcaaaagacacgtataatatggtttataggagcattatgcaaataatgctttatattttaattatgtttgttttgagcatatactttaatactaatacttagtattaagaatatctaaaaaaggtattgggtagtttatctcaatatggacttgcgtattgaagttctttaaggtttcatgtgtgttgtgtgtgtgtgtatgtatgtatgtatgtgtgttttttaacctacatagtttataccattctatatgcttgattcttttgtatagctctatgccatcttttgcttatgtgggatagatattaataactggaataattttggaccagcatttacccatataccttcaagtatgtcctctaatgaaagatgctacagtttattctctgtaatgactatgtgttatagaggtataaagatgaaacttgtcatcataatcccactgaccacagagaaccactattaacattgtgtttatatgttttgtttttaatgcatttgcaattgtatttagtaaggctctatattctgcttttcttccgcataacatagtattttggatttttaatggtaacatagccagagtgtaatttacttctctatgttatacatattgtttaattttcaaccttatgctactgtaaaataacactgtgataaatacattttcttcaaaattggtcaacttttgtgataatttctatagtctgtattcatagatgtgtggtagctccaaattgacataaaacatgaatttagtatctctatttattttataccaggatttttctttagtatataatatgattggtagactaaattgtaaactttttcccatcatttaaatttagagtttctttgcattctagtgtatagtgaatgctataaatgtaattagtatggcattttagtcattaattttctttcatgaaagaaaagaaaaacattttgtgttgattattgagagcttattatattccagggatttttgtcactctgtaagttaccagcaataagcaaattattaaataaattactgtacaatcatccaatgaaatactatgcagctaccaagcatgatgtttaccaagaaatttggggaaatgttcataatacatattgtatatacagttactatcctgactgcaaaatttaaaaagtatatatttagaaaaaaagaaaactgtaggaaatatatcatgatttgaatggaggttgtttctggggagtggaactgagtaattcttttccttagagttgtttttattttcaaaaagtgtttatccaatctttttcaaattaaattttcattaatatcaaagtaatatatttacatatttttaaaaaacagatagttttacaaggcttcaaataaaaaccagtcccgtgaccaaacctctttctacctgtgatttctactttctggaggtaaccaatttcaactcttggcaattcttacttacttacatacatcctttctaaagtgtaaggtagtaatttaccacaagcacaggcacacttttcctcattcgttttcccagtataatttttcataatatttgcctaaattaatttgcagtattttctttattgtggctacgtaaatatttgtaagccacttgaatactgtgattgtttttcctttttcgtgtacttgtttattatattttgctgaagtattcattcgtttttaccatttgcttagttttctatatacctatcaccaattcattcctaaattatcctgtagaaatattgtaaatcctggccaggcatggtagcacatgtctgtaatcccagcactttgggaggccgaggtgggcagattaccttaggtcaggagttcaagaccagcctggccaacatggtgaaaccctatctctactaaaaatacaaaaattaaccaggcatggtggtgttcctgtaatcccagctgctcaggaggctgaggcaggagaatcacttgaacctgggaggcagaggttgcagtgagtcgagattgcgccattgcactcccgcctgggtgacagagtgagtctccgtctcaaaaaaaaaaaaaaaaaaaaaaaaaaagggaaagaaagaaagaaaccttataaatgcttgtgttccaacaaatcaggtaatctatcagtttctttttttttttctttagacacccttcctggagccccgtgtctgtcttcttgcttctgttttatctacctcagtaccttgcatctgtctaacgcctctccttacattctttatgctgtattataaatgttgagtcacccctacatattcacctacttttgcattttccttcattttgatgtacttagtgcccctagctgtacccaatacaatatagactttcaggttacatataaattctctaaatttattcagaaatctgtagataaaaccttgactacattgtaaatatttgatttttcatttcatctttattcttaaatcagacgattttattttccaacaataggattcttcctgggcatatgtattatcatcctgactccttagataatatattattttcttcagtaagtaagaaatgaattctctgaactcttgatagttaaaaaaaaactaagtatcaaaaagtcatattgtaattaaaatatttgtaaagtactaattactgaagcatttattctatattttcattttcagaggacgattatttatcatttctactaaagcaggatctctaggaattaatctggtagctgctaatcgagtaattatattcgacgcttcttggaatccatcttatgacatccagagtatattcagagtttatcgctttggacaaactaagcctgtttatgtatataggttcttagctcaggtaggtttataattctctttttcatattgaaagtttatgtgaaactgataatattttagagatatggaacatatgtgtattacagagagggaaacaaagttggaaataccatttctgtacataaagcagcagaagtcagttttggcttttcttgattttctgttttgtagtgtatccatttctgtgatgtcatctttctcaggttgagattgttttgcatgaacacatttagcagatgctacccccagcagatgcaacccctctcagcctgcctccaaatctgggcttcttaaccagaaactgggttttttttggtagatccttgcttatttgatcttctttagtacataagttgattgacaactttatgtaaactctttcctgttatttgtttatttattcaattttcttttatttttttctttcctgttaagtttaaaacttctgtacattctcatttataatttgtattatatttaatatacatttaatataatgtatacatttaattaatgtagtttatatgtaatggatatggtattttatatttgttttctgtcttgaaattatagaaaataaaacgatataaaggcattttatggtgtttgttgatagcttattatattacattgaaaaggaatcaaactgctctcttgcattctaacttcaatatttacctaaatgttttttgtgtctgtccctttatttctgtttactctggtatctgcctgctgtcctcctcctacagagtacagaaataaataaagcaacacttgaatgcattttggtcagttaatatagaataattatcagtaatgtaattttatttattatggtaaactatgctaaacagatgaaatctttcatgaattaagcaaaattgctgatgagtttttctttatggcaatatactaccataaagttttaccatttcatattaaccagtaaccgtatttatccttgattaagtttcatgcttacaaaattttatttttttgtatattcttccttctttttacaaagggaaccatggaagataagatttatgatcggcaagtaactaagcagtcactgtcttttcgagttgttgatcagcagcaggtggagcgtcattttactatgaatgagcttactgaactttatacttttgagccagacttattagatgaccctaattcagaaaagaagaagaagagggatactcccatgctgccaaaggtaaacatatttagattattggcttaacaaaccaacgtggactaaggaaattttactactgatatcaaatttagtcatctgattaaggctatatttcagaatttttcaaggataataaaatgatatttaatgaattttgtctagaaaattataaatgatagggtgcttgatctgttctccatatagcaccacaaaaagatagtatattctgaaacacatattttatgccacatataatatatctaattagcatattttctaatatactttacacttcaacttttataagaagtagcagacaaattttccaattagaaaaggggaaattacttcgaatttattcatatggtgaatttcgggttgcaggaaaccagttaattttataaacgtgtattatttgctgactttgagaggtatactgtgagagaatactaagaaaaacaagacattgttcagattatctccctcaatccagcagctgaaaagcagatagtcctgttttcattttcaagatgaggaaactgaggttcagagaggctaggtaacttacccaagtttacacaccatattgtaaagctggtcttcaaatcatatctgaccaactcaaaagcattactcttaatcattataattttttgtcctccaaatggagattagaaagttattttcaaatacaagaagcaaagcagaggacctgggatttccagaattgaatgacatttaggatgctttattttagtttaaataaatctggactttaaaatatagaatgctttcacagtcagtaatattgtgtgatataactgttaagatggtataatatagtcagtttagcttatgtcttgtgaaggttaaatactcctcaaatttatggaaaactttaaggtttacaaaggcctgtctcatatacattatctcaggaagctgagatttagagtttgtgattacacaagggtacatgaccagtaagtgttacagctagaatttgaacccagtagttttctttctctcttctcccctccccctctctcccccacccccacctccctcctcccctctctccctctccctcttcccctctctccctctccctcttcccctctctccctctccctcttcccctctctccctctccctcttcccctctctccctcttcccctctctccctctccctctctccctctctccctctctccctctctccctctctccctctctccctctctccctctctccctttccccctctccctctccctctccttctacctctttttgagacagtctcactgtgtcgcccaggctggagtgcagtggcgcaatctcagctcactgcaacctccacctcctgggttcaagcgattctcctgcctcagcctcccaagtagctaggactataggcgcctgccaccacgcccagcaatttttttttctatttttagtagagatggggttttactatgttggccaggttggtcttgaactcctgaccttgtgatccacccacctcagcctcccaaagtgctgggattacaggtgtgagccaccgcgcctggtccttttttttgttcttttttcttttttactttaagttctgttatacgtgtgctgaacatgcagtttgttacataggtatacatgtgccatggtggtttgctgcacctatcaacccgtcatctaggttttaagccctgcatacattaggtatttgtcctaatgttctccctcccctttccccccaccccctgacaggccccagtgggtgatgtaaccctccccatgtccatatgttctcattgttcaactgccacttatgagtgagaacatgcagtgtttggttttctgttcttgtgttagtttgctgaggatgatggtttccagcttcatccatgtccctgcaaaggacttgaactcattctttttatggctgcatagtattccttggtgtgtatgtgccacattttctttatccagtctgtcattgatgggcatttgggttggttccaggtctttgctattgtaaatagtgctgtgataaacatacgtgtgcatgtgtctttatagtagaatgatttataatcctttgggtatatacccagtaatgagattgctgagtcaaatggtatttctggttctagatccttgaggaatcgccacactgtcttccataatggttgaactaacactcccaccaacagtgtaaaagcgttcctatttctccacatcctcaccagcatctgttgtttcctgacttatttaatgatcattattctaactggtgtgagatggcatctcattgtgaacccagtcgttttcaaactgtgttacaaggaaccccaggagatgctttagggactgctaccatgtggctaagcaagtacagaggggccaggcaatgaacactctgatcccgacatcccatttcagtcagagcccctcttttatctttttaatgtattggacttcaacataagatttaattcaaagagaggacgtgcctgctttttaaaaaaaagtttttaaaacacaatgccatgttgcctttctatcacagtaactaaaaactgtgagagatctatccaggaagtacaatcagatacctgaaggagctgataatccggttggggagaaaaaagtaacattcttaaaagggaaagaatgaagtgctgatgtgactggtgctgagtatctttgcttataataggggaaggatggagcattcagatacaattttgatgggagaaaaatcagacttggttggcctataaaagatggttagtatttaattggataaagggaagaatcaagtgtgaatgagagattgaacagtttgggcaaagggacagaggtaagaatttatgtaccaggcttaagggatgatgaaattggcctggcattgatgaagagtggaggttagataagtaggaaagccatgaaaggcaaatggaggcattgcgctttaaaataatgtttactataagttcttgaatgggactgttgtatgatgaatctgggcttttagaaaattagcctggagtgattattgtgggctcgatcagacatttcatgaaaataaatggtagaactcaactgataatagactagcttttaaagggataggcagcgaaaatgttttttttttctttgagacagagtctcactctgttgcccaggctggagtgcagcggcatgatctcggctcactgcagcctccgcctcctgggttcaaatgattcttgtgcctcggcttcccgagtagctgaggttatagacatgtgccaccacacccagctaatttttatatttttagtagagatggggtttcaccatgttggccaggctggtctcaaactcccgacctcagatgattcacctgccttggcctcccaaaatgctgggattgcaggtatgagctaccttgcccagccaaaaaattttatcttaaataatgaagcttagttattcattcattgatttaaactttttggggtgcctatgatatgccaattgtactggtctctaaggatacactcataaataagtctaggattctgttcccaagaagctatagtcttaaaagcttaccttaagcaagtaatatagtaagagttacagatcctataatagaaatctgtgcaggtgccaaggaaggaatattcatttctttcttggaaagtttgggatggatattgatgtgcttgaacagatgttgaaagtagaactgggtaactgtttgcattgctaagacggcagaagagcaaaaggcctttcaagatggggaatagaaaaaaagaagcacatgcataacatggcatgataagtttgaagaacctcaagtagttaaaaataaataagagtataaggagatactggtagagtaagggtgagtgtgggaagaggtaaaagtaaagactggaaaggtaggtgggaatcaaatcatagaaattagtttgtaagttgtgttataggttgtggtatctatttaacaattttaagcaagagactaccgtcacattttcattttagaaaaaaatcattttatgtatcagtgtggaggatggatcagagaaaagaaaatggatattaagatacttgttaggatgctactaaaatgattcaggtgggagaggtaatacaggcctgatatgagatgttagcagtggagacagagaagtactgggcataatatagatactcagtaattattaatgttcccttgatttataattagaatttcatgtaagatttccactagtttaatagaatttgaaaactggtcatctgaaatgggtacgttttgatattcatggcgagggatttcttggtacgtttggatattcatggtgatggattttttggtatttgaagctgcttttattcaaggtattttgaagttggttcctgttattatagtacaattgcaaacaccttccttcttgtccatgatttttaagatgaaagactgctaaaaatgatacattttcatcctttcaattgctgttatctaagtaataattaaattccatgcttttatgaggtttttttgtcttttggtagtcccgaaagcacttctttttaacttacttgatatgtgattactgtatctctttctgcttcatcacttcctccttaggtcattattacttaattcctgttcctccatttctcttcttgttcagtttttacttctctacttctaatttgatttaatacctcagacttaattagccacctgactatttttcttgtctttgtacctctttaaaggcaagaactgcattctgtgcttccttcagtatccttagtgaataatgcaatgcttggcacttttttattattattatactttaagttctggggtacatgtacacaacgtgcaggtttgttacatatgtatacgtgtgccatgttggtgtgctgcacccattaactcgtcgtctaggttaggtatatctcctaatgctatccctcccccctccccccaccccatgacaggccctggtatgtgatgttctccttcctgtgtccaagtgttctcattgttcaattcccacctatgagtgagaacatggggtgtttggttttctatccttgcaatagtttgctgagaatgatggtttccagcttcatccatgtccctacaaaggacaggaactcatcattttttatggctgcatagtattccatggtgtatatgtgccacattttcttaatccagtctatcattggtgggcatttgggttggttccaagtctttgctattgtgaatagtaaacatacatgcgcatgtgtttttctagcagcatgatttataatcctttgggtatatacccagtaatgggattgctgggtcaaatggtatttctagttctggatccttgaggaatcgccacactgtcttccacaatggttgaactagtttacagtcccaccaacagtgtaaaagtgttcctatttctccacatcctctccagcacctgttgtttcctgactttttgatgattgccattccaactggtatgagatggtatctcattgtggttttgatttgcatttgtctgatgaccagtgatgatgagcattttttcatgtgtctgttggctgcataaatgtcttcttttgagaagtgtctgttcatacccttcactcacttgttgacggggttgtttgtttgttttcttgtaaatatgtttgagttcattgtagattctggttattagccctttgtcagatgggtagattgcaaaaattttctcccattctataggttgcccattcactctgatggtagtttcttttgctgtgcggaggctctttagtttaattagatcccatttgtcaattttggcttttgttgccattgcttttggtgtcttagacatgaagtccttgcccatgcctatttcctgaatggtattgcctaggttttcttctagggattttatggttttaggtctaccatttaagtctttaatccatcttgaattaatttttgtataaggcgtaaggaagggatccagttccagctttctacatatggctagccagttttcccagcacaccatttattaaacagggaatcctttccccatttcttgtttttgtcaggtttgtcaaagatcagatggttgtagatgtgtgatattgtttccgagggctctattctgttccattggtctatatctctgttttggtaccagtaccatgctgttttggttactatagccttgtagtatagtttgaagtcaggtagcgtgatgcctcccgctttgttcttttggcttaggattgacttggcaatgcggggtcttttttggttccatatgaactttaaagtagttttttccaattctgtgaagaaagtcattggtagcttgatggggatggcattgaatctttaaattaccttgggcagtgtggccattttcatgatattgattcttcctatccatgagcatggaatgttcttccatttgtttgtgtcctcttttatttcattgagcagtggtttgtagttctccttgaagaggtccttcacatcccttgtaagttggattcctaggtattttattctctttgaagcaactgagaatgggagttcactcatgatttggctctctgtttgtctcttattagtgtataggaatgcttgtgatttttgcacattgattttgtatcctggactttgctgaagttgtttatcagcttaaggagattttgggctgagacaatggggttttctagatatacagtcatgtcatctgcaaacagggacaatttgacttcctcttttcctaattgaataccctttatttctttctcctgcctgattgccctggccagaacttccaacactatgttgaataggagtggtgagagagggcatccctgtcttgtgccagttttcaaagggaatacttccagtttttgcccattcagtatgatattggctgtgggtatgtcataaatagctcttattattttgagatacgtcccatcaatacctaatttattgagagtttttagcatgaaggttgttgaattttgtcaaaggccttttctgcatctattgagataatcatgtggtttttgtctttgcttctgtttatatgctggattacgtttattgatttgcatatgttgaaccagccttgcatcccagggatgaagcccacttgatcatggtggataattgcttggcacttttatctagacttttttgaaattctagttgtctttatagtgttccttagtgatccatatatcattgaaaagcagtgttggaattagacttacttttcaagcagtaaaattgagatgaagattggttagtctgtcacagtgggtttgtggaaggaagagaattcgagctttaatttatatcttcagttagattcttaatttgctatcttagcttcattcaccactctactcattactttattatttttattttattttatttcatttcatttcatttcatttcatttcatttttgagacaaggtctcgttctattgcctaggctggtcctgaactcctggcatcatgtgatcctcctgccttggcctcccaaagtgttaggattacaggcatgagccactatgcctgtccactttattattttaaatcccctcattggattcttactgttgctgcttttcccttttggaaatataatagccttgacgtcctgtgaacctattttttaataagttgatttaagggcctcctgaatcatctctaccaagtatctgtgcatctttttagttgttcaggataatgtttctcagccattttgaaactgtagcatgatctagacttataagtagtttaacacaagtttctagcaataccgatttgttaacttattcttaatggcttgtgtttaaaatgttaaattaatagctaacctctgttaacgtttatgtaaatgttaaattgatagctaacctgttaacatttatgtaaattatgttagagaaagtaccttttctggtaataaacttattaattatacagatatcagagatgaaaattttggtcaaggtcatgttttattttattttgagacagtctcactctgtcacccaggatggagtgcagtgctgcaatctcagttcactgcaacctccgcctctggggttcaagtgattctcgtgcctcagccacctgagtagctgggattacaggcatgcgccaccacgcctggctaatttttgtatttttcatagagatgggctttctccatgttggccaggctggtctcgaactcctggcctcaagtgatcgacccacctcggtctcctaaagtgctgggattacaggcatgagtcaccacctgcagccaaggttatattttataatatgcttaagtgggtgttttgttcctcttaagtacagtatacacagcctactctgtaccttttattaagaaaacaaaagccaataaaactggcatagaaatgtttttatacttcccttttccagcactggactacgtatgtctttttaaatgtgaactacttgatgattacagggagaacaaaatggggatttaaattaaagtatcttaagtgaggctttaggtttgttttctctacgctgaatttgtgtgcagtgttctcccctttctttagtcctgtattcaaactttaatacttcaaagcataatttactgaacagagatgttattgtacagttttattagccggcagatggtaatataaggtttcaccttagtcattcttaataccagtgtgaaatacattccattaaaataatttgatgtaaagtatgaaatagctaatccacttatttcaggaactttctggtaacctgcctacatttacttttgagaataaaggttcaaaataacacatttaattgtagagcaagtgttagtagcctatggggtatgaaccacatggtggtatgtgaacctaatatttgttgtcatattcttctaggaagccatgctcataattgaagcatatataaggtttgatgtcattgtctcctacttctttgccttttttttaatcacaggttttggatttttttgtttaataaaacaagtttgaatattattcctatctttgtatttactagtataaaatgattgttattcatctgtatatgaatagaccaccagaaaaaataacgggcatcagaaaaattgtttgaattctaccatttctttgcagattacaaaagtgtcctattcgttttttgttggggtgattgatgccaagtaaaaagagcagcttgtttaagccctctcctaaataacttgccaaccacccttttcagatgtaatcttaggcaaaccatgtaagctttctaagcctcatttttctgaagaaaataagaatagtgccagtacttctctcacaaaggaggtaattcatgtaaacatactacctagcacatagtaagtgttcaaatgttagctgctgtttttgtttccataattgttattaatattaccattatagtaggttcatttctctgaaatacttatggacttacatttttggaatttcagaggagtcatgtgaggtcctgatcctgagtagaaaattaagcttgatatatgacagaccagtagaaaactaaaaacatttaggagccagaggagatcatctcagctaagctgcagaagacataggtatttgaggcttgcattcccccagagatcagttgtaatcaggaaggaatatattagatattgatcttcactttcaataaagttagcatgcagttgacaaagaacattgaaaggggttttttttcttaaataatataagcaactttagaataaagtctaccttatagccagctgatgcttctgtagtaattttccaaagtaaagagatgcttctattttccctccacaaactacacaataaatacttgttaacagactgaccatactttatttatagtgctgttttgtcttattttttattgtaccaccttatgacacaagaaaaactattaaggagccatttaccaagtcttttagggaaaacatttgggttacagaaaccatggagccaatgataccctgagatggcagcctccctaacgctggcaagctgtcttataaataattgtccatggaaacatcaatgtagataaggcagccttgctggcagtgttggggtggagggcagagttggggatggtatgcaagattctattggggagagtttaggatagactttaaaaagtgtctccttatggagagttggaagtactagaaatatttgctgcttaaggtcatagaaatcctgaaatttaaaataccaggtttgcatttaataaatgctcatttaataaatgaattaaatggtaagcttttttactttataggcaaattaaaatatctattctctctagaatatgaacttcctattagcctaggaaggcaagaactatattaatgcatcttcatcactctatccccaatacctggcataatacataatatagcacatagcaagtattcaataaaaatgtgctatgtgaacaaatgaatttttgtgctaaaattgcaagctaaatgttgtgaggcaatagttgacatgcctttgaaatagtgtttttccttgtgtgtacttcttggagaatcacctggtggcttgattaaaaatgcagattcctagtcggacacagtggcacacacctctaatctcagcactttgggaggccaaggtgggaggattgcttgaatccaggagttcaggatcagcctggtcaacgtggcaagactctgtctctacaaaaaattagccaggcttggtggcatgcacctgtagtctcagctgttttggagactgagttgggaggatcccttgaacctaggaggtcgaggctgcagtgagcaagtttgtaccactacactccagcctgggtgacagagtgagaccctgtctcaaaaaaaaaaaaatgcagattcctggcttcatctaagacctactgaatcagaatttctggaggtaggccttgggaatctatttttgacaaggtctaccactcttgtgtgtacaaggtatgtagtagtataatttgcctttacaatagttatcagctaaacctttgaattaaaaaaacaaacagtatctaagctttattgagcaatgtttatgccaggaactgtgctaaggattttactagcattaccttatttaatccttacaaagcaggtacaattttttctattttctgatgaaattatggcatggaaagtggtggcaccggggcttgaactcagtgctgtgactccagactccacactctttaaccattacactatactatcctgacattaatattctatatgattaagcttgcggagaagtaaattgaggtttgatatgactttacaccgttttaatcaatactgtgggtttatggaaaggcacagtgttatcaaggtgtataatattggggagggtatggatttcatctagttactacacaatcttacagtgtcagagctgatcctagtcctccttgattgtctttggtgctgaacttactgatccttagccctaagtcagtgtagcagagtggttaaggacaggggtcctggggcaagaccagggtttgaatctttatcttagtcaaaatatctgacttctatgcctcagttttttcattatacttctgagaaatgtatgtccattagttcttcaaaaatatcatcctttgcatttttatttttgtctctttctgagactgttactatctgaatgcctgctcttctagcctccatatcttttagcttttcttttgcattcctatttctttattctttcttactatcttctggaagagtatctcagtcttatctcctaattcactaagatattcaactgtaccccgcttgctgtttatactgagttattttttcaactgttatttttttttcctaatatttcatttagactcttaaatttgtttgaattccatattggtaatatcttcctttatttcatctgtttcagtaactatgttttagataaaatatgatgccagttgttaccccagggatgtctgtgtgtgtgtacatgcacatatgcacacattgtctataagtttctggaattcatattgccttttcccttctatagtttctgcagagttggttttgagggcaggagctagcagctcatgctggtttgccatgggagtagtttcgtccataatatggggatgatgattatatgtgcttcatagagttattatgaaaaattaaatgaagttcttagaacagtgctggtatgcagccatgcattcagtttagctttaaacaaatctacagatggctaagtttccagatcccaactttcgaatatactcttttgaaaagctagattatggttttgatttgcatttctctgatggccagtgatgatgagcattttttcatgtgttttttggctgcataaatgtcttcttttgagaagtgtctgttcatgtcctttgcccactttttgatggggttgtttgtttttttcttgtaaatttgtttgagttcattgtagattctggatattagccctttgtcagatgagtaggtttattcacgatagcaaagacttggaaccaacccaaatgtccaacaatgatggactggattaagaaaatgtggcacatatacaccatggaatactatgcagccataaaaaatgatgagttcatgtcctttgtagggacatgggtgaaattggaaatcatcattctcagtaaactatcgcaagaacaaaaaaccagacaccgcatattctcactcataggtggaaattgaacaatgagatcacatggacacaggaaggggaatatcacactctggggactgttgtggggtggagggaggggggagggatagcattgggagatatacctaatgctagatgacgagttagtgggtgcagcgcaccagcatggcacacgtatacatatgtaactaacctgcacaatgtgcacatgtacgctaaaacttaaagtataataataaaaaaaaagaaaaagaaaagctagattatagagctaatcagaagggggaagggtactgaccctctcttttagagtttgagctgtcccaggattctgccatatattctaatgttttctgtctctcttgttgcaaggaaaatatgaaaaaaattgttaattaattttcaaaaattcccattgtgaacatattcaaaccagaaaaatatattcatatacccatccgctagatttaccaattattgttttgccacatttgcctcatctatttttctgaaatcttttaaattacaagtatatggcatttcacttgtaaatacttcagtatataatacatctttgaaatagtaagacatttcttatataattacaataccataaaatgaataacttcctaattccctaacaccatctcataacacatccatattttgattaccctgcttgtgtccaatatatatatatatatatttaatattctaagttctggggtacatgtgcagaaagtacagttttgttacatagttatacacatgccatagtggtttgctatacccatcaacccgtcacctacattagatatttctcctaatgctatccctcccctagatccccacccctcaacaggccccagtgtgtgatattcccctccttgtgtccatgtgttctcattgttcacctcccgcttatgagcgagaacatgtggtgtttgattttctgttcttgtgtcagtttgcagagaatgatggtttccagtttcatccatgtccctgcaaaggacatgaactcgttcttttttatggccgcatagtattccatggtgtatatatgccacgttttctttattcagtctgtcattgatgggcatttgagttggttccaagtcttcgctattgtgaatagtgccgcaataaacatatgtgtgcatgtatctttatagtagaatgatttataatcctttgggtatatacccagtaatgggatcgctgagtcaaaatggtatttctggttctagatccttgaggaatcgccacattgtcttccataatggttgaactaatttacactcccaccaacagtgtaaaagcattcctatttctccacatcctctccagcacctgttgtttcctgactttttaaagatcgccattctaactggcatgagatggtatttcattgtggttttgatttgcatttctctaatgagcagtaatgatgagtattttttcatgtctgttggctgcatatatgtcttcttctgagaagtgtctgttcatatactttgcccactttttgatagggttgtttttttcttgtaaatttgtttaaattctttgtagattccggatattagccctttgtcagatgagtagattgcaaaaattttctcctgttctgtaggttgcctgttcactctgatggtagtttcttttgctgtgcagaagctctttagtttaattacatcccatttatcaattttggcttttgttgccattgcttttggttttttagacatgaagtctttgcccatgtcctgaatggtattgcctaggttttcttctaggatttttatggttttaggtcttatgtttaagtctttaatccatattgacttaatttttgtataaggtgtaaggaaggggtccagtttcagttttctgcatatggccaaccagttttcccaacaccatttattaaatagggagtcctttccccattgcttctttgtgtcaggtttgtcaaagatcagatggttgtagatgtgtggtgttatttctgaggcctctgttttgttccattggtctatatatctgttttggtaccagtaccatgctgttttggttactggagcattgtggtatagtttgaagtcaggtagcatgatgcctccagctttgttctttttgcttagaattgtcttggctttgcaggctcttttctggttccatttgaagtttagagtagttttttccaattctgtgaataaagtcagtggtagcttgatggggacagcattgaatctataaattactttggtcagtatggccattttcacgatattgattcttcctatctttcagcatggaatgtttttccatttgtttgtgtcctctctttatttccttgaacagtggtttgtagttctccttgaagaggtctttcacatcccttgtaagttgtattcctaggtattttattctcttagtagtaattgtgaatgggacttcactcatgatttggctctatgtttgtctgttattggtgtatagaaatgcttgtgatttttgcacattgattttgtattctgggactttgctgaagttgcttatcagcttaaggagattttgggctgaggcgatggggttttctaaatatacaatcatgttgtctgcaaacagacaatttgactttctcttttcctatttgaataccctttatttctttctcttgcctgattgccttggccagaacttccaatactatgttgaataggagtgatgagagagggcatccttgtcttgtgctggttttcaaagggaatgcattcagtttttgcccattcagtatgatattggctgtgggtttgtcataaatagctcttattattttgagatacgttccatcagtacctaatttattgagaatttttatcatgaagggttgttgacttttgtcgaaggtcttttctgcatctattgagataatcatatggtttttgtcattggttctgtttatatgctagattacatttattcatttgagtatgttgaactagccatgtattgcagggatgaagccgacttgattgtggtggataagctttttgatgtgctgctggattcggtttgccagtattttattgaggatttcatggatgttcatcagggatattggcctgaaattttctttattttgttgtgtctctgccaggttttggtattcaggaggatgctggcctcataaaatgagttagggaggattccctctttttctattgattggaatagtttcagaaggaatggtatcagctcctctttgtacctctggtagaattcagctgtgaatccatctggtcctggacttccttttgtttgtgggctattaattactgcctcagtttcagaacttgttattagtctattcacagattcgacttcttcccggtttagacttgggagggtgcatgtgtccaggaattcatccatttcttctagattttctagtttatttgcaccaaggtgtttttagtattctctgatgttagtttgtatttctgtgggatcagtggtgatatcccctttatcattttttattgcgtctatttgattcttctctcctttcttctttatcagtctggctagcggtctatctattttgttgatcttttcaaacaaccagctcctggattcattgattttttttgaaggtttttttatgtctctatctccttcagctcttctctgatcttagttatttcttgtcttctgctagcttttgaatatgttgctcttgcttctctagttcttttaattgtgatgttagagtgttgattttagatctttcctgctgtctcttgtgggcatttagtgctataaatttccctctacaggctgctttaaatgtgtcccagagattttgatacgttgtatctttgttctcattggtttcaaagaacttctttatttctgccttaattttgttatttacccagtagtcattcaggaggaggttgttcagtttccatgtagttgtgcagttttgagtgagtttcttaatctcgagttctgatttgattgcgctgtgttctgagagactgtttgttatgatttccattcttttgcatttgctgaggagtgttttacttccaattatgtggtcaattttagaataagtgcaaggagttgctgagaagaatgcattgttctgttgatttagggtggagagttctgtagatatcttttaggtccatttggtccagagctgagttcaagtcctgaatatccttgttaattttctctcattgatctgtctcatattgacagtggggtgttaaagtctcccactattattgtgtgggagtctgagtctctttgtaggcctctaagaacttgctttatgaatctgggtgctcttgtattgggtgcatatatatttaggatagttagctctttttggtgcattgatccttttaccattatgtaatgcccttctttgtctcttttgatctttgttggttttaaagtctgttttatccgagattagcattgcaactcctgcttttttttgctttccatttgcttggtaaatattcctctatctctttgttttgagcctatgagtgtctttgcaagtgagatgggtctcttgaatacagcacaccaatgggtcttgattctatccaatttgccagtctgtgccttttaagtgggggaatttagcccatttacatttaaggttaatattgttatgtttgaatttgatcctgtcattatgattctagctggttattttgcccattagttgatgcagtttcttcatagcgttgatggtctttacaatttggcatgtttttgcagtgtcttatactggttgttcctttccatgtttagtgcttccttcaggagctcttacaaggcaggcctggtggtgacaaaatctctcagcatttgcttgtctgtaaaggaatttatttctccttcgcttataaagcttagtttagctggatatgaaattctgggttgaatattcttttctttaagaatgttgaatattggcccccattctcttctggcttgtaggatttctgcagagagatctgctgttagtctgtggtggtcgtttctgtttgttatgtctcttttttttttagcgtattcattttctcaccctccattctggatttgtttgattatttcctggcggtgtttgaacttattctacctcttatatgttctacctcttatatatcctgtacactagaaatcagaaattagatgtaaaggcttgattagatttatgacatacatttttggcaagaatgtcttaggaatgacatgtaaaaaggggttaatatttttttaaaaaccagtatgggaaagggagtaatatatatattgagtgcttatactatctacttttaaatacattgtctcatttactccttacaatagctctgagctatagatgatattattcctttgtagtaaaggatcgcccaactattaaggagcaaagtggccaggtgcagtggctcatgcctgtaatcccagcactttaggaggccgaggcaggcggatcacgaggtcaagagatcgagaccattctggccaacatggtgaaaccctgtctctactaaaagtagaaaaattagctgggcttggtggtgctcacctgtagtcccagctactcgggaggctgaggcagtagaattgcttgaacccaggagacggaggttgcagtgagctgcgattgcgccactgcactccagcctggcgacagagtgagactctgtatcaaaaaaaaaaaaaaaaaatggagcaaagttagcattcagaaagagaagaaaataaatccaacaaggccctttacctttacttaaacttaaaaattactaacaaatcacttaatgtctgcgcctcagtctctggtaaagtaagagcagcaaattaacttacttccaaagtttcttatagttccaacattatttgatcctcacaattgctcaggctactgtgtttttcattttaggtaatgagaggtgttctttatgcatcagctaacttttttaatttaaaaatttctttatttttatagatttagggagtacaagtgcattgtttttaaacagatatattgcacagtggtgaagtctgggtttttagcgtaaccatcacctgaatagtgttaattgtacacaatacgtaatttcttatccctcatctccctcctaccctcccaccttttggagtctctagtgtctattattccattctgtttgtccctgtgtgcacattgtttagcccccacttataagtgagaatatgtagtatttgactttgtatttctgagttatttccttaagataatggcctctctagttccatcaatgttgtggcaaaagacatgatttcatttatttttatgtctgagtagtattccatggtgtgtgtgtgtgtgtgtgtgtgtgtgtgtgtgtgtttgtgtgtgtatacacacatttccttttttatccttcagcttttaagttcgggggcacatgtgcaagatgtgcagatttacatgggtaaacgtgtgccatggtggtttgctgtacagatcacctcaacacctaagtattaagcccagcatctattagctattcttcctgatgctctccctcccctcaaccctcaccccgacagtccctagcgtgtgttgttcccttcaacgtgttcatgtgttctcatcattcagctcccacttataagtgagaacatgcacataccacattttctttatccagtcatccattggtggacacttaggctgattccgtgactttgctattgtgtatctgctaagtttttaaaaatacatatatatatattcaggacaggtaataactattggtctttccaaagttatgacagccatatatctaggattttcttggacaactccaatatcagataatttgtcctgtcaaacatctcaattttttattagaaaaacttggttagggtgtaaaacacctctgtatagaaatatgttttttttttaagagatagagtctcactatgttgcccaggctggtcttgaactcctcagcccaagcaatcctcccgcttcagcctcccaagttgctgaatctacaggcgtgcaccaccatgccaggctcttttctttctttttttttctttttaaggtgagggtcagctttcacactattagaaaaggtgttagaaataatagaaagtggtaaataacaccagtagagttctcccagaagccagccaagagaagagagtattttgatgaagagagtgattaaattctgtcacatgttactgatgagtaagataggatcaggtctgataattgaccaattagatttagtgacacaaaggtcattggtaaaccaggcactgtactcagcacttcatgtgtagtatttaatctccacaataatcccatgaagtagatgcttagtagcccattttatataccagaagactgagggttcagcaagttaacttgctcaaggacaaagggctaataagtggtggaactaggattaaaatctgcttgagactcactgttcaatacaagagccactagctccatatggctacttacatttacattaaaattaagttaaaaaatcagtttctccatcacattagtcacacttcagatactcagtagtcacatgtggcttgtagctactgtcttggatagtgcaaacacagaacatttccatcgttgcagagagtactattagagagcagtattccagagcctgtgatcttaatcactacacctaaagcctcccagttgacaaagttaccacctttttttggtgtgtgtgcacgtgcgtgtgtgtgtgtgtaagtatatataatttaaatcattccattaaatttacctctgaaattcaaaagactgaaacagatcttctttttatcaaataagttgattgcagagattatattggtgtttacatttcaggcaacctgctcatgaaattatccattgtagagagaaacctgggaaacaaagctatacgtcctttaatttttttccccattttcatttaaagttcagaagaacataatatgttggaatgatcaatgattctgaattaatatagatatttgaatgtcacagtatctgtatattaatatcctaaagtggtgttactatattggttaggttgactgattcatacatgtaagtcttttaacactcctggagtaagagtagcaagaaactgaagctatgatccttttaagggtttaagtaggtgaatacctcacttttgtctcttccattactagtgttttcatgaccaagttttttacatcagatttattattttggacccttaaaggaatataaattgcaagagagattttgatcagtgtaagaattactagatggccttatttatttccttctttattattgtacttcttatcttttattaatgttttctttctctaagatatatttgaaagccaggcatggtgacacacccctgtagttccagctactcaggagactgaggcaggaggattgtttgagctcaggggttcgaggctatgtagtacataatcacacctatgactagccactgcattccagcctgggtaacatagcgagcccctgtctcttaaaaaacaaaagatgtggccaggcatggtggctcacacctgtaatcccagcactttgggaggctgaggtgggcggatcacttgaggtcaggggttcaagaccagcctggacaacatggtaaaaccctgtatctacaaaaatacaaaaaaaaaaaaacacaaaaaaattagccaggcatgtggtggtggcaggcgcctgtaatcccagctacttgggaggctgagccaagataattgcttgtacccaggaggcagaggttgcaatgagctgagattgcgccactgcactccagcctgggtgacagagtgagactctgtctcaaaaaaaaaagacataatttaaactgctaaatagctgctttcattcctatttcatatcttctgtttcctttttacattgtacctataattgagttagagaatgtaacaatgtttgtgaaatgttaactcaagattgtgtagaatgaaaattgagtttcgattcaggctatacttggaaagctgcaacctctagaatgtcactgcagtcatataaaatctagaatgatgactttctacctcacagtggcatgtggcatatgtaatagttgtaatggatatccaatttttaaaggtaaattgctaaatatagtatctagttctttaagtgttaaggagaaaacattcttatcaaaggaggcttttaccttccacctaagtcattttggcaggcctgccttttctttcatttaaagtgataagttctgtagttgtcactatcttattcataccaacaatttgggaatctggatatatttataaatgctctttggcaaaggttatgtgctcgtgaccaaaaaatctgatacaaggtgttatgtgaatttcattcaataagctctctagttacttatcaaattcactgcattttttccagcgtagtttgggaagaaagaaccttcaaatttgaaagtagaggctttttgaccaggaatattaaatttctttactaagaagctagatttatttaagcaataaaaggaatttttcatagctttttgagtgggtcatgtggcagttaagtattctggtgattttatttccagatattacaaaactcaaattgaaagtaatggcaagcaaaatatttttgaaacatggcaaaccccctcccttacccccaggcaaagccttgattatttttttagatattttattttcaaggttgaatttcagaattaattagatgggaatttttgtcagcttgccaaatactttaaacttctaagtaaattaacttaaacttataatttatcattaattttgttttattaattgaactagtcgttttaaaagcttaaactaatttagattgtgagctagaatatagaccttgcttttccctgtgtataagctttttcacttatttaaggaaaaaaaagtttagacaaagaaaagtaaaggtacacatttggatgtaatttaaatctcattttgatgactgttggcttagtgattatagattctgctccactattgttttcaataatagtgttactctagcaactaatataaatgcatgcttttacaggataaaacaaaaacctttccaccagttgtgttgtgtattgggatgaaattttctttattaacttttataacttgctctggactttgcaaaactgttttttcccaaagaaataatctgaagatcctgttacaaatacttttttgtccccttaatttcattatttgtttcttatattgatagtatgctgctattaatttaaaaggggaagatttagaaacagtttgtatcagaaatcctatgtcttttttttctcttattcatgtcttacatagcactctggaggaaagaaagacttctgccttcctgcttatgaactacataaatgattttcaatttaaaaaaccagttaacttacttgcacggtcttttctttgttaaaatgaaaattatggaaagcatgcttatctttagtctttgaattttttggcataatcatataaagaagtgattgaaatacattaaactttattcattaacccttgttcgcagatttggtaataaaaactggaagcagtcttaatgttttaataaactcttaagtaagggaatgattaaatagatgataaagtataactatataagcactgtgcagctattagaaatgatgaaggtttggatttgatgtaaaatgatatccacggaaaggtattaagagataagagtatgtttcaaaactacatatacttcaattccattttttttctttcaacttttaagttccagaatacatgtgcagctttgttatgcaggtaaatgtgtgccatggtgggttactgcacagatcatcccatcacccaggtattaagctcagcatccattagctattcttcctgatgcactccctcccccaaccccccacaggtgccaagtgtgtgttgtccccctccatgtgtccatgtgttctcatcgatcaggtcccactttataagtgagaacatgtggggtttggttttctgttccttcattagtttgagaataatggcttccatctccatccatgtccctgcaaaggacatgatcttgttcctttttatggctgcatagtgtgtatatgtaccatctggtatatgtaccacattttctttatccagtctatcattgatgggcatgtaggttgattccatgactttgcttttgtaaatagtgctgcagtgaacatacgcatgcatgtatctttataatagaatgatttctattcctttgggtatatacccagtaatgggattgctgggtcaaatgttatttctgcctctaggtctttgaggaatcgccacactgtcttccacaatggttgaacaccaacagtataaaagtgttatttttctccacaacttttccagcatctgctgttttttgactttttagtaatagccattctgattggcatcagatggtatctcattgtagttttgatttgcatttctctaacgatcagtgatgatgagctttttttcatatgtttataggctacaagtgtgtcttcttttgagaaatgtctgttcatgtcctttgcctactttttaatggggttgtttctttctcatagatttgtttaaatgtcttgtagattctggatattatacctttgtaatatagatagattgcaaacgttttcttccattttgtaggttgtctgttcgctctgatgatcgtttcttttgctgtgcagaagctttttagtttaattagatcccatttgtcaattttggcttctgttgcaattgcttttggtgtttttctcatgaaatctttgcccatgcctatatcctgaatggtattgcctagattttcttctggggtttttatagtttggagttttacatttcagtctgtaatccatcttgagttaaattttgtgtatggtgtaaggaaggattctagtttcagttttctgcatatggcttgcctgttctcctagcaccacttattaaatagggaatcctttccccattgctcgttttggtcaggtttgtcaaagagcagatggctgtaggtgtgcagtcttatttctgggttctctattctattccattccattggtcgatgtgtctgtttttgtaccagtaccatgctgttttggttactgtaggcttgtggtatagataaaatcaggtagcatgatgccttcagctttgttctttttgcttaggattcattggctatttgggctcttttttggttccatatgaattttcaaatagttttttttttctaattctgtgaagaattgtcagtggtagtttaatgggaatagcattgaatctgtaagttactttgggaagtatggccgttttcacactattgattcttcctatccatgagcatggaatgtttctctatttgtttgtatcctctctgatttccctgagcagtggtttgttgttctccttgaagaggtccttcacttcccccttgctagctgtattcctaggtattttattctctctgtagcaattgtgaatgagagtttattcatgatttggctctttgcttgcctgttgttggtgtataggaatgctagtaatttttacacattgattttatatcctgagaatttgctgaagtttcttatcagcttaagaagcttttgggctgagacagtggggttttctagctatagggacatgtcatctgcaaacaaagatattttgacttcctctcttcctatttgaatatactttatttctttctcttgcctgattgccctggccaggacttccaatactacgttgaataggagtggtgagagaaggcatctttgtcttgtgccagttttcaaggggaatgcttccagcttttgcccattcagtatgatattggccatgggtttgtcgtatattgctcatattattttgagatatgttccttcaatgcctagtttattgagagttttaaacaatgaaggcatgctcaattttattgaagatgttttttgcatctattgagataatcatgtggtttttgtgtttagttctgtttatgtgatgaatcacatttatttatttccatatgttgaaccaaccttgcattccagggatgacgccatcttgatcatggtggataagctttttgatgtgctgctggtttcattcagtttgccattattttattgaggatttttttgcatcaatgttcatcaaggatattggcctgaagttttctttttttgttgtatctctgccaggttttcatatcaggatgatgctggcctcatagaatgagttacggaggagtccttcctctgtaatttttggaatagtttcagtattcagctcctctttgtacctgtggtagaattcggctatgaatccatctggtcctgggctttttttggctggtaggctatttattactgcctcaatttcagaacatgttactagtctattcagagattcagttttttcctggttcagtcttggagggtgtgtttgtccaggaaattgtctgtttcttctggattttctagtttatatgcgcagaggtatttatattattctctgacggttgtttgcatttctgtggggtcagtggggatgtcccccttatttctgattttattttttatttgatttttattttatttgattcttctttcttttcttcattagcctagctagcggtctaactattttattaatttttttaagaaaccacttcctggattcgttgaatttcttttgttattttttttttcttaggggttttccatgtctctgtttgcttcagctcagctctgatcttagttgtttcttgtcttctgctagctttggggtttgattgctcttggttctctagttcttttagttgagatgtttggttgttaacgtgaaatctttctagttttgttttgtttgtttgtttgtttgtttgtttgttttgagacggagtctcactctgttgcccaggttggaatacaatggcacgatctcagctcactccaacctccgcctcctgggttcaagggattctcctgcctcagcctcccaggtagctgggattacaggtacctgccaccacgcctggctaattttttgtattttttagtagagatggggtttcaccatgttggccaggctggtctcgaactactgacctcaagtgatccacccgcctcagcctcccaaagtgcagggattacagacgtgagccactgtgcccagtctttctagctttttgatgtgggcattttagtgctataaatttctctcccagagattctgatgtgttttctctttgttcacattagtttcaaaaaatttcttgatttctaccttaatttcattatttacccaagagtcattaaggagcaggttgttcaatttccatgtagttctgtggttttgagtggatttcttattcttgagttctaatttgattgcgctgtggtctaagagactgttatgatttcagttcttttgcatttgctgaggagtattttcctattatgtgataaattttagagtatgtgttgtgtggcaatgagaagaacgtatattctgttgtttttgggtgaagagttctgtaaatatctatcaggtccacatgatgcagagctgagttcaggtcctgaatatcctcgttaattttctgtctcaatgatctaatattgtcagaggggtgttaaactctcccactattattgtatgggagtctaattctctttgtaggtctctaagaacttgctttatgaatctgctttagcatcatcgtgatgctagctggttattttgcagacttgtttgtgtggttgcttcatagtgtcactggactgtgtacttcagtgttttttttagtggctgataatggttttttctttccatatttagtgcttccttcaggacctcttgcaaggcaggcctgctagtgatgaatgccctcagcatttgcttgtctaaatgggatcttatttctcctttgcttatgaagcttggtttggctgtatatgaaattctgggctggaatttcttttatttaagaatgttgaatattggcccctaatctcttccggcttacaggttttccactaagaggtctgctgttagtctgatgggctttcttttgtgtaagtgacctggcctttctctctggctgccctcaacattttttctttcatttcgaccttggataatctgatgattatgtgtcttggggttgatcttctcgtggaatatcttactggggttctctgcatttcttgaatttgaaatttggcctgtcttgctaggttgtggaagttctcctcgatgatatcctaaagtatgttttccagcttggttccactctccctgtcagttttagggaccccagtcagtcgtaggtttggtctccttacataatcacataattctcagaggttcattccttttcattcttttttctctattcttgtctgcctgtcttatttcagaaagatagtcttccagctctaagattctttcctcaccttggtctcttctgctattgatagtttgcattgtgaagttctcatgttgtgtttttcagctccatcaggttggttatgttcctctctaaactggctattcttgctatcagctcctgtattgttttatcgtgattcttagcttctttgccttgggttaaaacatgcttttttttagcccagcgatatttgttattactcaccttctgaagcgtatttctgttatttcatccttctcagcctcagcccagttctgtgctcttgctggagaggtgttgcagtcatttggagaagaaaaggcactctggctttttgagttttcagcatttatgcattgattgtttctcatctttgtgggcttatctacctttgatccttgaggttgctaacctttgaatgggttttttttcggggcctttttttgttgttgttgacattgctgctgttgttttctgtttgtttgtttttcttttaacaatcacgccaccctactgtagggctcctgtggttagctgggggtttgctccagaccctagtttcctcggcttctccagcacttgcaggaggcggctggcaacctgcactggaagatctcacccagtcaggagggatgggatcagggacccacccaatgaagcagtctggttgcttcttggtagagcaggtgtgttgcactggggtggacccttttcttcctctgtaccacctgtattctccataaccagcaagctgaaatggctgatttaacggaagcacagagatggccgctggccctcccctggggagctccctcccatggagagatcagatctctgtctgcaggagtgggtcgggacctgtcaaagaagcagtctggctacaatctggcaaggcagctgcgctgtgccttgtgcggggaaggagggggtgctccttgtctgggtggtctgcactctccacaacggggaggctggaacaactgagtccccagaaaccacagagatatcagccgccccccacccccccaccacccccagctccctcccagcgagagatcagatctctgaccctgcatgggaagtcctgctcagtttggagtgggtccgtctggttgaagaagcagtctggcccccttatctggcaaggccactgcactgcgctgtgggcggcccctcctcctctgggccgtgtccactcttcacagctggcaggctgtattggctatttcccctgaattgcagagatggcgaccgcccctcccgctggaacttggtcttgtctcaggcggacttcagccctctgctgttggctagctgagattccaagccagtgggtcttagcctgtgaggtgcgatggaaatggggcctgccgagccatgctgcttggctccctgtattcagaccccttcctagggatgtatatggatggattttatgccttggcggggatcccggggcaggagcatgcagaactcccagatctctgtgtgcgcctgagctgctgttttgctgagactccacacagctctgtgtatcagacccaaggtcctggtggaatgggttcacaacaggatctcctgctccgcatgttgcaaagatccatgggagaagcgtggtggcttcctgagcgggttgcacaatcactcactgcctcccctggctgggggtgggggttccttttgctccacgtggctcctggatgggccgtagcccttctccttgctctccatgctttttgcctattcagtcccaatgtgagaacctggatatttcatttgaaggtattggattcattcaccccttttcatgcctctctgtgagtgccacagaccacagctgcttctcatcagccatcttgccctttgtccagttccatttttatgcaaaggtgtgtgtgtgtcaatgtgtggaggaataaaataaaaaatggtactggtagttatttcctggttttgtaattggatgttagtattgtttgcatttctttgttttgttcggttctttgaaaagaggattatagtagccaggatggaggtaatgttttaggcaaaaaatctgaaactttttaagatagaaaacaaacaaattcacatgtacttttcctgtgacttacattggcatttcagttgactgtaagtcaaaaggaaagttattgcatcattagaggctgaaccttcaccataacctgaccttagacagtcatgtctgacttgataggataggttttaaatctggaattagtggggtgaatacgttaaaggggtttagaaatggcgtttctcaaaataagtgtctcctgaagatgaaaatggtaaaatagtgcgtggtattattttcaggcatagtataagcctgaactggcctttcacaagtttgtcttgagacttgtcattgtttcagtttttatgttttcttttattaaattaacatgcttgttttaaaaagttcaaaaagtacaaaagtacttttaggttcagtggctcatgcctgaaatcccagcactttgggaagccgaggcaggtggatcacttgaggtcaggagttcgagaccagcctggccagcttggtgaaactccatctctactaaaaatacagaaattagccatgcgtggtagcgagtacctgtagttccagctactcaggaggctgaggcaggagaatcgctggaacctgggaggtggaggttgcagtgagcactgtattccagcctgggcaatagtgagactctgtctctaaataaataaataaaagttaaaaagtgctaaaagtaagaaaatagacataagttccccctcccctggaatctttcattgaattacctttttttttctaagggaatagttctgggaagtagaggaactgtatctcaataaaacagacattctttgtggtgtgatagaatcatcactgcataggagccaggaaatttagtttccagtcccaggtagtccttagctgtataatcggaaaaagttactttgcctctttgggcctcaatttctactaattctatgatgacacagttggacttagaaattttaggatgctaaggactgacttaataaagctttcctggtatctcagacattttttaaaaggctgtatatgagtttgtgtatatgtgtatgtgcacatgcatttctggaaaggcttcccctccaaccattaaatatataattaatgttataaattgtgttgtttataattgagaaataaataccacacttgacaatgtctatttccaaagaattgggtatttttgtgcttttgtttattcctggtattttcatatcatcctgttacacacgtgagcagagaatgtgtgtatcatccatatttaatttacagtcatagctagactaagttattatccaatgttattgaaagaatcagtagcacagatagaaatgaattagttcctagtatacagttttcttggcctttctcttaaccagtttgctttcttagagaaatgaactgatctgactatgattaagatcatttattgctagacagaagtaaaattagagattatccatagaacattttaatcttgtaatttatttggtgtgttgtagaacacctgacttttctcattgtatttggtaaatgtgttaaaaatgttaagtcagtgttatctggttttattttatctcttgagtcatgtttggcatgtatgtgttgggggggtgggcataggagttacacatttaagaaagccctatcttttagtagaataaattaatgcagattggcctgtcttcctgcctgcctggtcagtaacagtggactttggagattgatctagtgatgataaacctattgtatgtggcataagccagagaagtcagcttcgatagcaagtttctacattggcgtgagagagaagcatttagttaacatttcaaagtaactaagcctgttagcatccatgtattctatcagtagactttattgagtcctgtcatttgtatggtcttttattgttttttgttttcaacaaaggaaatagcacacacatacatctcaaaatggattatacctgttgtaatctcagtattttgggagatcaaggtgggaggatcacttgaggccaggaatttgaaaccagcctgggaaacatactgagatcctatgtctacaaaatttttaaaattagccaggtacagtggtatgcacctgtagtcctagctactcgggaggctgaggcaggagaatcacttgagcccaggagttcaaggcagcagtgatctgtgatcaaaccactgcactccaacttgggtgacaacatgggaccctatcttaaaaaaaaaaaaaaaagaattataaagtctctattatggttgtatctattaagaatatcagttctgttaagaaaggaaataattgtttcaaatgtttattggggtagcaagataaaaagttgtttacaagatattaaatatcagaatatttggaattagtgtcagtatttgctattatatagaaaaaaaacctggggcctcatgatttgaatttttcatcttgagttatttaatgcacatttgagttcttaccactttttggaccctatactcaaggtgtgtaaaggcataattattttcaaatgtgggctttgtctatgcaaaaatttatgagtgcattaagcatcactaggtgcagattaaatttgaattcagtgtgctgtatgtatacctccactactttcatttgatcagaaatgcacaatttagaaagtgtgttctaggaaaacttgttaaaagctatggaaaatccttctgtaaagtgaattaatttgccttttatagatccaggttttcatatgtgatttcttaatgaacaacttgtgaatattttaaatttattaaaagtaacatatctgtaattcactttaaacccccaccccatctatctttgtgtctcactctcacagtcataattaaacagagcaggagtttagttgttcttactgagtatataaatgatcccaatttttaagcttttaattttttaatcttaaaagactggcttaagataccatgatttctttaaactatatatactatgataataaattgaaaaatgtatatcaatttaaatttgacccatgggtctttacagtgtaatttaacatttacattcctgcagttggaatataagggctatatgtttcagttaaactctcctataactgtttagattaatttagattagttttttgttaatatagtggttggcagttgaaatgattgtgaaaataaagttgtttatgatgtataaataggagtagccttgatttctagcacaggcatccaatatagtcactaatttaagcagacttatgttagcatttatcaactcagaattaagcacaaaataaaatgcatataaaaaatgttaagttggtggaaagaccttgaaatctgaaaagtggtaattaaaaaacaatggaatgcctaaaccatactgtataaacatgaaagtcttacataagaggctggtgttacatgttttgctgctgttttttaggtaatctgtcatatatatcagaaatatatatagcaatcaggttttagtttctagtacagttgaccatagaactatggagatattatactgtccagaggggaaaaataattgtctcttatttcaacccctctaaacaggataccatacttgcagagctccttcagatacataaagaacacattgtaggataccatgaacatgattctcttttggaccacaaagaagaagaagagttgactgaagaagaaagaaaagcagcttgggctgagtatgaagcagagaagaaggtagttgatgcaaaatgtgtttttgtttttgttatgttagtgatttgaaagagcaatgaagaagaaaagggtcacatttgaaacaggtaataataatatagtgggttttaggaacacattccccaattacaagaatctctttatgggttggtttcagctacctttagtggtagagtaggaggagaagacagaagaaaacagtttacacttaaagagtagtaatcccatttctgcctagtatttgttgaattgagaaatgagtgggaagccatatatttagcatcactaacctcccatcagtaccctctctgtagtaacaaacatacaggagcttagtgtttggaggttgtagtaaatgtagctttgcatgtataccatgaaatctaaattttggctgaatatcagaacacaaaaatatttcattattagacattaatgccatttgctccagcagcaactttatttaagatcattctatgtctgttttaaacatcaacccacttgagcaaaaatgtgcctgagcatgggaaaccttatcctaatacctgaatccttttcaaactcctaacttattgtaccaaacttctttaacattagtgtgatgttcagagtctcatcagaattctttgagttgcccccattctgtgggaattatcagaaaaaaaaagtacacctttaggggttaaagctttccttgtaataagatcttggtttcgggtgaaaagggtgttttgtttgtgtgtggaagagtgttaataatttcctggatctgagaatgtggattcttttctaaaccagtaggtgatgtagaatttcaagttttaaatcacaatgtgaaaagtgcataatttttttgtttttagggactgaccatgcgtttcaacataccaactgggaccaatttaccccctgtcagtttcaactctcaaactccttatattcctttcaatttgggagccctgtcagcaatgagtaatcaacagctggaggtgagttgtgaagtacaaaagtagtttgacatgaattaaaggcaatttcaagtgccttgttgttgagggttccctatgcagaaatatcacattctccaaaagattacccctgaatagacgaataaatttttgttttatttgttgaccgttttgaaccaacatgatgttgtaaaatgtggtttgttcagagcacaaaggaatcagtcggtgaattaatgtagtttgaattattttaattaagaaacaatagggctgctgactcgcttgggaaatagcaccttcttcagttataaaatagttataataaattgctatcttactgtttgaaagtaagataaatatactcattaacttctattctagtgcattatagatgcacaattaaatatataatgcccaatattatgaaataaatgatttaaagctagaatcaattgtaaattaaataggaaagactgggtttttattataccaataatgacttaattgaatctgaaacacattataaaatgtgcttatggattcttctgcattattaaattattggtgtgataaaactcaaacttttttaatcttcctaacaagactctttgagcattgatatggtttactccactttattgatactgaattttgctgttctcttcaattatttaaagagttttaaaaccgactgctctaagttggcaaatggaaggattccctatactttaacactatgctgtctttctgccttatataacttatttcttgcattcttctaggacctcattaatcaaggaagagaaaaagttgtagaagcaacaaacagtgtgacagcagtgaggattcaacctcttgaggatataatttcagctgtagtaagctaattggcaattgtcttattccaacctccaatttgtaccctccaccccctactgccatttttttaaatttttaattgttccttcttataaattgatttgcaatagtaaaatactggtaaaatggatggataatgccaaaccgtaacccagcaattttacatagatgttggcacaagagagaaatgggtaaaatgtaagaattgagaaatcaaacatggaaatgtatgcattgtttatataaacattttaattaccagttgtacaaattaaatctaaattattgtttcattccagagatagccagcccaggtacagcagtgaacaacttagtaccctgttttgcatcatgtttttcttcagaaaagaataaaggaaaaggggggtttgaaaccttgggaaatcccgaatatcttaaaataccttaattatttttcctcaattgtacagtaataaggagtaaatagaaaatttttcttttagtggaaggagaacatgaatctctcagaggcccaagtacaggcgttagcattaagtagacaagccagccaggagcttgatgttaaacgaagagaagcaatctacaatgatgtattgacaaaacaacagatggtaagaattctgacgtctgactatttctaggttatgtttaattttcttgactttataataagtttgtatgacatctacgtcagtaattattcctactatggagggatggatagtcattgataattctggaagaaatgtaaaaaacccaggaatgtcaagtaaaagtaatatattttgttacaaaaatgcaacagctacctaaatgggaatccttgaagtttacatatgatctagtccatataattttatttctcatatattctggacatctacgtaggaatttttgccagagttttaccacatttgccaattgtattttatttaacttttaatttttgtgagtatataataggtatatatatttatggggtacataaggtatattgatacaggtatacagtgcataataatcacatcagggtaaaggatatctatcacctcaagcatttatcctttctttgtgttacaaacaatccagttatactcttctagttatttttaaatgtgcaataaattatttttgactgtagtcaccctgttgtggtatcaaatactagatcttattcattctaactatacttttgtacctattaaccatcccccattaccccactccctgctacccttctcagcctctggtaactaccattctactctcttatcatcatgagttcaattgttttagtttttagcttccagaaataagtgagaacatatgaactttgtctttctatgcctggcttatttcacttaacataatgatctccaattctatgcatgctattgcaaatggcagtatctcgttcttttttatggctgaatagtactccattgtatatatgtaccacatattctttgtttattcatctgttggttgatacttaggttgcttccaaatcttaatgttgtgaacagtgctacaataaacatgagagtgcagctacctcttcaatatactgatttcctttcttttgggtataggcctagcagtgggactggtgaatcatatagtacctctgtttttagttttctgaggaacctccaaaccgttctccatagtgcttgtactaatacacgttactaacaacagtgtacacaagttcccttttctccacatcctcaccaatattagttattgcctgtcttttggataaaggccattttaactggggtaagatgatatttcattatcttttttgtttggttggttggttttgtagagacggggtctcactatatttcccaggctggtctcaaactctcgggcttaaacgatcctctgacctcagcctcccaaagtgttgggattacaggcgtgagtgaccatgcccagcctctcattgtagtgttgatttgcattatctaatgactgatgatgttgagtgccttttcctatgcctgtttgccatttgtatgtcttctttcgagaaatatctattcagatattttgcccatttttaaatctgattattagattttttttcctatgcagttgtttgagctccttatatattctggttattaatcccttgtcagttggatagcttgcaaatattttctcgcattctgtgggttgtctcttcgccttgttgattgtttcctttgctgtgcagaagctttttaacttagtggtatcctgtttgtccattttttatttggttgcctgtacttgtgagatattactcaagaaatctttgccagttcaatgtcctggacagtttgcccagtgtttttctgtagtagattcatagtttgaggtctcagatttaagtctttaatccattttgatttgaatgttgtatatggcaagagcttggggtcttctttcattgttctgcgtatggatatccagcttccacagcaccatttattaatgagactgtcctttcttcaatgcatgttcatggcacctgtgcaaaaaatgagtttactggtgtgtggatttgtttctgggttctcacttctgttctcttggtctgtgtgtctgtttttatgccagtaccatgctgttttggttactgtagctctgtagtatcatttgaagtcaggtaatgtgattcctccagttttgttctttttgctcactacagctttgcctattgtgggtcttctgtggttccatgaaaagttcagaattttttttttgtttctgtgaagaatgtcattggtattttgataaggatgcattgtatctatggattgctttgggtagtatgggcattttaacaatattaatttatccaatccatgaacatggaagatcttttcatttttttgtaccctcttccatttctttcatcagcattgtgtagttttcattgtagacatctttcacttctttggttaagtttattcctaggtatttaattttgactgtggctactgtaaatgggattactttctcaatttctttttcagattattcactgctggcatttagaaatgctgctgattttgtatgctgccactttactaagtttgtttatcagttctaaaatatttttggtggagtctttaggtttttccaaataccagatcataacatttgcaaacaggataatttgacttcttcttttccaactgggatgccctttatttctttctcttgtctgattgctctagctatgacttgcagaactatgttgaataacagtggtaaaagctggcatccttgttgtgttccaatttttagaagaaagtctttcagtttttccccattgagtacgatactggctgtgagtctgtcaatatatggcttttattgtgttgaggtatgttccttctataaccgtattttgaggatttatatcatgaaaggatcttgaatattatcagatgttttttcagcatcagttgaaattatcatacagtttttgtccttcattctgttatttgatgtatcacattgattgatttgcatagttaaatcatccttgaagcccttggataaatcccacttggtcatgttcaacaacacctttttaatgtggtgttgaattgtgtttgctattattttgttgagaatttttgcatgaatgttcatctcagatattgccctgtagttttctttttttgatgtgtttgtctggttttggtattaaggtgttactggccttatagaatgtgtttgaagtattccctcctcctctacttgtcacagcagtttgaggaagattggtattagttcttctttaaacgtttggtaaaattcagcagtgaagacattggtttccaggcttttctttgctggaagactttttattacagctttaatctcgttacttgttactgctctgttcagattttggatttcttaatgtttcaatcttggtagattgtatgagtcttggaatttatccatttcttctaggttttccaattttttgcatgtagtttgtcataggagcctctaatgatcctttgaatttctttggtaacagttttaatatctactttttgatctctgattttatttacttgaatcttctcctttttcttaatctggctaatggtttgtcagttttgtttatcttctcaaaaaaccaactttttatttatttctgtgctgatctttattatttattttactaatttggggttttattttcttttgtttttctagttctttaagatgcattggtaggtgtttgttttttttttcttttctgatgcacgcacttagagctgtaaactttcctcttagtaatgcttttgctgtatcccataggtttttgtatgttgtgtttcctttatcattcgttttaagaagtttttcagtttttttcttaatgttttctttgacccactggtcattcaggagcatattgttcaattttcatgtgtttatatagtttcaaaaattcctcttgttattgatttctagttttattccattgtggtcagagaagaaacttgatatgatttcatttgtttgaatgttttaagacttgttttgtggcctaatatatggtctttccttgagaatgatttatgtgccaaggaaaagaatgtatattctgtgaccattggatgaaatgtcctgtaaatatctatttggtctatagtgcagaataagtccgttggttttttttattgattttctgtctggatgatctgtccaatgtgtaaagttgaggtgtcgaagtctccagctattattattttggggtctgtctctctatttagctctaataatatttgctttttatatctggtgctccagtgttgggtgcacatatatttacaattgttgtatcttgttgctgaattgacccctttatcattatataatgaccatcgttgtctctttttatattttttgtcttgaaatctgttttggctgatgtaagtatagctagtcctgctcttttttggtttccattttcatgaaatatcttttttcatccctttattttcactgtatatgtgtctttataggtacaatgtatttcttacaggaaacagatggttgggtcttttttaaaaatccattcagacactatatgtcttgattggagagtttagtccatttatattcactgttattctgtttttaaactttcattttaagttcatggatacatgtgcaggtttgttatataggtaaatctgtgtcacgggtttgttgtacagattattttgtcacccaggtattaagcctagcacccataagttatttttcctgatcatctccctcctctcagcctccaacctctggtcagccccagtgtctgttattgccctctatgtgttcatgtgttctcatcatttagttcccactttttagtgaaaacatatggtatttggtttcctgttcctgcattagtttgctaaggataatggcctccagctccatccatgttcctgcaaaggacatgatcttgttcttattattaggtttatagaagatattaataaaattaaataaatagattgacaacagtcttgaaaatgtgtgctgagatctgggctcagctttacaagccgagaatgagaaagtagatttttgatctctgagatttctaatagttgagtcagctactgttggaatgagaaaagctctagttgtctataacatgttgaatttgtcagactctttgtgatgagctgcgttcaataaaccaaatgcagaggcattagtagcaggctatggctctgctagctgaggtttggaaatcacaggatgcaacgcctcaatttttgctgtggaacttgataatggggcattccgtaatgaatgccgtatgaggggacgtgagtatgagtaggcagagggcacatgtatctagagcttcagtcactgtaggtatcaggaagaaaggcacatttagaatacacctttacacacgtggatttttttttttcacccctcctgaactttttctttatttttattttttatttccacattttctttatccagtctaccattgataggcatttagctttattccatgtttttgcttttgtggatagtgctgcaatgaacatatacgtgtgtcattataatagaacaatgtatgttcctttgaatttatacccagtaataggattgcagggttgaatggtagttctgtttttagctctttgaggaactaccacactgctttccacaatggatgaactaatttacactcccaccagcagtgtataagcattcctttttctctacaacctcaccagcatcttttgactttttaataatggccattctgactggtgtaaggtatctcattgtggttttgatttgcctttctctaatgatcagtgatgttcagctttttttcatatgattgttggccacgtgtgtgttttcttttgcaaagtgtctgttcatgtcctttgcccactttttaatggggttgttattttcttctatatttctttaagttccttatagataatggatattagttgctagatggatagtttgcaaaacttttctgcaattctgtaggttgtctctctactctgttgatagtttcctttgctgtgcagaagctctgctgtgcagagtttagttggatctcatttgtccatttttgcttttgttgcaattgcttttggcatcttcatcatgaaatctttgcccattcctatatccagaattatattgcttaggttgtcttccagggtttttatagttttcgggtttacatttaagtattgaatgcatcttgagttgatatttgtatatggtgtgtaaggagggggtccagtttcaatcttctccctgtggctagccaattaccccagcactgtttattgagtagggagtccttttcccattacttgtttttgtcaactttgtcaaagatcagatggttgtaggtgtgtggccttatttctgagctgtctattcagttccattggtctgtgtgtctttttgtaccagtaccacactgttttggttactgtagctctgtagtatagtttgaagttgtatagcataatgcctccagctttgttcattttgcttacgattgccttggctattcaaccttttttttgttgttccatatgaattttaaaatagttttgtctagtttatgaagaatatcattagtagtttgataggaatagcattgaatgtataaattgctttgggcagtatgaccatttcaacaatattgattcttcctatccatgagcatggaatgtttttccatttgttttgacatctctaatttcttttagcagtcttttggagttctcattgtagagaccttttacctccctggttagctgtattcctaggtattttattctttattgtggcagttgtgaatgggattgcatgcctgatttgcctctttgcttgacttttgttggtgtataggaatgctactgatttttgtacattgattttgtaccctgagatattgctgaacttgtttatcagcttaagaagcattttgggccaagactagagttttctagatacagaatcatggcatctgcatactgtgatagtttgactttctctcttcctatttggataacctttatttatttctgtttcctgattgctctgcccaggacttctaatactatgttgaataggagtggtgatagagggcatccttgtcttgtgccagttttcaagatgaatacttccagcttttgcccattcagtataatgttggctgtgggtctcctcctggcggaattccagaggcccgaggcaagagccagttgcttcttgccacttcaactcactcattcccctggagttcttgtgggccaggaatgagtcctggtgtgcggtagccccattcagggttcccagcttcctcctccaaccaagcttctgtttcttccctccgcccactctcattgccttctctctgaagatctgttaggagtgtgccagtcatccttgtctttcggtggcagcttttccaccttgctgcatctagtcatccatcttgcccaaccccattattctttttttttttttttttttttttttgagacggagtctcgctctgtcgcccaggctggagtgcagtggcgcaatctcagctcactgcaagctccgcctcccgggttcaggccattctcctatcttagcctcctgagtagctgggactacaggtgcccgccaccacgcccagctaattttttgtatttttagtagagacggggtttcaccgtgttaaccaggatggtctcagtctcctgaccttgtgatcctcccgcctcggcctcccaaagtgctggggttacaggcgtgagccactgtgcccagcctccaaccccattattcttgataagttaggacttactcctgccattttgttatttgttttctggttgttttgtgatccctgtcttccttcttttcttcctatcatccttttagttaaagcaattttctgtggttgtatgttttaatttcttttattattatttttttgagacggagtttcactgtgttgcccaggctggagtgcagtggcatgatctcagcttactgcaatctctgccttcccgggtttgagcgattctcctgcctcagcctcctgagtagctggaattataagcacccgccaccatgcgcagctaattttcacatttttactagagacagggtttcaccatgttggccaggctggtctcgaactactgacctcaggtgatccatccaccttggcctcccaaagcgctgggatcacaggcctgagccaccgcgcccggcatgatttcttgcttatagttttttgtttatctgttgtatgtttgtttttttgaagttaccatgaggcttgcaaataatgtaatgcatcattttaagctgatgataacactgattgcataaacaagcaaacaaagtaacaaacaagcaaagagaaaactaatgttctattgccagtgagttttataccttcatgtaacttttcgttgtttgttaacatccttttctttcagattgagaaactccctttaatatttcttgtaggacaggtttgatattgaaattcctcagcttctgtttgtgtgggaaagtctttatttctccttcacatttgaagcatattttcaccagatatgatgttctagggtaaaagttttttgtttgtttgtttgtttgttccttcaccccttttaaatatctcatgtcactctctcctgggctgtaagttttctactgaaaagtctactgccagatgtattggagctcctttgtatgttatttgtttcctttctcttgctgcatttagtatactttctttatccttgacctttgagagtttgattattaaatggtaggaggtagtcttcattaggttaaatctgcttggtgttccataaccttctttttcttgaatattgatagttttctctaggcttggggaattctctgttgttgtccctttgaataaactttatacccctatctgtctctctgcctcctctttaaggccaataactcttagatttgcccatttgaggctattttctagatcttgtagatgtgcttcattgttttttgttcttttttcttttgtctcctctgatggtacattttcaaatagcctgtcttcaagcttactaattctttcttctccttgatcggttctgctattaagagactcttaatacattcttcagtatgtcaattgcattttttgactccagaatttctgcttgattcttttaaattatttcaatatctttgtgaaatttatctgatgtgattatcagtttcttctccatattatcttgaatttcattgaatttcctcaagacagctcttttgaattctctgtcacatatattcacatgtatctgtctctctaggattggtccctgaggccttatttagttcgtttggtgatgtcgtgtttcctggatggtcttgatggttgtggacattgattcgtgtctgggcattgaagagttaggtatttattataatctttgtagtctagccttgtttgtacccatccttcttgggaaggctttctaggtattcaaagggagttggatattgtgatctaatggtcactgcatctgtatctgcattagaaggcatcccaaaccgggtaatgctgtgactcttgtagtcttggagactcatagaggtaccgccttggtggtcttggataagatctggaagaattgtctggattaccaggcagagactcttgttctcttcccttactttctcccaaacagaatctctctctgtctgtgctaagctgtctggaaagctggtggagaggtgacacaagcacccctctggctcccttcacggggaccacactgggttagacctgaagcctgcatagcaatgggtctcacccaagatccacagtaactactggcctccgcctttgtttgctcaaggctctaaggctccacattcatcaggtggcaaagccagctcctcttgtgtccttcccttctgggctgcagatttcccccagccctaggccgatcccaagatgctatctaagatccagggcctggagtcagaatctttaggaatctgcctggagctctattctacttcggctgagctggcacccaagccataagacaaaatctttctacccttccctccgcttttcacaagcaaaggagtctctccctgtgaccactagcaccccaggcccacagcaggtattgcctggctactgctgatgttcactcagggcccaagggctcttcagtcagcttgtgttaaatgctaccaggactacgtctctcccttctgggcagtgggctcccctccagcccagggaaggtccacaaatgccatccaaaagccaaggcctggaattagggtccccgagggtctgcttggtaccctagcccactgtggctgagctggtacctaagctgtatgtcaaagttctctttactctttcgtcttcttttctcaagcaggagtctcttcccatagtgtccacagctgggaatgtgctatgtcacacctgaaggtagcatgtctctgagtctcactgaaggcccactgcaagtactgcctgggtaccactgctggttattcagggcccaagggctcttcagacaacagatgttgaatcctgtcaggattgagtcatttccttcaagagaatgagtttcctctggcccaggttatgtctggaaatgtcatccaggagctagggcctggaacaagggcctcaggactctgcctggtgccctgtcctactgtggctgacgtgatattcaagctgcaagacaaagtcttctttactcttccctctcctctcctcacctcaagcaaaaggaaagagtctctcctggagctgtgagctgtgctgcctggggtttgcgaaggtgtggcacaagcaatctcctggccaccctggctggtgtctcactaggtcatgtgccccccccccccgccccccgtccactggctttcagcccagcacagtacaggacttggactcttggtggcctagattgcctttcaggtttatttaggcccccagaactctttagtccacagtggcaaagcttgtcggaactcgggttctgcctgctgggataggtgatttccctctggctgtggctggtgtaaatgctccctctgtgggtgccagctgagttctgcctggtgtttcttttcactgtgacagggcagccctgagttccaatgcagagtcccataatcactgtactcttttcctgcaagcacatagattctctctccctgccacacggctgctgccaggggatgagtgaggggtggcattggcagttcaagactgtctttcctaccccctttagtgcctctttcagtgatatgaagttaaaatctggtacagtgattgctcacctgatttttggttctcatgaaggtgattttattgcagatagtttttcaatttgctgttccttcggggaggacgatcagtggaggcttctattcagccatcttgctctgcctccagtcacatttgccattgttaaacaacctcgaaatagtagtatacttatcagtgtgtttaatttgagaataaaaggtagagctatggatgatacatatcaaaggttcctactaagttatataattctttaaaagggtactgtattccaggatccttgatcatgtttcccaacacagtcgtttgccagccttctgccttatacttggaaatttctacgcttgacaccagggaatctatttctgtggcatatattttacttagaaagcactgcagggttatgtggttttacaatatattagtacatttgagatattcctggtcagaattattcctactgcaagtgcctttccctttggtgtttgtcactaaaatgtttgtctgtcatcatgtgaaatattcaaaagaatgacaaagaaaggagtcttaacaaaaagtgttgtaactaatacttgagactaatcacagtacagaacacattactatggcaactaagctaaatgctgcttgcaatataatagtcaagacattaagagaatttagccctaaatgatcttactaactggtttctacagtaatggtcctgtgaatgccatcacattagtaatggtgttaacaataatgtgttttccttttggtatggtacccccttaacaaattgattttaagtcaaaacttgatacctcttttgagacaggtcatgcacttgtaatgactcccattttttctctatagttaatcagctgtgttcagcgaatacttatgaacagaaggctccagcagcagtacaatcagcagcaacagcaacaaatgacttatcaacaagcaacactgggtcacctcatgatgccaaagcccccaaatttgatcatgaatccttctaactaccagcagattgatatgagaggaatgtatcagccagtggctggtggtatgcagccaccaccattacagcgtgcaccacccccaatgagaagcaaaaatccaggaccttcccaagggaaatcaatgtgattttgcactaaaagcttaatggattgttaaaatcatagaaagatcttttatttttttaggaatcaatgacttaacagaactcaactgtataaatagtttggtccccttaaatgccaatcttccatattagttttactttttttttttttaaatagggcataccatttcttcctgacatttgtcagtgatgttgcctagaatcttcttacacacgctgagtacagaagatatttcaaattgttttcagtgaaaacaagtccttccataatagtaacaactccacagatttcctctctaaatttttatgcctgcttttagcaaccataaaattgtcataaaattaataaatttaggaaagaataaagatttatatattcattctttacatataaaaacacacagctgagttcttagagttgattcctcaagttatgaaatacttttgtacttaatccatttcttgattaaagtgattgaaatggttttaatgttcttttgactgaagtctgaaactgggctcctgctttattgtctctgtgactgaaagttagaaactgagggttatctttgacacagaattgtgtgcaatattcttaaatactactgctctaaaagttggagaagtcttgcagttatcttagcattgtataaacagccttaagtatagcctaagaagagaattcctttttcttctttagtccttctgccattttttattttcagttatatgtgctgaaataattactggtaaaatttcagggttgtggattatcttccacacatgaattttctctctcctggcacgaatataaagcacatctcttaactgcatggtgccagtgctaatgcttcatcctgttgctggcagtgggatgtggacttagaaaatcaagttctagcattttagtaggttaacactgaagttgtggttgttaggttcacaccctgttttataaacaacatcaaaatggcagaaccattgctgactttaggttcacatgaggaatgtacttttaacaattcccagtactatcagtattgtgaaataattcctctgaaagataagaatcactggcttctatgcgcttcttttctctcatcatcatgttcttttaccccagtttccttacatttttttaaattgtttcagagtttgttttttttttagtttagattgtgaggcaattattaaatcaaaattaattcatccaatacccctttactagaagttttactagaaaatgtattacattttattttttcttaatccagttctgcaaaaatgacctataaatttattcatgtacaattttggttacttgaattgttaaagaaaacattgtttttgactatgggagtcaactcaacatggcagaaccatttttgagatgatgatacaacaggtagtgaaacagcttaagaattccaaaaaaaaaaaaaaaaaaaaaaaaaagaaaactgggtttgggctttgctttaggtatcactggattagaatgagtttaacattagctaaaactgctttgagttgtttggatgattaagagattgccatttttatcttggaagaactagtggtaaaacatccaagagcactaggattgtgatacagaatttgtgaggtttggtggatccacgcccctctcccccactttcccatgatgaaatatcactaataaatcctgtatatttagatattatgctagccatgtaatcagatttatttaattgggtggggcaggtgtgtatttactttagaaaaaatgaaaaagacaagatttatgagaaatatttgaaggcagtacactctggccaactgttaccagttggtatttctacaagttcagaatattttaaacctgatttactagacctgggaattttcaacatggtctaattatttactcaaagacatagatgtgaaaattttaggcaaccttctaaatctttttcaccatggatgaaactataacttaaagaataatacttagaagggttaattggaaatcagagtttgaaataaaacttggaccactttgtatacactcttctcacttgacattttagctatataatatgtactttgagtataacatcaagctttaacaaatatttaaagacaaaaaaatcacgtcagtaaaatactaaaaggctcatttttatatttgttttagatgttttaaatagttgcaatggattaaaaatgatgatttaaaatgttgcttgtaatacagttttgcctgctaaattctccacattttgtaacctgttttatttctttgggtgtaaagcgtttttgcttagtattgtgatattgtatatgttttgtcccagttgtatagtaatgtttcagtccatcatccagctttggctgctgaaatcatacagctgtgaagacttgcctttgtttctgttagactgcttttcagttctgtattgagtatcttaagtactgtagaaaagatgtcacttcttcctttaaggctgttttgtaatatatataaggactggaattgtgtttttaaagaaaagcattcaagtatgacaatatactatctgtgttttcaccattcaaagtgctgtttagtagttgaaacttaaactatttaatgtcatttaataaagtgaccaaaatgtg

SEQ ID NO: 15466 - DNA, 280504 bp, Homo sapiens; identical to SEQ ID NO: 15465

SEQ ID NO: 15467 - DNA, 89546 bp, Homo sapiens
aattctcctgcctgagcctcggcccaacaaaatggcggcggcagcggtgtcgctttgtttccgcggctcctgcggcggtggcagtggtagcggcctttgagctgtggggaggttccagcagcagctacagtgacgactaagactccagtgcatttctatcgtaaccgggcgcgggggagcgcagatcggcgcccagcaatcacagaagccgacaaggcgttcaagcgaaaacatgaccgctgagcccatgaggtaaaacgcaaccccgtctcatgggccccagcggtctgggcccaggcaccgtctgagtcgggtgtttgggaaggcgttcgcttggtgggttaggcctgtgtgttgcttagccgaaagaggcatcgttttctctttaggtgagaagggtttcggggtatcggcgcaaggctccgacgggggtgggggtggggatggggtggggggaggtggggggggcgcggcctagggtatggggcgcttcttgcaatctcccctaaacggtgacgcttggtcgggctcctctgtttattctttggtgcctgtgggattgagacctcgaagtcggaggcggtctttggtatcccggtcatttttgctaatctttgggcctagaaactgcgtggggaagaagcggggggagggtgagaagagggggaggggtgggcgggcgcgaggatgtgagatcccaggacgacttagaggcgtttaggttgctggagatgggaagcacccgggccctgcgggattttttttctgcagccccaggagacaagcctttttttgattgggttgtggtgcagttccaggtatttaggtatcttttctactccatatcctgaaggatatccttgggtttatttctaggcgaggggggacttaacacagggttttgcttccagaggaccctagtatactactttttgtgatgtccagccttaatgggacctcaagtgtttccccactttctgggcaaatttcgaggagtaattaggccctatctttatttacttatttattccatgaaggatgaagggcaggttaacgtgggctgatgcgaagtaagatttattgcaagggaaaatgcctggcaggcctcctcttaaccaatcaagcacgtttattaggttgaagctgtttttctgtgtgcttctgatttgcctcttgacgggtctgaaaatttgggtagtcaatatgaaatgtatacacttttacccaggtggctggctggcgtttcagtttgacatttgaattttcatcccacaatgtgaattaagtaatttttttactcggagatgcatccttggcgtccagtggcaaaataaaattacaaggagcatgggtcagaattgcatttcaagttggcgaaatgtgcctttgagtaactcttagattggcatatgtttttagagcaatttagctagaatgtagaattgggcaatgagcctatgatacgtatgtctgtatttctgcatgaacaagcagtagattatattttctttaccttggggaaagatatgcttcagttcttagattgtagatctctagttgtgtacacgattgtggccttggtttctgaatttgtcagtaggctcaaatacaacaaatctttatctgtggggtattaggcacgtaagtggtacccagtataacttgttggcctgtaattaccaggcactcatgttcatatgcatggatggtgtaccttacagttaaattatgacctctagattttactaagtttcacaaagtctacatttgaaactatagtttgaagtcggatcttctcagtttctttagaatgaacaaattacgtatatagaatttctgaatagaataattaattttacacaagggtcagtttttcttactagtcttggatttttgtagatcttgatgataagagtaataatcataactaagttgagtgcttattgtcgttctttataatcttgatgaattctcaaacctgtgaggtaagtacttggttttgcccattttaccgatgaggaggaaagtgagacatagatcaagaacttgaccgaagttatacagcttgtaattggtggagctggaattgaaccccatcttgacttcacagcttatgttcttaaccacaaggcattaatgcccccttcagctgccaggtctaacctgattatgaccatttaaatttagcccaagtgttacaatgaaagaagttcatattacctactctgatttgttgcaggtctatgattttgtagctgtttataatgttacattttttgtgtccaggtgtactatgtagtgagataactgaaatatttaatgctaggagagtcttaagctacatgaaaaacctctagtaaagaactgcatatatgcatgtagggaattaattaaaaagtgtgacactccctgatgatttactatgaaagagctccaagtaggtgttcagaactgtctcaggctgaagtgtcatcgatctcctaaaccataatcatggttaaaggagaatctgacaggtaatgcttgagttgaacccacagtaccaaatccctcttgagtcttttctaatgtgaggcagaaataatataagcattattgttaatattattttacacagtagttccagattttctctttatcaaatattttgtcaagcacttaaaaagcaggaacaaagactagttctaatttttacttgtgtttataaaaaaaagtaatattctaggattctgtggtggaaaaatggccagaagacaagaggaaggaaaataaaccgatgacctggctaaaacatacactgactaatcagtggctcagtctttaaaggttttgttgtttttaaaggatttttttggttgtttgtgttgtttgaaataagattgacttgcttctggcattataaaagataaggtcttttataatcaccaagctctcaatgtagtacttgggtacctgggtgtcactgctgattattttttaatttttaaatttatttttttgagacagagtctcactttgttgcccaggctggagtgaaggggcgtgatcttggcttactgccgcctccgcctcccaggttcaagtgattctcatgcctcagcctcccaagtaactgggattaacaggtgtgtgccaccacgcctggctaatttttgtatttttagtagagagggagtttcaccatattggctaggctggtcctgaactcctggactcaagtgatctacctgccttggcctcccaaagtgctgggattacaggtgtgatccaccgcgcctggctctctgctggttattcagggcccaagggctcttcagttatcaggtgatgtatgctgctaggactgggaccttcccttcagggcagcagattcccttctggcccaggatgtgtctagaattgtcatcctggagctagggcctggaatggaggcttcatgactgatgaactttaatttgttttctttatttttattttttttgagatggagtctcactctgttgcccaggctggagtgcaatggcaccatcttggctcactacaacctttgcctcctgggttcaagcgattctcctgcctcagcctcccaagtagctgggattacaggcaagtgccaccacacctggccaatttttgtatttttagtagagacggggtttcaccatgttggccagccaggctggtctcaaactcctgacctcaggtgatctgcccgcctctgcctcccaaagtgctgggattacaggtgtgagccactgcgcttggccttaatttatttgcatataaagatttcagtattgggagatttggtgaaatttgtcattctaatccttatggcaattgattacttgaaaagctgacagctatattaccttgttattgatcttaaatataaaaaggcagaagttgtctaaattgagagattttgaatgtcttagaaagtatctgttaaggtggtagtttacaagcagttacattgtaacctaattgttgaaaaatgttatctgtgaaatacttgcatttccactatgaaaagcatgaaaccaggcccttggagggggaggagatgcaaattttataaaggtttttaaaaagcatttaaatatcaatggcttggttatgtaatgggttggggtgaaaagaaagacatttgtgaccttaatttttatcaggcccagttttattattggccacccttggcatagttggccttgagctttcagttatgtattgtatttctagagataagataaatgtagtacttaaaataatatttaagtattgatgtaggtgtgtgaaataattgtttcataagtaattgtatgtgtctttttcacttttggggtctgaataaacttatgggttgggtaataggatacgggcaattcttgaatttacatgaagtgctttcccccagaccgtgaatgttcttttggatatcagaaactatttaaatagttgaagccagtgaaaactgatgcatagatcttcctttagaaatgttgaatataacagggcagtgaaaggagggtctaagcagtctgtctctaattttatcctaatgcttgtcttatgatcagcttggaagctgacatgcaagatgtttaacttctatttttccatctgtaaaatgggaataagctcaaatgggagtaaatatcaatatttatcaataatagatattgataaagtctaaaggtattctgaaggaggtaacatgtttgtaacaatggttcttaaaagagaaactaaagctctggggtcctagttttttttttttttttttttttttgagacagagtctcactatgttgcccaggctggagtacagtggcacgatctcaggtcactgcaaactccgccctccgggttcacgccattctcctgcctcagcctcccgagtagccgggactacaggcacctgccaccatgtgcggctaattgtttgtatttttagtacagacagggtttcaccgtgttggccaggatggtctcgatctcctgacctcgtgatttccacccgcttcggcctccaaagtgctaggattacaggtgtgagccaccgcgcccggctgttaatttttaagagtgaaaagaggtgctgcgactaaatggtttgagaactgcttgtatagaggaatgaacactgaactgtgagccaagccttggtttttcagttatagctctgttgcttgattgtatgactgtggacaaatcatttatctgttccaggcttctgctttgtcatttgcagaacgaacaagactagatggtctgtagcattaatttttttttgggacaaggtctcactgtcacccaagctgtagtgcagtgacactgaacatggctcactgtagccttgacctcctggctcaagcaatcctcctgcttcagcctcccatgtagctgggaccacaggtgtgtcatcatgccccgctaattttttgatttttttgtagaaacagtggtctcactttgttgcccagtctggtcttgaactcctggacttaagcgatcctcctgccttggcctcccaaagtgctgggattacaggtgtaaaccaccataccctgcctaaagttagtttttaaaaaattctgcttacaggccacgtgcagtggctcacgcctgtaatcccagcactttgggaggccgaggcaggtggatcatgaggtcaggagttcaagaccagcctggccaagatggtgaaaccccatctctactaaaaatacaaaaaaaaatcatctcggtgtggtggtgggcacctgtaatctcagctactagggaggctgagacagagaattgcttgaacccaggaggcggaggttgcagtgagctgagattgcgccactgcagcctgggcgacagggtgagagtctgtctcaaaaacaaaaacaaaaacaaataagcaaaaaattctgcttatatgagtgtttatcattttctcttatctgccttttgtgggttagggagaagggtagtggtgagataaagtttctttattcagtgtatttatatctttttgccttaaaacttacatggttaggttacaggtgttttgttgctgatacttgtcatagtatcatgtatacctggttgtataaacatttattggaaaggaaaaaacatttttgttggaaagtttggtaattattgtggcttaggatatgttctattttgaaagattgctatatccagtatatttctgcccttttatgattgaagatgtacgtctgaaaatacctatgttagttctagccggttgttctttttgcgctgggaagtctttgaattttgcactgtagctgctattttcagatcctgtctctgaaactttgtctctcagttttagcttgaagtagccatttcctgtatctgtagtccagcactcttgttaactgtcccatacaatatttgttaagaaattattgttctggcagtagtattcacatgtatatatcctgcactccatattttgggggaatgctttattagttgatcaaatacttaagtatcaatttggggccaggcatggcactgtgttagggttatgccaaaggtaataaaattcctgccatcttaaggcattcttagtcaagtgagggagattggtaagtaaatgagcaattagaaagcagtgctaaaatatggaaatatattgattgcgctagggatcagaaatgaaagaaagcctaatttgggggatgtctaggaaagttttgcaaaggagatgttaactgtattgagtcttgaatgagttagcagttaagggttgactgtgagagggcagtccagacagctattagtatggttaaagattagtcttattttccatatatcagaggaaataagacatgtacacgattagttttggtgcaagatataaagtgataaatgctgcatgaagtaaaagtaagttgttgtgtgagttcaaagtagaaagacatttctggtggggaccaaggaaagctttatagagagatagcatttgagccgggcgccgtggctcacacctgtaatcctagcactttgggaggctgaggcgggtggatcacgaggtcaggagatcgagaccatcctggctaacatggtgaaaacccgtctctactaaaaatacaaaaaaaaaaaaaaaaaaaaaaaaatccgggcatggtggcgggcgcctgtagtgccagctgctcgggaagttgaggcaggagaacttcgtgaacctgggaggcggagcttgcagtgggccgagatcgcgccactgcactctagtctgggcaacagagcgagactccgtttcaaaaaaaagaaaaaagagagatagcatttgaatctagtccttggaatataggtacagttttgacaaaggagactgtgggagaattccagatgtgaggagtagcagcttgagcaaaggaatgttgtgtatattagcattttctatttggaagaaggtcaacatcgaattttaaacttaatttctggacaaatactgtataactattgtgcctttttttttttttttgagacgtagtctcgctctgtcacccaggctggagtgcagtggcatgatcttggctcactgcaacctccgcttcccgggttcaagcgattctcctgcctcagcttcccgagtagcttggactacaggcgtgtgccaccatgcctagctaatttttgtatttttagtagagatgggatttcaccgtgttggccaggatggtcttgatctcctgacctcatgatccgcccgccttggcctcccaaagtgctgggattacaggcgtgagccaccgcgccctgcctattgtgcttttttttttttttttaagagacagggacttcctctgtcacccagcctggagtgcagtggggtgatcatagctcatagcttactgcatcctagaactcccgggctcaagtgatcctcccacctgagcctcctgagtagctgggaccacaggcatgtgccactatgcccagctactattgtgcattttgtatggtagcttttgtggcttgatgatcttgtaaaaggtacatgtgcctttgtgaatgggcctgataattttagttcagaattgtcaaaagtattatctacttttttttttttttttgagacagagtctcactctgtcacccgggctcagtggcaccatctcagcttactgcaacctccacctcctgggttcaagcgattcttctgcctcagcctccgagtagctgggactacaggtgtgagccaccatgcctggctagtttttgtatttttagtagagacggggtgtcaccatattggccaggctggtctcgaactcctagacctcgtgatctgcccacctcggcctcccaaagtgctgggattacaggcatgagccaccgcgcctggccagtattacctacttttaaataagattgtgtaggatttaatgcacagattttgaatcactgtgataaaaatgcatccttagttgtcttcattttgctcatttgaagtgctcagttgacttttgggtgggtaacatttgacttatagaatctaagataaaaaattatttctgagtaatactggatttgttattttgcttatttggattatattagttattttttggtttatttgatagcattccagatttagttttgctataatgcttgttttgaaaatgtggattttttccaaaagggttgatatttcagggaacaatttgaagcatacgacaaaatttgcatttgcttatgggggattttgtctgcagggtcagggatcagcatactgtggcctaccaaccagtggcctgttttttgtaaataaagttctttttttttgtttttgatctttgttttgttttgttttgttttgttgagacggagtcttgctctgtcgcccaggctggagtgcggtggtgtgatgtccgctcactgcaacctccgcctcttgggttcaagcgattctcatgcctcagcctcacgagtaggtgggatttcaggcatttgccaccacgcctggctgatttttgtattttttttttttttttttttttttttttttttagtagagacagggttttaccacattggcctggctggtcttgaactcctgacctcaggtgatccgcctgccttggcctcccaaagtgcagggattatagatgtgagccatgtaaataaagttctattggaatacacctatgtccatttatttacattgtctgtggctgcttttgcactgtagttgcagagttgaatagctgcagcagagacctagtagcccacaaagcctaaaatgtttactgtctggccctgtattgaaagagtttgctgattattgtgctagatgaatgcaggatactacacccctctaaaaagagctgcatagaaatacatgcatatagatgcacacacgtctgacatctaccagctacctcatttcaccacttgggttataaaccacacatatttacatctgttgtacaattttcaatccgatttcagataaccttccttctaccacttcacaataattcatgagctgcaacccttttgatgcccacttcacaagcaaacttcaggtctttttcaaagtaaagtgccacatttattgttatatttgagcatttattatttaacatgtcaaactgtgctaccatttttctttggtttctttgttttaaaaaaagtcactgatgaaatttttgaatgttgtgcttctaacctcatttttcctatgagttctatggtgttaattgcacaattttacatagtttggtggtttttaggaacccatatgttacattattgaggaactgactaattatcatcctgtaaaaagtactaattcattcaccaaacatttctggggtgatgtaaatattaagtgagttaaatgggcataaagcacttatgtctttattgttactcaaatattagttattactgattactattaccatgtgtcaggaactgtaataagtagtgcattgatgaacaagacagataagggacctgtctccatgaagcttacattgtatttttaaaaatctattaatatacattttggctagtaaccgagcccttgccccacagaaaagttgtgctgttacacaaaataatattttaagatccatccacaagtcaaagacatttcacttaaaacagctttctcagcagtgtctccttgatagggtataatattttattgaattattgtttttggctgggtgcagtggctcatgcctgtaatcccaccactttgggtggccaaggcaggtggttctcctgaggtcaggagttcaagaccagcctggccaacatggtgaaaccccgtctctactaaaaatacaaaaattagccgggcgtggtggcgcatgcctgtaatcccagctactcaggaggctgaggcaaaattgcttgaagccgggaggcagaggttggagtgagccgagatatcaccaccgcactccggcctgggcgacagaatgagattccgtttcaaaaataaataaataaataaataaataaataaataaagaattattgtttttaatttttgtttttttctgagataggctgttactctgtcactcaggctggagtgcattggtgcagtcatggctcactgcagcctccgcctccctggttgcaggtgatactcccacctcagcctcccgaatatctgggactataggtgcatgccaccatgctgagttaatttttgtatttttttgtggagatgagtttttgccatgttgcccaggctggtatcgaactcctggactcaagctatctgccctctttggcctcccaaagtgctgggattataggcatgagccaccaaacctggccatgtgattgtttttttgtaactgtaacctcaggagatgaatccgatctatctttagggagataaagagtaatcatcccttcctttttttactgtataaaaggttacaaaatataatttcagacttgtagaaaatttgtaaaaatagcacaaagattctcagatgtgcttcatccagatgcagcaaggggtaacattttaccatgtttactttatcatcctctattattatttttctgaattgtttcagagtaaattgcagacatgatgtccctttactcccaaatactttaatacatatttctcgaaactaggaatagtctgttacatgatcccagtatagttagcaaaattaaaaattagcattaaggctgagtgcggcctcccacacctgttatcccagcactttgggaggctgaggtgggaggattgtttgaggccaggaattcaagaccagtcttctcaacatagaccctgtctctacaaaacaaacaaacaaacaaacaaacaaacaaacaaaagtactaaattagccggtgtggagcatgcctggagtcccagctactcagaaagctagagtcaggaggatcacttgagcctagaagttccaggctgccatgaactatgatcatgccactgcagtctagtgtgaatgacagagtgagacccccatctcttaaaataaaagagagattagcattgatacaataccatttttttttttttgagacagagtctcacactgtcgcccaggctggagtgcggtggcgcgatcttggctcactgcaagctccgcctgctgggttcacgccattctcctgcctcagcctcccgagtagctgggtctacaggttcccgccatcacgcccagctaattttttgtatttttagtcgagacgggttttcaccgtgttagccaggatggtctcgatctcctgacctcatgatccgcctgcctcggcctcccaaagtgctgggattacaggcgtgagccactgcacccggccgatacaataccatttttaatctacagaccttattcacattttaccaattgcttcatgacatccttcatgatgaaagacaaaaagttcttgttttctgatctaccatctaattctagaacactcattatatttcattgtcatctggaacagctcaccttgccatttttttttttttgagacagttttgctcttgttgcccaggctggagtgcaatggcatagtcttggctcactgcaacctccatctcccaggttcaagtgattctcctacctcagccacccgagtaactgggactacagacatgccccaccacgcacggctaattttgtatttttagtagagatggggttgcaccatattggtcaggctggtcttgaactcctgacctcaggtggtctgcccgcctcggactcccaaagtgctgggattacagatgtgagccactgcgcccggcctcttctccatttttaaaagaacacaggccagttgatttgaatttgtctgatgtttccctttgattatatattttggtaggaacactatgaagtgatgttttgtccttcacagcacattttatcaggaggtgtataatgcctttgcttttactatgttttagaatgattttgctttgtttttttttttctgagacagagtcttgctctgtcgcccaggctggtgtgcagacgtgcgatctcggctcactgcagcctccgcctcctgggtccaggcgattctcctgcctcagcctcctgagtagctgggactacaggcgtgcaccaccatgcccagctaatttttatatttttagtagagacggggtttcactgtgttgatcaggatggtctcgatatcctgacttcgtgatccgcccgccttggcctttcaaagtgctgggattacaggcgtgagccatcgtgcctggccgattttgcttctcatgctaaaattattaatcagctcattctctgccattttatttagaggtttgaagtttggcttgattaatttctacagaattggggagagttttcccacctcccatttttcttgctttttccatttcctccttcctcagatacccccaaagttcaaaaccaaccaccccgattatgaattttcattttgtattctgaacatatagctaaaagcagagaattaagggtgaatgtttcatgttaaagtgattggacctgttgttaagcatatgaaataatatatttccttcaaaggctgactatactatagtgcatccaacatagcttgttgaatatctcagttcttttttttttttttttttttttttagctgaaatttgccacagggaaatatctctccagcctgggcaacatagtgagactctgtctcaaaaaaaaaaaaaaaattagccaggtgtggtggtgcacaactgtagtcctaaatacttgggaggctgaggagggaggatcctttgagcacaggagtctgaggctgcagtgagctatgattataccactgtactctagcctgggagacagagcaagaccccgtctctcaaaaaaaaaaaaaaattggtggtgaaatacacataccacaagatttagcattttaaccattaaaaaagtttgtttttggctgggtgtggtgactcacgcctttgggagtgatcccagcactttgggaggccgaggcggatggatcacgaggtcaagagatggagaccatcctgtccaaaatggtgaaaccctgtctctactaaaaatacaaaaaaaaaaactagctgggcatggtggtgtatgcctgaagtcccagctactcgggaggctgaggcaggagaattgcttgaacccagggggcagaggttgcagtgagccgagatggcgccactgcccgccagcctggagacagaacgagactctgtctcaaaaaaaagcttttttttttttttttttgagagaagggatctcgctatgtttcccaggctggtctcaaacttctggcctcaagcaatccttctgcttcggcctcccaaagtactgggattacaagagtgagccactgtacctggcctcatttttctattttgataaacacttttttttttttttttgagacggattcttgctgtgttgcccaggctggagtgcagtggcatgatcttggctcactgcacctctgcctcccgggttctctgcctcccgggttcaagcaattctgcctcagcctcctgagtagccgggactacaggcgtatgccaccgtgcccagctaattttttttgtagttttagtagagacgggttttccccatgttggtcaggatggtctcgaactcctgacctcaggtgatccgcccgcctcggcctcccacagtgctgggattacaggcgtgagccaccatgcctggctgataaacacttttaaggcttaacatgagctaagtattattttagaacagattgtctcaaccttggcactatagacattttgtccagaaaattttttgttagaggctgtcctgtgaatgcattttatccctgacctctacccactagataccagtaacacccctaccctgagttgtgacaagcaaaaatatttccagaaattgccagatgttccctgtgggcggtatgggtttgagaaccacttttctagataataggcatttgtagataatgaatactgagctaagtggaggagtaaatggttgaaatagactatgtggttaagtacagttacagagatataaaccaagagatgtggaagaatagcaaaaaatttccttagagagttgatagcaagtattttcccaagagagacagcaattctgagttgggtcattggggatggtggggggaaatgtgctgaggagggggaaatattctaggtggtggaacgggttatgtctagagatacggtagaggagcccttgggtgccttgagaaaaatgagataataagtatgattggagagaatatgggaggtagaattggaaagaaggatgctagttggggtcaggtttgagaaaggcttttttttttttttgagacggagtcttgccctgtcacccaggctggagtgcagtgcctcactcggctcactgcaacctccgccttctgggtttaagtgattcttctgcctcagcctcttgagtagctggcattacaggtgcgtgccaccacttccggctaattttgtatttttagtagagaccgggtttcaccatgttggccagactagtctcagaactcctgaccttgtgatccgccagcctcggcctcccaaagtgctgggattacaggcatgaaccaccacgcccggccgagaaaggctttttatgctatgctaaaatgtttcattttccccctttcattatagaaaatcaacaaatacttttaaagtctgtagagttatatgatcagctttttaaaagaatagtgatacagtgaaatggtaaaaatggtcaatggtgaatattaaactcaagaagataactctagcctgtaaagtaggaaaataggaagggatggagatttatataaaactaaaactagatgtcatatgttgcccttaaatcacatcaccctgtgtgtagacttcttcatcctcatttgtcaaaattctgacatattgtcaatactgatgaagattcttgatattcaaagcaggagtgaagtgggcaaaaatctgtattctaattttcattaccctaataatgtccttttaatttggagcagttctgtggcctctctttgtctgtcctgatcttgacatttttgaagagtatagaacaattattttttagaatgtatctctatttgggtttgtgtgatgcttctttatgattagatgaagggtatgcatttttggaagaaataacagaagtgatggtatgttgttttcagtgcctctgtaacaggagatgcatgacattggttggtcccattactgatgatggtaattttaatcacttgggtggtttccagtagatttttctatgtaaagtttatcatttttggccgggcatggtggctcacgcctgtaatgccagcactttgggaggctgaggcaagcagattacttgaggtcaggagtttgagaccagtctgaccaatgtggtgaaaccccatctctaaaaaaatacataaattagccaggcatggtggcatgcgtctgtaatcccagctgctcaggaggctgaggcaggagaatcacttgaaccctggaggtggaggttgcagtgagccgagattgtgccactgcacttcagcctgggtgacagagtgagactccgtgtcaaaaaaaaaaaaaagtttatcatttcccatttttattttgaaacagtcttgctctgttgcctaggctggagtgcattggcacaatctcagctcactgcagcctcaacctcctgggctcaagtgatcctcccacctcagtctcctcagtagcgtgttccaccacacccggctgctttttgtattttttggtagaggtggagtttcaccatgttgctcaggctggtctggaacccctgagctcaagggcactgatcacctcagcctcccaaagtgttgggattacaggtgtgagccaccacgcctggccctgaaaaatatttttaacggttacattatcatggagaattggatggtataaaacaatagcagttctcatatttgaaaataaattgatgtaatgaaacaaatgagaggatcaaataatattgtaaaaagaataaaaacccacatatggacaggtctgtggaaattgtattaaagcctacctctcccagattgtttccgtttgttgcaatccatttaagaacagtttttgggctgggcacggtggctcacgcctgtcatcccagcactttgggaggcccaggcaggtgtatcatgaggtcagatttcaagaccagcctggccaacatggtgaaaccctgtctctactaaaaatataaaaattagctgggcatggtggcatgcacttgtaatcccaggtactcgggaggctgaggcaggagaattgcttgaaccaggactcgggaggtggaggttgcagtgagccaagatagcaccactgcactccagcctggcctgggctacagggtgagactcagtctcaaaaaaaaaaaaaacaaacaaaaaacagtttgtgggaaaaaacaatccttgtgtatgacataatttgctgcttttcccatttagaaaatttaaaaaatacttatttgagatggggtctcactatgttgtccaggctagggtgcagtggctattcacaggtgtgaacatagtacactacagcctcgtactcctggccttagcatcttgagtagctgggactgcaggtgcacatcacagtgcctcgcttactttttccatttttgtctgttgatcctctctctcttcctttggggtaaaaattgtggcttgtgatggtggtttgtggggaaagaaaaagttggtaagctacaagctctgagcctttaatgtgtttttgttaaccatgcagacagacattagatacatagatacaacatagatgagttaaatttgaaagaaggcaccaaactttgttactttaaagcaggatttctcaaagggacactgttgacattgatttcagaagtgagattttcatggtttttaatgttattattataatggtatggatagtgttttgccctctaagaagtagctaggagtgtttccatagatgcatttagtttatatcacttatgtattctgtctctattttgtaagaaaattgcctatgaacagaattttttctgtatgtggatttaatgtcttcttctaaaggaaacatgggtgtggttcacatttccttagttttgagtagcatggcttaagttgtgatccaattttaaaaaatcagttgaataaataaatagaaaataaaaggataatttctgtactaaaaaagtcagctggacagttaaaacatctccttttattcgtaagtttttcaataaaaattgttaaaagcagtattcatttgtgtaatgatataatctttgttattgttttatgtgcttttctaaaatgcaggaaacataaggtaaggagaagtctttccttaccctgggaccagatgtctatgaggactgttgacttttctgctataaacaggatgataaattaacagtggtgtgataggtaaagtagatttgttatgacatatcttccattaagcgataataacttgatttttacttagttgatgaaataaaataactttgaaaccttgggtaacatgaaattgaatcaaaatattttcaagttatggaacatagtgttattaatagaatggagtgttgaaaaagcactggattatgctttctgtaacttttagttctgggtcttatgataactgtgaccctgagcctcagtgttttccttttaatctgtagtgatattttttagttcagtctctcattttaaactgcttttagctctaaaattttatctcagtgacctgttgagttatataacaatcgtatcaggtaacctagataagaagaggaaggcagtaacatttcagaaatacagtttggggttgggaatccttaagtgatccagacttctcctttggtccgaagatagtgtgaataaaacagctgagggatgtgggcatcaatatattgcagaggaaaaggttatttccaggagtggatttgcagctactcttaaatctattatgttggggctgggcactggggctcatggctgtaatcccagcactttgggaggctgaggcgggcggatcacctgaggtcaggagttcaagaccagcctggccaacgtggtgaaaccctgtctctacaaaaatacaaaattttgccgagcatgatggcgggtgcctataattccagctacttgggaggctgaggtgagagaattgcttgaacccaggagtcggaggttgcagtgagctgagattgtgccattgcactcctgcctgggtgacagagcgagactctgtctcaaaaagaaaaaaaaaatctattatgttggatagatggtcttttccagaagcaaattttatagatggaaagcattttaattaatctagtaaaattctctcattttacaaatgaggctccctctacctctctccccctctccccctctccctctctccctctctccctctctccctctccccacggtctccctctccctctctttccacggtctccctctgatgccgagccgaagctggactgtactgctgccatctcggctcactgcaacctccctgcctgattctcctgcctcagcctgccgagtgcctgcgattgcaggcgcgcgccaccacacctgactggttttcgtatttttttggtggagatggggtttcgctgtgttggccgggctggtctccagctcctaaccgcgagtgatccgccagcctcggcctcccgaggtgccgggattgcagacggagtctcgttcactcagtgctcaatggtgcccaggctggagtgcagtggcgtgatctcggctcgctacaacctcacctcccagccacctgccttggcctcccaaagtgccgagattgcagcctctgcccggccgccaccccgtctgggaagtgaggagcgtctctgcctggccgcccatcgtctgggatgtgaggagcccctctgcctggctgcccagtctggaaagtgaggagcgtctctgcccggccgccatcccatctaggaagtgaggagcgccttttcccggccgccatcccatctaggaagtgaggagcgtctctgcccggccgctcatcgtctgagatgtggggagcgcctctgccccgccgccccgtctgggatgtgaggagcgcctctgcccggctgcgaccccgtctgggaggtgaggagcgtctctgcctggccgccccgtctgagaagtgaggagaccctctgcgtggcaaccgcctcgtctgagaattgaggagcccctccgcctggcagccgccccgtctgagaagtgaggagcccctctgccccgctgccaccccgtctgggaagtgaggagcgtctccgcccggcagccaccccgtccaggagggaggtgggggggtcagccccccgcccggccagccgccccgtcggggaggtgaggggcgcctctgcccggccgcccctgctgggaagtgaggagcccctctgcccggccaccaccccgtctgggaggtgtgcccagcggctcattgagaacgggccatgatgacagtggcggttttgtggaatagaaaggggggaaaggtggggaaaagattgagaaatcggatggttgccgtgtctgtgtagaaagaggtagacatgggagacttcattttgttctgtactaagaaaaattcttctgccttgggatcctgttgatctgtgaccttacccccaaccctgtgctctctgaaacatgtgctgtgtccactcagggttaaatggattaagggcggtgcaagatgtgctttgttaaacagatgcttgaaggcagcatgctcgttaagaatcatcaccactccctaatctcaagtacccagggacacaaacactgtggaaggccgcagggtcctctgcctaggaaaaccagagacctttgttcacttgtttatctgctgaccttccctccactattgtcctatgaccctgccaaatccccctctgcgagaaacacccaagaatgatcaataaaaaaaataaaaataaaaataaaaaaaattaaaaaaaaatgagaaaattgagctctcctgaggttgcagtttgcttaacagcatagatctaattagtaattaggactagaaccaaggttatctgactcccagttcaaggttcttggtacagtaccgtgtttttaactagtccattaggttgttttctgtgtattttataacacttctgtaagaaagtggaatatttttctctaaggtatgttaaaactcttgttcgagaaaatacagtaaaggatacctgttgtatcttaaagtgatttttatgtttttctgtcaatgccacaatctgaagaaagtaaattagctacacttctattgctgtgacaatagattatttagaatcttcttgattacttgtattattgttcccgtgcttcagagctgtttccttgctatttaaaatcattatggtatagcccagaggctaagggggttttctaagagtatgcaatttgtcattgacatagtttttttgtttgtttttgtttgttttgtttgtttttgagacagagtttttgctctgttgcccaggctggagtgcaatggtgtgatctcggctcactgcaacctccacctcctgggttaaagcaattctcctgcctcagcctcccgagtagctgggattacaggcacccaccaccacacctgactaatttttgtagaggcagggtttcaccatgtcggcgaggctggtcttgaactcttgacctcatgtgatccacctgcctcggcctgtgaggattacaggcatgagccaccgcaccctgccaacacagttgtttttgattggaaaagtttattttcctaatctcaaagtagcttgtatctgttctttattgtgaaatgcagtttctacattgaatttgtgtagtctgtagttttgactgttttaagttcaataactagcttagtagtatacttgttagaggtcagagtaggttaactactagaaagaacagtccttctgcttactgtactaggaggaagtctgtggtggagggaaaaaaggagtaaaacaattccagtcttctgtaaaatttgagtaatttctttctctactccttctacatgaaaaatacatcttatttgatttttgcatcacatgccttctatatgtgttggaatctggatcaccatttcttcattacttgtgggtttttgttgtgaaaaatgtggagtaagttagaagttgactgtagaataggtaacattctcttaaattctttgatcagagtgagcagagtccagaagcttggctcagacttagggaactcatgacacttctcttaatatcctaagttcatgacatgtctcttaataccctaagtgtacaatacaatagtagatcaaggaaggcagaggtatctggcagacttagaagtaactgttcataaaaacaaggatcagtatgtttctacaagataatgatttaaagttgagccaggattagttatacctttaatataaaaaattgaaatagcttatttaatctgttctaggctatagtatacggagctaggtattaaaacattctctatatatttaactcttttttttgagacagggtctcactctgtctcccaggctagagtacagtggcatgatcttggatcactgcagcctagacctcctgggcacaagtgattctcccaccttagcctccacagtagctgggactacaggcctttgccaccacacctggctcatttttgtattttttgttgagacggggtttcaccttgttgcccaggctggtcttaaacccctaagctcaagtgatccgcttgcctcagcctcccaaagtgctgggattacaggtgtgcaccactgcgcccaggctatttgacttttttattctgtaaaattgcaagcatattcagaaataagaaaatagtataacggggccgggtgtggtggctcacgcctgtaatcccagcactttgggaggctgaggcaggtagatcacgaggtcaggagttcgagaccagcctggccaacatggtgaaaccccgtctctactaaaaatacaaaaattagccaggcgtggtggtgggcgcctgtaatcctagctactcgggaggccgaggcaggagaatttcttgaaccagggaggcggaggttgcagtgagccgagatcgtgccactgcactccagcctgggtgacagagcaagactcattttttttttttttttttttaaaaaaaagaaaaaagaaaatagtataatgggttgggcccggtggctcacgcctgtaatccagcactttgggaggccaaggtgggcggatcacctgaggtcaggagttcaagaccagcctggccaacatggtgaactcttgtttctactaaaaacacaaaaattagctgggcatggtggcaggcacctgtaatcccagctacttgggaggctgagttaggagactcacttgaacctgggaggtggaggtttcagtgagccaagattgtgccattgcagtccagcctgggcaacaagagcgagactccatcccaaaaaaaacaaaaaacaaaagacaactatatatatatatataaaataacgaaaccccctaagtacctgtcacccagcttcaacaattatcatcttgcagttagttgaatttggttaacacttacccttcagtggattattctagactaaatttccaaacataatcatattgtattgaagtgttttttgaacaaactatactatggggtatttacctaaaatgaactatttgcaaaaagataagttgattttttttcttctggtgccagtacacatcataattgtagttaaaagctattatcctcacattaaagtttaatttttaacacattatgaaaatttaaaacttacagcaaagctttaaaaattttacactgaacaccaatattattaacatctagattctacctttaacattttactcttcttttttttttactcttcttgttttatcacatattgatccatctgtccaactctccattgatgtaacatttcattttattttcttattcatttcaaagtaaattacagatattagtatagttgaggttcagtttttaaagtcatattttcaactaattgtttttcctgttttgaaagactgttatatctgaagttccacattatgacaactcatagtctctatggttccagtgcttcccattttgaacttttctttcatgttctacgaacctttattaaaatatttagagctatgtacaagtaatatatacagtatttagctaaaactaagtagaatgaatgagggttttgcttgtgtgtttattgcagtctttaaaaaaaatctcttctagtgagtcaatgtgtatcttttttttttttttttttttttttgagacagagtcttgctctgtcgcccaggctggagtgcagtggcgtgatctctgctcactgcaaagctccacctcccggattcatgccattctcctgcctcagcctcccgagtagctgcgactacaggcgcctgccaccacgcctggctaattttttttgtattttttgtagagatggggtttcattatgttagccaggatggtcttgatctcctgacctcgtgatctgcccgcctcggcctcccaaaatgctgggattacaggcatgagccaccgcgcctggccaagtcattgcgtatcttaagatggtacactaaactaatatgcttgccattggtgacaacatagatgaacctggaggacattatggcaagtgaagttagccagacgtggaaaaaataatacttcatgacttcaacctatatgtggaatctaagaatgccaagtctgcaaaagaagagagtagaaaagtagttaaatgggtaggaaggtgggagaaatggggagatattggttaaaggttaccaagttggaatcacgtaggatgactaggtctagagatctaatgtacagcatgaacactatagttaataatactgtatcatgtactggaaagttgttaaaagagtagatttcaggtgttttcagcacacacagaaaaagataactatatgtggagatgggacattttgcttgaccatagtaatcatttcactatgtatatgtatatcaaaacattcatgttgtacactttattgattgattgattgagacagggtctctcgctgttgcctcagctggagtgcagaggcatgatcacagttcactgcctgcttgacctcccaggctcaagcgatcatcccacctcagccccccaagtagctgggactacaggtgtatgctaccatgcctggctaatttttatagtttttgtagagatgggttttgccgtgttgcccaggctggtattgaactcctgagctcaagcaatctgcccgcctctgcctcccaaagtgctaggattacagatatgagccactgcgcctggccataccctttaaatatatacataaaaagaagaatgcctttaaaaattttccatttaacaattactctcagggccaaaactcactgtttaagtattttgctcttttactttgatcttggtgttctatgtagtgctaaaatatactttcatctccatatgactgcttgtaacaaaaagctgttcaccacattatgaactccctgaatacacacaataatcatatagtaaatgcttgttgaataaacaagacaaaattcatcagtttttatccttacttaattttttgaacttttccttgaacttctgttatcaaacttaatacatgaacaacagaaagatgctacggatctatgtagtacaaagtaaaatatgaaatttacacactaaatatttctgtagcatattttcagaagtaagtaattgaatataaacagaagcaagcatattctatttttttattatttaagtgggaaatattttaaaatcttatgtcatatttgctttagatttcttttaaagaattaaaacattacagatagagttgaagcctcatgggttattttaatgttttctacataaacatgtttccatatacataaaccttatttagaattttttcagtttatttatttatttttattattatactttaagttttagggtacatgtgcacattgtgcaggttacatacgtatacatgtgccatgctggtgtgctgcacccactaacttgtcatctagcattaggtatatctcccaatgctatccctcccccctcccccctccccccaccccacaacagtccccagagtgtgatgttccccttcctgtgtccatgtgatctcattgttcagttcccacctatgaatgagaatatgtggtgtttggttttttgttcttgcgatagtttactgagaatgaaattttttcagttttatacgtttatgtaagtggcaccatacagtacatattattttgcaacttgccttttttttttttgtttgtttgctcaatgttgtttttaggattttgatgtaactccagatctgcactgtccaatacaatagccactaactatctgtggctattgagtactggaaatgtagctagtccacattgagatgtgctagaaatatatttgtacatggaatttcaaatatttagtattaaaaacatgtaaaatatctcactaaaagtttagtatccctaagaatctgaaatagaaaatgctccaaaacccaaaattttttgattactgacatgactctcaaaggaaatgctcaaaggtttaatgcaaatattccaaaatctgaaaaaatctgatatattgaccacatatggaactgataatagtttggatgtattggattaaataaaatgtaaaaattttaccagtggtttccttttttaaaatatggctactagaaaatttaaatatatatttgaaatgccttacattatatgtctgttgggcagcactgatctatattgcccacttttcattcctgtttatttattattattttatttttatttttattttttgagacagagtctcgctgggtcgcccaggctggagtgcagtggtgctatctttgctcactgcagctgctgcctcccaggtccaagcaattctcttgccttggcctcccaagcagctgcgattacagctgtgcaccaccacacttggctaatttttgtatttttagtagagacggggtttctctgtgttggccaggctggtctcgaactcctgacctcaagtgatccacctgccttggcctcccaaagtgctgggattacaggtgtgagtcactgctcccagccttcactcctgtttagtattaagttatatagataatagtttgctactggtggatagttgttgttttttttttttacgaatttggtgctactaaagactgttctcatgagcattcttaaacatgtctcctttgcacatatgctagagtttctttctccctaatggttcttctgatttatacttccactggcagtttgagaatgttcttgttctgcagttcttcatcctggtcgatgtttttgtgtagataactgtaatttaatacttaaagtcaaaagcataaggaagcattggtaattatttaagtgaatataaaatgtcagcttatttttctcagtgaatcttttgtaatagtcaactcacattgcctattttttattgtagtgcttctgatctgaataaataaatttaaaatttaacagccatgttatgtatcttattagtaggcagctgcagttatgcaaccaaagaatgtcccatctttaagttccattagcttgaaaaagaaatggcagctttacgtcatggaatactgtgctgccactaaaaatgatgttttagaagaatatttaatgatgcagaaaaatattcacagtatcttaatggaaagaaaagattataaagcagtaaccatttcgttttgttaaaatcaggtctatgttagctttttttttttgagatggaatctcgctctgtcacccaggctaaagtgcagtggcgtgatctcggctcactgcaacctccgcctcctgggttcaagtgatgctcctgcctcagcctccctagtagctgggattacaggagcatgccaccacacccggctaatttttttgtatttttagtagagatggggtttcaccatgttggccaggctggtcttgaactcctgacctcaagtgatccacccgccttggcctcccaaagtgctgggattacaggtgtgagccaccgtgcccggcgagcatttccttacatgcttatctctggatggtcagattgtaggtaacttctattttgcacttcacactttttttttttttcttgagatggagtttcgctcttgttgcccaggctagagtgcaatggcgtcatcttggcccactgcaaactccgtgtcccgggttcaagcgattctcctgcctcagcttccagagtagctgggattacaggcgcccgccaccacacctgcctaatttttagtatttttagtagagacagaggttcaccatgttggccaggctggtctcgaactcctgacctcaagtgatccactcgcctcggcctcccaaagtgctgggattacaggcgtgagccaccgtgcccagcctgtacttcacacttttaatatttcattttctgtagtggatttactattaccagggaaggggaatgcaaggaggagggaagagttcttaacctaaaattttcatagttggaatattattataggaaagaagagattgaatgaggtgtcactgttcccatgtttaaagataagtcaattgggaggccgaggcaggtgaatcacgaggtcaggagttcaagaccagcctggccaatatggagaaaccccatctctactaaaaatacaaaaattagctgagcgtggtggcaggggcctgtaatcccagctactcgggaggctgagggaggagaatggcttgaacccagagggtggaggttgcagtgagctgagatcgtgccactgcactccagcctgggcgacagagtgagactttgtctccaaaaaaaaaaaaaaagataatactttccttctattcaatttcaggcttttcttaagttacaaatggaaccagccaaactatgttattgcttacccattgtttttccagcgttagaggagtttttcaaagaatattttttgatttagagattattttatttattatctatttagagattattcatcatttagagattgccatttaatttcagtaagagttccatttgcatctgatattttttagtttcggagaaaggaaatggtggagaaatggattcatctccaatcctttggaataaaattcagacagtttaagctctagtctcaacttgatttaatttggaattgcatgatgtggtgtcagatttgggttcacatccagttctcttgctgtgtaaccttgggaaatttacccagcatctgagttgtttcttcatgtgtgcagtggagacaataccaagatgaagatttcatgagatgtctagtgtagacatctatttttcagagtggatgcatttaacagttggatgctgaatttataagagtatggatttcataaaaagagcataaatttcatgatatgatgtatatatcaaaagatataggtcgggtgcagtggttcatgcctgtagtcccagcactttgggaagttgaagcggatggatcacttgatgccaggagttcgagaccagcctggccaacatggtgaaacttcgtctctactaaaaatacaaaaattagccaggcgtggtggtgtgtgcctgtaatcccagctacttgggaggctgaggcaggagaattgcttgaacccaggaggcagtggttgcagtgagccgattttgtgccactgcactccagcctgagtgacagattgagactccatcttaaaaaaaaaaaaatgatggctgaataggaacagctctggtctgcagctcccagtgagaccaaaatgtagaaggcgggggatttcttcatttccaactgaggtacccagttcatctcattgggactggttaggcagtgggtgcagcccatggagggtagcagaagcagggtggggcgtcgcctctcccggaagtgcaaggagcgagagatctcccttccccaagccaaaggaacccgtgagtctatgctatccggcacagatactacacttttcccatgatttttgcagtccgcagacccggagattccttagtgtgccaactccaccagccctgggtttcaagcacaaaactgggcatctgggcagacagtgagctagctgcaggagttttttttttttccccctcttcataccccagtggtgcctggaaccccagtgagatagacccattcactcccctggaaagggggctgaagccagggagctaggtggtcttgcttagcgggtcccactcccacagaacccagcaagctaagaaccactggcttgaaattctcattgccaacacagcagtctgaagctgacctgtgaagattgagcttggtgaggggaggggcgtctgccattactgaggcttgagtaggcagttttcccctgacagcactaaggaggctgggaagttcagactgggcagaactcaccacagcgtggcaaagtggctatggccagactgcgtctctagattcttcctctctgggcagggcatctctgaaagaaaggcagcagccccagtcaggggcttatagataaaactcacatcttcctgggacagataacctgtgggaaggtgcagctgtgggcgcagcttcagcagacttaaatgttcctgcctgctaggtctgaagaaagcagtggatcctgacaaggaggattctcctagcacagcacttgagctctgctaggggacagactgcctcctcaagcgggtccctgaccccagtgcctcctgactgggagagacctcccagcaggggttgacagacacgtcacacaggagagctcccgtgggcatcaggctggtgcccttctgggacgaagctcccagaggaaggagcaggcagcaatatttgctgttctccagcctccgctggtgatacccaggcaaacagggtcaggagtggacctttagcaaattgcagcagacctgcataagaggggcctgttagatgaaaaactaacaaatagaaagcaataatatcaacatcaacaaaaaggacccccacacaaaaaccccatcaaaaggtcatcagcctcaaagatcaaaggtagataaatccacgaagatgaggaaaacccagtgcaaaaatgctggaaattccaaaaacccgaatgcctcttctccttcaaatgaacacagctcctctctagcaaggccgcaaaactggacggagaatgagtttgacgaattgacagaactaggcttcagaaggtgggtaataacaaactcctctgagctaaaggagcatgttctaatccaatggaaggaagccaaggaacttgataaaaggttacaagaactgctaactagaataaccagtttagaggacataaatgacctgatggagctgaaaaacacagcacaagaacttcgtgaagcatacacatgtatcaatagtcaaatcgctgaagcggaaaaaaggatatcagatattgaagatgaacttactgaaataaggcatgaagacaagattagagaaaaaaggttgaaaaggaacaaacaaagcctctgaaaaaatatgggactatgtgaaaagaccaaacctatgattgattggggtccctgaaagtgatggggagaatggacccaagttggaaaacacacttcagggtattatccaggagaacttccacagcctaccaagacaggccaacgttcaaatcaggaaatacagagaacaccacaaagatactccttgagaagaccaaccccaagacacataatcgtcagattctccaaggttgaaatgaaggaaaaaatgttaagggcagccagagagaaaggtcgggttacccacaaagggaagctcccagaggaaggatatctgggcagaaaccctacaagccagaagagagtgggggccaatagtcaacattcttaaagaaaaaacttttcaacccagaatttcacatccagccaaactaagcttcgtaagcgaaggaggaataaaatcctttacggacaatcaaatgctaagagattttgtcaccactagacctgccttataagagctcccgaaggaagcactaaatacagaaaggaaaaactggtactagccactgcaaaaacattccaaattgtaaagaccatcgacactataaagaaactgcatcaactaacggtcagaataaccagctagcatcataatgacaggatcaaattcacacataataatatgaaccttaaatgtaaaagggctaaatgccccaattaaaaggcacagactggcaaattggataaagagtcaagacccattggtgtgctgtattcagaagacccatctgatgtgcaaagacacacataggctcaaaataaagggttggaggaatattaaccaagcaaatggaaaaaacaaaaaaaaaaggggtgttgtaatcctagtctctgataaaacagactttaaaccaacaaagttcaaaaaaggacaaagaagggcattacataatggttaagggatcgatgcaacaagaagagctattttaaatgtatatgcttccaatacaggagcacccagattcataaagcaagttcttagagacctacaaagagacttagattcccacacaataatagtgggagactttaacaccacactgtcaatattagacagatcactgagacagaaaattaacaaaaatattcaggacgtgaactcagctctggaccaagcagacctaatagtaacctacagaactctctaccacagatcaacagaatatacgttcttctcagcacatcacacttattcactcaaaaccccacaactacatggaaactgaacaacctgctcctgaatgactgctggtaaataacgaaattaaggcagaaataaagaagttctttgaaaccaatgagaacaaagagacaacgtaccagaaatctctgggacacagataaagcagtgtttagaggggaatttatatcactaaatgcccccatcagaaagcaggaaagatctaaaatgaacaccctgatatcacaattaaaagaactagagaaaaagagcaaacaaattcaaaagccagcagaagacaagaaataactaagttcagagcagaactgaaggagatagagacatgaaaacctctccaaaaatcaatgaatcaaggagctggttttttgaaaagattaacaaaatagaccatgagccagactaataaagaagaaaagagagaagaattaaatagacacaataaagaatgataaaggggatatcaccactgatcccacagaaatacagactaccatcagataatattataaacacctctacgcaaataaactagaaaatctagaagaaatggataaattcctggaaacatataccctcccaaggctaaaccaggaagaagttgactccctgaatagaccaataacaagttctgaaattgaggcagtaattaatagcctaccaaccaaaaaaagcccaggagcagatggattcacagccgaatgataccagaggtacaaagaggagctggtaccattccctctgaaactattccaagcaatagaaaaagaaggattccttcctaactcattttatgaggcaagcatcatcctgataccaaaacctgtcagagacacaaccaaaaaaggaaatttcaggccaatatccctgatgaccatcgatgtgaaaatcctcaataaaatactggcaaacagaatccagcagcacatcaaaaagcttatccaccattatcaagtctgcttcatctctgtgatgcaaggctggttcaacatacgcaaatcaataaaagtaatcaatcacataaacggaaccagtgacaagaaccacatgattatctcaatggatgccgaaaaggccttcgataaaattcaacaccccttcatgctagaaactctcaataaattacgtattgatggaacatatttcaaaataataagagctatttatgacaacccatagccagtatcatactgaatgggcaaaagttggaagcattccttttgaaaaccagcacaagacaaggatgccctctctcaccactcctattcaacatagtgttggaagttctggctaggcaagagaaagaaataaaggttattcaaatagcaagacaggaaatcaaattttctctgtttgcagatgacatgattgtatatttagaaaaccccatcatctcaacccaaaaactccttgagctgataagcaacttcagcaaagtctcaggatacaaaatcagtgtgcaaaaatcataagcattcctatgtaccaataatagacaaacagccaaattatgaaggaactccctttcacaattactacaaagagaataaaatacctaggaatgcaacttacaaggggtgtgaagggcctcttcaaggagaactacaaaccactgcttgaggaaataaggacgcaaacaaatggaaaaacattccatgctcatggatgggaagaatcaatatcgtgaaaatggccatactgcccaaagtaatttacagagtcaatgctattcctatcaagctaccattgactttcttcacagaactaggaaaaactacgtagagccaaaacaatcctaagcaaaaagaacaaagctggaggcatcctgctacctgacctcaaactatactacaaggctccagtaaccaaaacagcatggtactggtaccaaaacagatatatagaacaatggaacagaaccgaggcctcagaaataacaccacacatctacaaccatctgatcttcaacaaatctgacaaagacaagcaatggggaaaggattccctgttttataaatggtgctgggaaaactggctagccatatgcagaaaacagaaactggaccccttctttagagcttatacaaaaattaactcaagatcgattaaagacttaaatgtaaaacctaaaaccataaaaaccctagaagaaaacctaggcaataccgttcaggacataggcatgggcaaagacttccatgactaaaacaccaaaagcaatggcaacaaaagccaaaattgacaaatgagatctaattaaagagcttccacacagcaaaaaaactatcattggagtgaacaggcagcctacagaatgtgagaaaatttttgcaatctatgcatctgacaaagggctaatatccagaatctacaaggaacttaaattacaagaagaaaacaactccatcaaaaagtgggtaaaggatatgaacagacatttctcaaaagaagacatttatgtggccaacaaatgtgaaaaaaagctcatcatcactggtcattagagaaatgcaaattaaaaccacaatgagataccatctcacgccagttagaatggcgattattaaaaaggcaggaaacaacagatgctggagaggatgtggagaaataggaacacttttacacttttggtggaagggtaaattagttcaaccattgtggaagacagtgtggctattcctcaaggatctagaaaccagaaatacaatttgacccagcaatcccattactgggtatatacccaaaggattataaatcattctactataaagacacatgtacctgtatgtttattgcagcactatttacaatagcaaagacttggaaccaactcaaatgcccatcaatgacagactggataaggaaaatggggcacatatacaccatgaaatactatgcagccataaaaaagattgagttcgtgtcttttgcaggtacatggatgaagctgtaagccatcattgtcagcagagtaacacagtaacagaaaaccaaacactgcacgttctcactcataagtgggagtcgaacagtgagaacacatgggcacagggaggggaacgttacacattggggcctgtcaggggttggggggcaaggggagggagtgcattaggacaaatataatgcatgtggggcttaaaacctagatgatgggttgataggtgcagcaaaccaccatggcacatctatacctgtgtaacaaacctgcatgttctgcacatgtatttcagatcgtaaagtaaaaaaaaaaagatatggaagttactatgcgcgttaataaaatatgtttatacctcctcccttaggtgtctattatgtagaacaagtttattacattctaatgataaagtaaacactctgttttcaaaggtggtgttatacgtttgtgtatcttttgccccgggcatgatgatttcatcgtttgtgtaataaatttaatactaccatagtctccccttattcacacgggataagttccaagaccccaatggatgcctgaaactgtggatagtactgaatcctatatacacttatgtttttttcctgtacactcatatttatgataaagtttaacttataaattgtgcacagtgagagactgacaataactataataaaatagaacaattataacaatatactgtaataaaatttatgtgaatttggtttcaaaatatcttattgtactgtactcacccttatgatgatgatgttagatgataaaatgcttatgtgatgtgatgaaggtaggtgaattatgttaggcattgtaatgcagcatgaagctactattgaccttctggtgttacatcagaaggaggatcatctgcttgggtggtcctgaatcatcacgtcctgatgatgtctgttgctggttgtcaggagcagacagtgtccatgactaatgggcaggcagcgtatatagcatgtatacactggacaaagggatgtctcatgtccacggctggacagagcaggagagtgcaagattttgtcacactactcagaatcgtgcagtttaaaacttaccaattgtttatttctggaattttccgtttaatatttttggactgcagttgaccacaggtaactgaattcatggaaagcaaaacaaccatggacaaagtgggattactgtattatttcagattttaattagcatttttcaaaactctgtctagctagtgcttgcattgtagaatttgtctgatttcatttttattgattagggaaataagctttatttttatctggagtgatttgtttctttgtgcttcctcaaaattgagtagtggctactgagtatatatcgaaaaggaaataaattattatgtcaaaaagatacctacatttgtatgttgattgtagcactgttcacaagattaaagatatggaatcaacctaagtgatgaagaaaattggtgtgtgtgtgtgtttgtgtgtatacatacacactgtggaataatactattcagccacaaaaaagaaaaaaaaatcatgtcttttgcagcaacatggatgggactggaggccattatcctaactgaaataactcagaaagtcaaatactacatgttctcacttacaggtgggaacttaaatggttacacatagaatagagtagaataatagacattggagactccaaaaggtgagagggtggcaggggggtgagggttgaaaaattacctattgagtactttgttcagtatttgggtgatgggtacactaaaatcccactttaccaccatgcaatatatgcatgtacgaaatctgcacttgtaccccctaaatatatacaaataaaagttttttaaaacacttagtaaatagcctgtcatagggaataattgaaaccatttcgtatctcactttaaaacctttaggctgggtgctgttgcttatgcctataatcctagcactctgggaggccgaggtgggtggatcacctgaggtcaggagttcgagaccagcctggccaacatggcgaaatcccatctctactaaaaatataaaaattagccagtcatggtggcacacgcctgtaatgccagctccttgggaggctgaggcgggaaaatcacttgaacccaggaggcggaggttacagtgagccgagatcacaccactgcactccagtctgggcaacagagcgagactccatctccaaaaaaaaaaataaaaataaaaataaaaaacctttttagttctgtttcaatgttatcttctttttatttaattatttttggaataagaaataatatttatatggtttgaacaccaaaaggtataaaagatatttttaaaggtataaagtataaaagttagaaatttcccccacttccctgttctctgttcccacagctgccagcagcttaccaccccccagcccaatcactgctactgatgcctaacctatctttccagagttctttgtgtgttcagtagcagttaaccacagatctttaatcattcccctttataccataaaaggtggcatgttatgtacacttgcctcccctttgctttttccacttaatgtgtcttgagaagctttccatatatcagtacatggaaaactttcttatattgttttattttaaatttatatacaataaatgcatggatcagaaaaataattgaatagtgggccccaaattaaatgattactctaatgatttgtagatgggtttagttaaagcactgggatatttagctacaggtataggaatgcatgattattttctgtcaggaaacctagattttgttcttctccccttctttatcaaaggtgaaatcagactcttatttaaaccaggattaagtattctttgcataataatatatatttgctttcccaagttattcttcaggaaagtcttgactctctagcaaactttgtttcttaaaatggaggttagcaggtgttggaaataaggtgagagttttaacacttaaaggaaactatataaagattagatatagtcagaaatttagaaaacattaggaaattcacagagagatggatcccccttttctaccctagattacccctgggctgcttaatggcttgtctttactattagattgtgagctccttgaggtcaggttttatctgttttttatttcaataccaagtgccaagaatatattcagcatttggtgtaaatattataaaatgagtaaatgaatgtgctcttgaatagaagttaactctgattttgggttaagtcccccgccccctttttttgagacagtctcactctatagctcaggctggagtgcagtagcgcagtctcagctcactgcaacccccttctccggggttcaagcaattcttatgcctcagcctcccaagtagctgggattacaggtgtgtgccaccacacccggctgatttttgtatttttagtagagatggggtttcaccatgttggccaggctggtcctgatctcctgaccttaggtgatctgcctgccttggcctctcaaagtgctgggattacaagtatgatctactgcgtctggctgattttgtgttaaaatcctttatgtcagttccagaagaggttaaatggaagttttcgaggcaagagatacttgtgaatttgacatgagtggcctttgttttgaaattttaatgctacacagatgctgtaaaaggattttttcaggccgggcgcggtggctcacgcctgtaatcccagcactttgggaggccgaagcgggtggatcacgaggttaggagatcgagaccatcctggccaacatggtgaaacctcatctctactaaaaatacaaaaattagccgggcgtggtggtgtgcgcctgtagtctcagctactcaggaggctgaggcaggagaattgcttgaacccgggaggtggaggttgcagtagagccgagatcgcgccactgcaactccagcctgggccacagagcaagactccatctcaaaaaaagggtttttcaaaaaatcatgtacaattagaaaattgtgtctcttaaatctatttgcttatgttattaatcccagattatgactgttctttcccctaaggcattagcctgttgaaagaaacagacctataggacttttgttgatgttaaagccagaccagaaatttagaaaatcaggatatttgccattttgataagaaaaccatttaatagttgaatataggaatttgcattttgagagtgtgtactaatttagattctccaggaatagaaccatcatctgaaaataaataagtttaaccagacggacaaggagtgatatgtagttttaggtggtaagactgtgatattgttaggttacatgtatctagggcaagatgctcaaatacaataagtatatacagactaggaactctagttgtctttttttaattaatgaaaagagggttttatgcttcatttctaaacattctcaaaggaatttatgttttgttgatgatctttttttatttatataaatttacgggggtacttgtgcactttttttttaaacatggatagattacagagccgtcaagtcaagcctttagagtttccatcacccaaataacacacattgtattcattaagtaatttctcatgatctcccacctcctgctctctcacctttccaagtctgttatctatcattccatgctctacgtccatgtgtacacatttttcagcatccacatgtgaatgagaacatgtgttattcccaccaacagtgtatgagtgttcccttttctctgcaacctcaccaacttgtgttattttttgtctttttagtaatagtcattctaactggggctggatgatacctcattgtgggtatttttaaaataaaaaaaaatttgtgtgtacataggtatatttatttatggggtacatgagataatattgatacagacatacaatgttcaataactacatcagggttgtatccatcaccaagcatttatcctttcttggtgttagaaacaatctagtttctaatctctaatagtttctaatctctagtagttatattaaaatgcataatgaattattattgactgtagtcaccccattgtgctatcaaatgctaggtcttattcattctatctaactatatttttatacatattagccatccccactgtgccaccatccccattagtgccctggcccccactacccgtcctagcctctggtaaccatcattctactctctatctctatgagttcaattgttttgatttttagataccacaaataagtgagaacatgtgaagtttgtttttctatgtctagattatttcacttaatataatgacctacagttccatccatgttgttgcaatgacaggatctcatacttttttaagggctgaataggactccattgtgtatgtgtaacacattttctttattcgtccgtctgttgatggacactcaggttacttccaaatcttggttattgtgaatagtgctgcagtaatcatgggagtgcagataactctttgatatactgatttcctttctttggggtacatatttagcagtggaattgctggattatatggtagctctctagtttttttttttttttttttttttcatttttgagacagggtctcactctgttgcccaggctggaatgcagtggcggaggttcacttcagcctcaacctcgcaggcttaggggatccacccacttcagtcttccaagtagctgggactataggcgcataccaccatgcccagctaggtttttgttgttgttgttgttgttgttgaggcagagtctcactctgtcacccaggctggagtgcagtggtgcgatctcggctcactgcaacctctgcctcctcggttcaagccattctcctgccttagcctcccaagcagctgggattacaggcgcccaccaccatgcctggctaacccagctagtttttaattgttcgtagagatggggtttcaccatgttgtctagactggtctcgaactcctcgactcaagtgatcctcctgcgttggtgtctcaaagtgctgggattgcaggcacaaggcaccgtgcctggtcagaatttttttttaagggtttctcctttgtaaatttcttattcatatcttgaattgattttctgagtttcttgtattggttttcagacttttcttgcatctcagtgacccttaaaatcaatattttgaatattttatctgggattttgtggatttcattttggttaagatctgttgctgcagaatcgtgttcctttgacagtgtcatattaccttggtttctgatgtttcctttgtcttttcattgatttctgtgcatgtgctgtaacagtcacttcttatctttgaatttactttcatggtgaggggagatttcttcctgaagatgtgactataatgttggttgggccttgcttctgggtgcgtgcagtagtgaagtctctgtatgatttattttgagacagctctgttgcccaggctggagtgcagtggcacattcatagcttgcttcagcctcaaagtcctgggcataagtgatccttctgcctcagcctcctgagtacctaggactacaggcgtgtgccaccatgcctggctaattttcaattttcttttagagatgggggtctcattatattgcccaggctggtcttgaactcctggtctcaagcaatcctctctccttggcctcccaaaatgttaggattacaggcatgaaccaccgtgcccagcctctgtatgatttctttggctataaatagcattaatggtgtctgtggtttccttgatgtcttagcttgagtttatttgtggaggctgaagttgcgctggggattggaatgcctaataggcctgtctttaggtttcaatggtagtgatggtgggctaagcatgtctatccatgtgccctggggcagtgtgtgctggtaactgtgttggcagttccaggcaggctgattcttgggcttctgagtgactttctcagatgcctgttgtaatggtgtaccaggtgggtgagctggctcttgagctcctgggcaactggcatggcatagtttatggtggtagtagttttgttgagatactcttgtgggtcccaagcactttgcatttgtgttagcagtggttacaatgagatccaggccagtaaggtggtacttgcaggcatgaggcagctgaggcggtactggtagggtgttatccctgacctctgtcccctgggagaagtactctggtgtttcagagtgtttcaggtagtgggtttggttgtggaatcccctggtaacctggatcctgcactgtttctcagccaggtcaaagcctggtagagctggactgggaaagcttgcactcaggcccccacagtggtgtaatgtcatgataggcggggtggaatgatcttcaggctgctggcaaaatgcttgggtgagggatgagtgccactgctgagatcctgccatggggaagttgggcctggtcccaggagtgagttgtgttcctttcatgccccagtccaggcggagttccttcctcttgtccctgctgttcagtcagaactctgcagttcttgcctagtccctaaatcatcccagggtcgggtcatataagccccatccagctcaagacttaagcctccagggcaattaatcgtgctcaaatcctgggggtggtgtttgcttctagcactggtggtggctgcatcccacaccaggcagagccaccccatccccgcccctactcacactctgcctctccaaacagcagcccaagtttccctaatggctaggactggccctgttgcttccccgtactgctcacagttatgagctgagatcctgcatcgtgtcttgttacagctgcttaggtttcaaaaatggcatgggacacagaatgtgttccctccctgaaacagttctttctcacagtcttccagtcattccctaaattaattagattcagggcttaagagggtcagggtgctctactgaggactggattgtatggtagtggaccacagaaaaatactcaccctctcccatattggggaatcacttctggttccctgtgggtcccagccacacaggctctctgttttccttttgcttcctagattttggtttttgctgtcgcttttctgttgaactcctgtgttccctctgggataatatatccaaagtgtcattgtctacacaattttagctcttgtacctggatgaggcacgcttgaaattcttgcagtcatccatcttttcctgatcttgtttcttctgccccattccccaggttcctccagggtctcacagttcccctgtatgtgggaaaggcagttttctttctgcccaatcctgcttctcctttgtccacccagatgaggtttccgctagaattgctacttaaagtggttctgtggaacattttgtagcagagaaaatcagggctgagggagcaccataaaggttagaaaagattagaacattaggttagaaaatctgaactactctacctgtcttgattaggaggattagagttgatgttggatgggtttgttggtttattttccacttatctatcagaatgaagaacttactgccttttcttcttagttggtctaatatttatcactttaattatttttaagtgtacaattcagtggcattaaatatatttataatgtatcatgatcattactacctatgcccaaaactttttcatcatccccaacaaaactctatatccaaaaaaaaataaaaccctctatatgtacatggaacaattaagttgggcccctatcttgcaccatataaaacagttaaatgcatcaaagatcttaacgttaacagctaaaattataaaactcttagcagaaaacatttgggctgattttcatgacctgggatttggcaatgatttcataaacataatgtagaaagcacaggcagcaaaagaataagtaagttggacttcattaaaaatttaaaaatttttttacatcagaggtcactatcggctggatgtggtggctcacacctgtaatcccagcactttgagaggctgaggcgggtggatcacttgaggtcaggagttcgagaccagcctgaccaacatggtgaaaccctgtctctactaaaaatacaaaaattagctgggcatggtggcgcgcacctgtagtcccagctacttgagaggctgtggcaggagaatcacttgagcatgggaggtggaggttgtagtgagctgagatcgtgccactgcactagaacctgggcgagagcgcaagactccatctcaaaacaaacaaacaaacaaaatgaagcaatcccccccccaaaaaaaaggtcactatcaagagaataaaaagaaagacaactcagaatgggagaaaatatttgcaaatcatatgactgatgagggtttaatatccagaatgtgtaaagaacttttactgagcagcgaaaagaaaacccaatgaagaaatgaacaaaggccttcaagaaatgaacaaaggccttcaatagccatgactttacttttttaaatttaaatttaaattttttgagacaaagtcttactctcttgcttgggctggagtgcagtggtgtgactgtggctcactgcagccttgatctcccagactcaagtgattctcctacctcagtctctggagtagctaggatgacagactcacactaccacatgtgactttgtgtgtgtgtgtgtgtgtgtgtgtgtagagacagggtctcactatgttgctcaggctggtcttgacctcctgggctcaagtgagcctctcacttttatttttatttgtagtagagatgagatcttgctaatgttccccaagctggtctcgaactcctgagctcaagcaatcctaccttcctcggcctcccaaagggctgggattataggcgtgattcactgtgcctggcctagtttctttgttttaatttttttcctccccatttgtcttttgagtttccctgagaatctgtcttgctgctgtctcagttgtcattcactgttattacactggaaccctattgatgtagtggtaaggaattagggaggggaagtgttttgtaatctcatgattaaatgtcatttcttttttttttaattggtcctgagtccctgaattgtgactctcagaagtgtttcttagcccttgccctcccacttagatgagacaggaaggctataagcctcgggggttttctaattgtctttcctcttggtagataatggtgtgagcatatttgaatatagtttctttcctctcctcctgctcaaggcacaaggaaattttcctcaaatatttgcagtgaaaacatactaaaacccttgtaggattcctggaggtaaaacctaggaaagtgtaggggcccctctaagactgggatgtcaggatttttaaactctcaaactaatccatatttggcctccagaagttgtcagtttctacttgagtgtttctgttctaggaaagctgtgatattctgtatctgtctttctagttttttttggtggtggtttgccttgtgacctcagtttttggattgatctaagataaattactgattttcagttttctcagcgttttttcttgtcaggatagaagtgaggacctccaaaatccttacatattatagctgcctggtgagttttgtttgtttctttttttaaaaattttttttttttttttttttttttgggatggagttttgcgcttcttccccaggctggagtgcagtggcgcaatctcggctcactaaaacctctgcctcccaggttcaagcaattctcctgcctcagcctcccaagtagctgaaattacaggtgcccgccactatatctggctaattttttttatatttttgatagagatggggtttcgtcatgttggccaggctggtcttgaaatcctgacctcaggtgatctacccacctcggcctcccaaagtgctgggattacaagtatgagccaccttgcctggcccgttttttcttacttttagtaaaaataacctcacgtaaactgtcataggtgtctgtgggcttatttttgatgttctcctttgttggaaattcttgtgaaataccttccaggtcttagtctttgtgaggatcaggttctgctttcaattggatgttttaagaattagttttaaaataatttgtttttcttattattagcaccctatgtttagttgctgtacttatttggatagtgtggtaagcacagtggcttaggcatgagaaatataactagagatctcataattttatgtgtttataaagtgttttatttaaaaattaaataattgcaaatgagtggataaagaaactgatatatatatatctgattatatatatatatatctgattatgtatatatatctgattatatatatatgatggaatactacccggctataagaatgaatgaattaatggcatttgcagtaacctggatgggattggagactattattctaagtgaagtaactcaggaatggaaaaccaaacatcgttatgttctcgctcataagtaggagctaagctataaggatgcaaaggcataagaatgacacagtggcttttggggactcagagggaaagggtaggaaggagatgagggataaaagactacaaattgggttcatgtgtactgcttgggagatgggtgcaacaaaatctcagaaattaccactaaagaatttactcgtgtaaccaaataccacgtattccccagaagcctgtggaaataaaaaattaaaaaaattgcaaatgtaaataagacagtaacaaagatggcaaagaacaaagatgaaaaagtatgctgtattacctgaaagtgcttttatggatatcttagcttatccttcgtccatttaaatattgttagttttagccgggaacatgcctgtaatcccagcaccttgggaagctgaggcgggcagaccacttgagaccaggagtttgagaccagccaggccaacatggtgaaacccgtctctactgaaaatataaaaattagccgggcgttggggcgcatacctgtaatcccagctatttaggaggctgaggcaggacaatcacttgaacctgggaggcggaggttgcagtgagacgagattgtgccactgaactccagcatgggtgacagagtaagaccctgtctccaaaaaaaaaaaaaaaaaaaaaagacacaaaagagaaacaaaaaaaacatattgttagttttgatgattatctactagggtaagtacttttctactcattaaattccattagtgactgtgccttgatttccctgaaaggatgcagtatagagtaggcttttgattggagatagacttcctgattttccacttagtatttaggagtgaaaattattattattattatttattgttttttttttttttggagacagggtgtcactgtatcgcctaggctggagtgcagtggcttgatcctgactcactgtagccttgacttcctagggtcaagcaatcttcccacctcagcctcctgagtagctgggactacaggcacgtgccaccacagccggctaatttaaaaaaattctgtagagatgggatctcactatgttgttcaggcttgtctcaaactcttgggctcaaatcatcttcccacctcagcctccctaagtgctgggattataggtgtgagccactgcacccagccggaagtgcaaattatttaactcctttattttattcagcaaataaatgtctttctgagcctcagtttcctgtaataaggttcttataagttttaaatgaggtcagtgtgcattaaatgtacatgttagaatttggtaaggttagtaagaaaaccaaagacatgtggaccctttacaaaaaattccagcatttaccctaagagatgctttttaagtggttgaaatttggtggcatggaggaaatgtatatgggctcgtatcacatttgggagtaaaattaaggcatgaaatttaaacaaaaaataaaattgtgggtacatagtaggtgtatatatttatgggatttatgagattctgagacaggcatgaaatgtgtactaatcacatcatgtaaaatgggctgtccatcccctcaagcatgtatcctttgagttgaaaaacaatccaattttattctttcaggtattaaaaaatgtacaattaatttaatacagtaaataatacattaatttgatctcaaactcctgacctcaaatgattaattagattaattaatgtattatctattatttattatatacaccctgttgtgccatcaaatactaggccccccccccccttttttttttttggagacagagtcttgccctgtcgcctaagctggagtgcaatggtgcgatcttggctcactgtaacctccgcctcctgggttcaaatgattctgctgcctcagcctcccgagtagctgggattacaggcgcccaccaccaagcccagctaatttttgtatttttagtagagacggggtttcaccatgttggccaggctgctatcgaactcctgaccgcgtggttcgcccgccgcggcctcctaaagtgctgggagtacaggtgtgagccactgcgcctggccaaatactaggtcttattcatgctttccaactgtttttttttttgtacccattaaacgtcaccacatcttgccccccctcgcacttctcttttctttctactctgtgtctccatgagtttgttttgatttttagattccacaaataagtgagaatatgcaatgttggtctttctgtgcctggcttatttcacttagcataataacctctagttccatccatgttgttgcaaatgacgggatctcattcttttttatggctgaatagtagtccattttgtgtaactaccacattttctttatccattcatctcttttgatggatacttaggttgcatccaaacctggctattgggaacagtgctgtaataaacatgggaatgcaggtatccctttgatatgctgatttgctttatttctggtgtatacccaagcagctggattgctggatcatatggtagctcaatttttagttttataaggaacctccaaactgttcttcgtagtggttgtcctatttcacgttgttgccaactgtgtatgaggattttcttttctttacatcattgccaacatttgttattgcctgtcttttggatataagccatttcaactcaggcaagatggtatctcatggtagctttgatttgcatttctctgatgatcagtgatgtagaatgctttttcatatgcctatttgcaatttgtatgtcttcttttgagaaatgtgtatccacattttttgcccatttttgattggattattagatttttattctgtagagttgtttgagctacttacatattctggttattaatcgcttgttagatggatagtttgcaaatactttctcccattctttgggttgtttgttcactttgttgattgtttcttttgttatgcaaaagctttttaacttgatgtgatcccatttgtcaagttttgtttggttacctgtgcttgtggggtattgttcaagaaaattttgcccagactaatggcctagagagtttccccaatgttttcttgtagaggattcataaattgaagttttagataaaattctttaatccattttgattttatttatgtatagagcaagagataggagtctagtttctttttctttttttttttttgaggtggagtttcggctcttgttgcccatactggagtgcaatggcacggtctcagctcactgcaacctccgtctcccaggttcaagcgattctcctgcctcagcctcccgagtagctgggattacaagagcccaccaccatgcccgtctgatttttgtatttatttatttttatttatttatttatttatttatttagttttttgagacggagtcttgctctgtcacccaggctggagtgcagtggcacgatctcggctcactgcaagctccgcctcccgggttcacgccattctccagcctcagcctcccgagtagctgggattacaagagcccaccaccatgcccgtctgatttttgtatttatttttatttatttatttatttatttatttatttatttatttagttttttgagacggagtcttgctctgtcacccaggctggagtgcagtggcacgatctcggctcactgcaagctccgcctcccgggttcacgccattctccagcctcagcctcccgagtagctgggactacaggcgtccgtcactgtgccggctaattttttgtatttttattagagacggggtttcaccgtagccagaatggtctcgatctcctgacctcgtgatccgcctgccttggcctcccaaagtgctgggattacaggcgtgagtcattgcgccaggctaatttttgtatttttaatagagaccggatttcaccatgttggccaggctggccttgaactcctgacctcaggtggtctggccgtctcggcctcccaaactgctgagattacaggtatgagccactgcacccggcctggagtctagtttcattcttctgtatatggatatccagttttcccggcaccatttatttatttatttttatttattttatttttttttgagacagagtctcattccatcacccaggctggagtgcagtggtgtgatgtgggctcactgcaacctctgcctcccggattcaagcagttctcctgcctcagcctcccgagtagctgggattacaagctaatttttatattttgagtagagatggggtttcaccatgttggccaggctgatctcgaactcttgacctcaaatgatccacctgcctcggccccccaaattactgggattacaggcgtgagccaccgtgccgggccagcaccatttatttttattttattttacttatttttttgagagtgagtctccctatgttgcccaggctggagtgcagtggtgctatctcatctcactgcatgcagcctctgcctcctgcgttcaagcgattctcctgcctcagcctcccaagtagctgggattacaggcacccaccatgatgcccagctaatttttgtatttttagtagagacggggtttcaccatgttggccaggctggtctcaaactcctgacctcaggtgatccttccgccttggcctcccaaagtgctgggattacaggcatgagccaccatgcccagcctggagtctagtttcattcttccgtatatggatatccagttttcccggcaccgtttacttatttatatttatttattttattttttttgagacagagtctcatttcatcacccaggctggcgtgcagtggtgtgatctaggctcactgcaacctcttcctcctgggttcaagcaattctcctgcctcagcctcctgagtagctgggatgacaggtgtgtactaccaccatgcccaactaatttttgtatgtatgtatgtatgtatgtatgtatgtatgtatgtatgtatgtatgtatttgagacagaatcttgctcttttgtcgaggctggagtgcactggcacgatctcggctcactgcaacctccgcctcccaggttcaagcgattctcctgcctcagcctcctgaggagctgggattacaggtgcatgccaccacgcctggctaatttttttttcgtatttttagtagagatggagtttcaccatgttgcccaggctggtctcgaactcctgaccttgtgatctgctcacctcagcttcccaaagtgttgggattacaggtgtgagccagcgtgcctggccccagcaccttttattttatttattttatttatttttctgagagtgagtctcactgtgttgcccaggctggagtgcagtggtgctatctcccctcactgcaacctctgcctcctgggttcaagtgattcttctgcctcagccttccaagtagctgggattacaggtgcctgccaccatggctggctaattttttttttttttttttttttttttttagcatagatggggtttcaccctgttggccaggctggtctcaaactcctgacctcaagtgatccgtctgctttagccttccaaagttctgggattacagatgtgagccactgtgcctggccccagcatcatgtattgagcctttttcttttccccagcatatgttctcggcacctttctagaaatagaaaatgagttcaccgtagatgtgtggatttgtttctgagttctgtattctgtccattggtttatgtgtctgcttttatgccagaatcatgctgttttggttactataactctgtggtataatttgaagtctgataatgtgattcttccagttttgttctttctgcttagtatagttttgggaattctggaacttttgtagttccgtgtaagttttaggattgttttttctatttctgtgaagagtgtcattggtattttgatagggattgcattgaatctatagattgctttggatagtatggacagtttaacaatattgattcttccagtccatgaacatgaaatatctttacattttttggtgtcctcttcaatttcattcagtttgcttttcagattggtcactgtcgatgtttagaaatgctgctgatttttgtatattgattttttatactgacagtttactgaatttgtttatccgttctaatagtttttttgtagagtctgtaggtttttctaaatataagatcatatcatctgcaaataagggtaatttgacttcttcctttcccttatttctttctcttgtctggttgctgtagctaggacttccagtagtaccatgttgagtaactgctggaagtgggcattcttgtcgtgatctggatcttagaggaaaggcgttcagtttttcccctcagtttgataccagttgtgggtgtgttgtatatggcttttattatgttgaggtatgttcctcctaaacccatttttttgagggtttttatcatgaaggaatgttgaatattatcaaatagtttttaagcatcaattgatataatatggtttttgttcttcattctgttgatatgatgtatcacattgatttgcatatattgatcccctcttgcatccaagggataaactccacctggttacgatgaatgatctttttaatgtgtctgatttgctagtattttgttgaggatgtttgcagcaatatttatcagagatattggcctgtcattttctttttttgatgtgtttttgtcaggttttggtaacagggtaatactggcctcacagaatgtgtttggaagtattgcttccttttattttttggaatagtttgagtaggaatagtattgatgcaggaattttctcggcccctttgttggacttgtgacaggggcgaatgtttactcagcctgccgtgctcaaccccttgttggagggtgcatgtgagtgagtgagtgcgggacctggccagctggtgggggcactgacacagcagcaagccctgtgcagggaccacggccagaccaggcacaagcgagtgagtgtgggacccagctgttctgagcaccagcaggagcaggcctgtgcacagcacccaggttgatggggaggggggtggtgtctgtgaccccgaggcccctgagggggtgttaacagtgctcctttagttctgctgtctgctgatggctgtgtgttaacaagttggcctcttgccttgtcatgtggggtggctgccctccactggtgagggcaaagggctggtgtgacagtcttttttgggtacctgcactcagtgggtcctgagctcttgtctggcatccaagaagaatgaggttgagtggacacttgaaggatggtgaaggtgaagaattttattgagcagtgggaatggctcagtggagaggggagctggagaggggatgggaagggctgatctccctgaagtccggccgtttcttccctaagtcatgctgtctcctttcccaaagtttggccatcttctctccgaaattaagctgtttctctcctctctaccaactgaatctggggtctttataagcataggatcctctttataagcacaggatgggggcggggcaggctgtagaagttttggaaaaggcaacattctattggtaaagagacattattcaaacagaaccaatcgggagagagcggacaaacaggaatagaagttttcactttgggctgtgggtttcaggctttttggcttgaacgtggggtttcaccagggactgcccttgtcttcctagaatttctctgcctcctgcctctatcagtattagatcttctttaaatgtttggtagaattcagcagtgaagccatcaggtcccaggcttttatttactgggagaatttttattatggtgtcaatctcgttatttgttatagctgtgttcaggttgcagatttgttcatggttcaatcttggtagattgtgtctaggaatttgtccatttcttctaggttttccagttcattagcatatagtttttcatagtagccatgaatgaacctttttatttctgcagtattggttatcattgtaatgtctccattctcatctctggtttatatatttggatcttcttttttttttctttttttttttttactctggccaaaggtttttaaattttcttttaacttttacaaaaaccaacattttgttttattgatattttgtattattttctttatttcagtttcgtttgcttcactctgatctttattatttcttctaattttggggttggtttactcttgcttttcttattctttaagatgtgttgttaggttgtttatttgaagtatttcttcttttttcatgtaggcactcacagctataaacttcccttttagtaatgcttttgctgtatcccataggttttggtatgttgtgtttcagtatcatttgtttcaatgaattttccaattttcttcttaatttttgcattgacttactgatcattcaagaacatattgtttaatttacatgtatttgtatacttttcaaaatttctcattattgatttctagttttattccgttatcagaggagatgcttgatattatttcaatatttttaatgtcttaagacttgttttgttacttaacatatgttctatccttgagaataatccatgggctgaggagaagaatgtgtattctgcagcccttggatgaatttttctgtaaatatctattaggtccatttggcctctaatgcacattaagtctgatgcttcattgttggttttctttggaaggtctgtccaatgctgaaagtgggatattgaagtctccaagttttatcatattggggcctgtctctcccttttgctctaataatacttgctttatatatgtgagtgctccagtgttgggtgcatttatgtttaaaatggttacatcctcttgctgaattgactgctttatcattatatagtgaccctctttggcttttcctatagtttttgtcttgaaatctattttgtcttatattagtatagccacttctgcacttttttggtttccattggctttggaaaagatttctcgtaattctgtttgataaggacacatgttaggaggttttcaacacttcagtgagtagtaaacttgtaagtaaagcaggtatgaacagaatctcttgaattagtgaaaagtcaaaatcgttaattactgtttaatttaaaactgaaattataggtattaacaaataactatatgccttatactgtactttatttatttatttttccgagacggtcttgctctgttgcccaggctggagtgcggtgacgtgatcttggctcactgcagcctctgcctcccgggttcaagcaattttcatgcctcagcctaccgagtagctgggactacaggcatgcactggcacacccagctaagttttttgtatttttagtagagatgggatttcaccatgttgcccaggctggtctccaattcctgacctcaagtgatccacccaccttggcctcccaaagtgctgggattacaggcatgagccatcatgcccggccatataatgtactttaaacatgatgattttgaaactggaaacacacgcacatgtgagtaatttcttaaatggaattgaattaccttgaagaatcttagaaaaatgatgtttttaattttaaattagttttgcgtcatacatgtctttatttctcaaattttaaagaaaagtctatgaattaaagaaaataaaacttttcctgcatgaaagcaatgagtgtattatgtaccaaaaaggtagaagaaaaatatcttctgtaatattagctagatattacttactaaagatatttttggggtatatttattagcaatattttaatgcaattttaaacataattgtcatcatacttcatagacagtttatagcctgctatttttggttagcattgtagtatgagctattttccatattatttgaacttttaaaatttaatggttggtatgatattgtatgacttgtatgcatccttgtttacctagtctttattatacactttaattgattacagttttttttttttttttttgcttttgtgagcatctggcagataactttcttgagtaaagttattatgtagaaatattttctttgggccaggtgcggtggctcatgcctataatcccagcactttgggaggctgaggcaggtggaacatgaagtcaggagttcaagaccagcctggccaatatggtgaaaccccgtctatactaaaaatacaaaaatcagctgggcatggtggtgcatgcctgtagtcccaggtactcaggaggttgaggcaggagaattgcttgaacccgggaggtggagaggttgcagtgagccgagatcgaaccactgcactccagcctgggcgacagagcaagactccaactcaaaaaaaaaaaaagaaaagaaaagaaaagaaatactttcttactttctttgtatagataaagggagatagaattactagatcaaagtctcttgatggtttttgccaatttgttttgtaaatgtatgtatcaccacaggctatctatgagagtgtctatttcatggaaacttagcctacaatgaatagtcattttacccctaaatatttgataagttaaaaaatgctatcacatttaacatttcataggctttaagaagttgcagttttatattcatttcttcatgcattttgtgtactatttcaaaagtttctataggggaatgagagcaaagtaatgtgtttttcattatttattttgctaaccaaacatatttaattactaaccaaaaggatgatcctaattaagccaacacttggaattattttcatgtaaaatgtctgtgatagagataattgaatttaataatgaaaaaagtattacagaaatttgctcattaaactgagcttgttttcagctaatccttctgcgaagtgataatgactttttttttttttttttaaataaagatgggggctcgctatgttgaccaggctggtcttgaactcctggcctcaagtgatcctcccatctccgcctctcaaattgctaggaatacaggcatgagccaccacacttggtttaatagtggaatttttattacacttttttatggattcgaggagaggtggcattgtacataacacattctaccgctaattttccatctttcacttttctcattgtgctttccttcccattccgttcctggtgttgaaccaatgcatcatttgtaaatttgtagacagtctgagtttttctgccataatctgttgtttcttcagacttcttctctggtttataagaaaactgttgttttaaaactctcagttttgtattttttatttcttattatactttaagttctgggatatgtgagcagaacgtgcaagttttttacataagtatacatgtgccatggtggtttgctgcacccatcaacctatcatctccattgggtatttcttctaatgctatccctccccttgcccccaaccccccaacaggccccagtgtgatgttcccctccttgtgcccatatgttctcattgttcaactcccacttatgagtgagaacatgcagtgtttggttttctgttcctgtgttagtttgctgagagtgatggtttccagcttcatccatgtccctgcaaaatatatgaactgatcctttttttatggctgcatagtattccgtggtgtataggtgccacattttctttatccagtgtaccattgataggtatttgggttggttccaagtctttgctactgtgaatagtgctgcagtaaacatatgtgtgcatgtgtctttacagtagaatgatttataatcctttgggtatatacccagtaatgggattgctgggtcaaatggtatttctaattctagatcattgtggaatcgtcacactgtcttccacaatggttgaacgaatttatcctcccaccaacagtgtaaaagtgttcctatttctccacatcctctccagcatctgttgtttcctgacttcttaatgatcggcattctaattggcatgagatggtatctcattgtggttttgatttgcatttctctaatgaccagtgatgctgagctgtttttcatgtttgttggccatgtaaatgtcttctttggagaagtgtctattcatatcctatgcccactttttgatagggttatttgtttttttcttataaatttaagttctttgtagattctggatattagccctttgtcagatggataaaaaaacactatttttttaaaaaattttccaattcctcatcggtaaaaaagcagtaaaacattcatggtaatgatcatggcctatagttttttttttttttaagtgacattaggatttaaaactggtatgaaacctaatcatttattttagttagctaatatcaggatttagatttatttttttgacccaattgcagataggcagatcagatctcatagactgccatctgcctcaagctccttttgtagttatgtgaatgtgagcctgaaggctgaacccacttttctctaatggagatttttttttattacactttaagttctagggtacatgtgcacaacgtgcaggtttgttacatatgcatacatgtgccatgttggtgtgctgcacccattaactcgtcatttacattaggtatatctactaatgctatccctcccccctccccccaccccatgacaggccccggtgtgtgatgttccccttcctgtgtccaagtgttttcattgttgaattcccacctatgagtgagaacatgcggtgtttggttttttgtccttgcgatagtttgctgagaatgatggtttccagcttcatccatgtccctatataggacatgaactcatccttttttatggctgcatagtattccatggtgtgtatgtgccacattttcttaatccagtctgtcattgatggacatttgggttggttccaggtctttgctattgtgaatagtgctgcaataaacatacatgtgtgtgagtctttatagcagcatgattgataatcctttgggtatatacccagtaatggggtggctgggtcaaatggtatttctagttctagatccttgaggagtcaccacactgtcttccacaatggttgaactagtttacagtcccaccaacaatgtaaaagtgttcctatttctccacatcctctccagcatgtgttgtttcctgactttttaatgatcgccattctaactggcatgagatggtatctcattgtggttttgatttgcatttgtctgatgaccagtgatgatgagcatttttacatgtgtctttggctgcataaatgtcttcttttgagaagtgtctgttcatatcctttgcctactttttgatggggttgtttgatttttttcttgtaaatttgtttaagttctttgtagattctggatattagccctttgtcagatgagtagattgcaaaaattttctcccattctgtagtttgcctgttcactctgatggtagtttcttttgctgtgcagaagctcttgagtttaattagatcccatttgtcaattttggcttttgttgccattgcttttggtgttttagacatgaagtccttgcccatgcctatgtcctgaatggtattgcctaggttttcttctagggtttttatggttttaggtctgacgcttaagtctttaatccatcttgaattaatttttgtgtaaggtgtaaggaagggatccagtttcagctttctccatatggctagccagttttcccagcaccatttgttaaatagggaattctttccccattttttgtttttgtcaggtttgtcaaagatcaggtggttgtagatgtgtggtattatttctgagggctctgttttgttccattgttctatatctctgttttggtaccagtaccatgctgttttggttactgtagccttgtagtatagtttgaagtcaggtagcgtgatgcctccagctttgttctttttgcttaggattgttgtggcaatgcggtttaaccactctgaaaagatgtatttaaggacttttatctagactctatggtgaggtataacatagtgctggttgagtcagcttcaagtttttgtagagggaggaagagagtaacaaccatgtctggatttaataaaaagtttagcataagtaaatgtgtgctcttttgccttaagaaaatatttttcaatatataaaaaggattaatgagtgctgcctttcagatacttggtttggtgtgtttgaaacatcatttccaaagataggacatacacatttccagggatcatctctatgatatgactctagaaatgatgtagatttttaaaatcaatgtcagaacttatagacacaaatgtatgctttccttctaagtagtcactttgggagcccatatacataacagtggtgtcattcctgatgatatgttgggaactctcattttgtaaccagtttagaagtcatgcaagtaaataaatcttcaggattacttcagatttgggcaaaaaattagttttacccaacttgatcattttgcatttttcaccatatttgactctaagtgaaaactggctatttccaaaaatcatacccatcctgaggatgtgaagatatttttgggctgggcacggtagctcactcctgtaatcccagcagtttgggaggctgaggcagtagggttgtttgaggccagaatttgaagaccagcttggtcaacatagtgagactccctctctccaaaggaaaaaaaaaagtgaagttttttttttctttttcaaatgagtaggcagcattgtttagttatctgtttttttttcttttttttccactgttggacttctgtccattctctttatttgtttatttatttatttgagatggagttttgctctgttgtctaggccggagtgcagtggcgcgatcttggctcactgcagtctctccctcccggctcaagtgattctcctgcctcagcctcccaagtagctgggattacaggcatgcaccaccaggcccggctaattttgtgtttctaggggagacggggtttcaccatgttggccaggctggtctggaactcctgacctcaagtgatctgcctgtctagctcccaaagtgccggggttacaggtgtgagctaccgtgcctggcctgctgatcatactctcttgattttatttttgtactgtggtactgcggttgatggactgcactgatgttatccatatttttaaccttggtcacccacagtgtgaactcattaaatagctgactttgcaatttgattgctatgatttgggaatgagtgtggcagtcataattgtgcaggtttgctatcgtttcatttctagagaacttttctatggtgatctattgatgagataagatatagtatgacattatttattcctctttttgacttttggttctcaggaattttgggtgctgtgagttgacatgtagcatcatttcctcaggtctcattttctatctgagcacgattaaggacacagtgacctgatgataaatttttttgtacatctgactcttatctgaaagaatggttattggccaaatatggaaaccatacccacttggtacctttattctagaggcaaagtttgtttcaaaattttgtaaaacaaccctctccaccaaaagaaaacaaatacccacacaagatctctagttacggtgtctgttatatctcatttcttttccttccctaaatatactgagctattcttaactaaatacaggaaaattgtgcagaggaacacttactaagtgttcagtaaatgttttcatttttcttatgtgtatatctagaagtagaattgttgggtcattgagtaactgtttctgcgtaaatatctatacacgtgccatggtggtttgctgcacccatcaacccgtcatctacattacgtatttctcctaatgctatccctcccccaacccctaacaggccccagtgtgtgatgttcccctccctgtgtccatgtgttctcattgttcaactcccacttatgagtgagaacatgcagtatttggttttctgttcttgtgttagtttgctgagaatgatggtttccagctccatccatgtccctgcaaaggacataaacgcatccttttttatggctgcatagtattccatggggtatatgtgccacattttctttatccagtctatcactgatgggcatttgggttagttccaagtctttgctattgtgaatagtgctgcagtaaacatgtgtgcatgtgtctttatagtagaatgatttataatcctttgggtatatacccagtaatgggatggctgggtcaaatggtatttctagttctagatccttgaggaatcgccacactgtctgccacgatggttgaactaatttaccctcccatcaacagtgtaaaattgttcctatttctccacatcctctccagcatgtgttgttccctgactttttaatgttcgccattctaaccggcgtgaggtggtatctcattgtggtttttatttgcatttctctaatgaccagtgatgatgagttttttttcatatgtttgttggccacataaatgtcttcttttgagaaatgtctgttcatatcctttgcccactttttgttagggttgtttgcttttttcttgtaaatttgtttaagttctttgtagattctggatattagccctttgtcagatggatagatcacaaaaaagttctcccattctgtaggttgcctgttcactctgatgagatatatatatatattttttttttgctgtgcagaaggtctttagtttagttagatcccatttgtcaattttggcttttgttgtcattgcttttggtgttttagtcatgaagtctttgcccatgcctatgtcctgaatggtggtttgcctaggttttcttctagggtttttatggttttaggtcttatgtttaagtctttaatccatcttgagttaatttttatataatgtgtaaggaaggagtccagcttcagttttctgcatatggctagccagttttccaaacaccatttattaaatagggagtcctttctccattgcttgtttttgtcaggtttgtcaaagatcagatggttgtagatatgtggtgttatttctgaggcctcggttctgttccattgttctatatctctgttttggtaccagtaccatgctgttttggttactgtagccttgtagtatagtttgaagtcaggtagcatgatgcctccagctttgttctgtttgcttaggattgtcgtggccctgtggggtattttttggttccatatgaaatttaaagtagcttttttttccaattctgtgaagaaagtcagtggtagcttgatggggatagcattgaatgtatacattactttgggcagtatggccattttcatgatattgattcttcctatccatgagcatggaatgtttttccatttatttgagtcctctcttatttccttgagcagtggtttgtagttctccttgaagaggtccttcacatcccttgtaagttgtattcctaggtattttattgtctttgtagcagttgttaataggaattcactcatgatttggctctctatctgttattgttgtataagaatgcttgtgatttttgcacattgattttgtatcctgagacttcgctgaagttgcttgtcagcttaaggagattttgggctgagatggtggggttttctaaatatgcaatcatttcatctgcagacagagaatttgacttcctcttttccggattgaataccctttatttctttctgttgcctaaatgccctggccagaacttacaatactgtgttgaataggagtggtgagagtgggcatccttgtcttgtaccgggtttcaaagggaatgcttccagtttttgcccattcagtatgatgttggctgtggttttgtcataaatagctcttattattttgagatacgtttcatcggtacccagtttattgagagtttttagcgtgaaggagtgttgaattttattgaagtccttttctgcatctattgagataatcatgtggtttttgtcattggttctgtttatgtgatggattatgtttattgatttgcgtatgttgaaccagctgtgtatcacagggatgaagccgacttgatcgtggtggataagctttttgatgtgctgctggattcggcttgccagtattttattgaggatttttgcatcgatgttcatcagggatattggcctgaaattttctttatttgttgtgtctctgccaggttttggtatcaggatgatgctggcctcataaaatgagttagggaggattccctcgttttctattttttggaatagtttcagaaggaatggtaccagctcctctttgtacctctggtagaattcagctttgaatctgtctggtcctggacttattttgatcggtaggctattagttactgcctcaacttcagaactttttattggtttattcagggattcgacttcttccttgtttagtcttcggagggtgtatgtgtccaggcatttatccatttcctctagattttctagtttgtttgcatagaggtgcttatagtattctctgatggtagtttgtatttttgtgggatcagtggtgatatcccctttatcattttttattgcatctatttgattcttctctcttttgttctttattagtccggatagtggtctgttttgttgatcttctcaaaaaaacacctcctgaattcactgatagtttgaagggtttttcctgtctctatctctttgagttcttctctgatcttagttatttcttgtcttctcctagcttttgaagttgtttgctcttccttctctagttgttttaattatgatgttagggtgttgactttagatatttcctgctttctcttgtgggcatttagtgctataaatttccctgtacacactgctttaaatttgtcccagaaattctggtatgttgtctctttgttctcattggtttcaaagaacttctttatttctgccttaatttctttgtttacctagtagtcattcaggggcaggttgttcagtttccatgtagttgtgcggttttgaatgagtttcttaatcctgagttctaatttgattgcattatagtctgagagactgttatgatttccgttctttttcatttgcttaggagtgttttacttctaattatatggtcagttttagaataagcacgatgaggtgctgagaagaatgtatattctgttgctttggggtcaagagttctgtagatgtctgttaggtctgcttggtccagagctgagttcaagtgttgtatatccttgttaattttccgtcttgtcggtctgtctaatattgacagtgggttattaaaatctcccactattattgtgtgagagtctaagtctctttgtaggtctctaagaacttgctttatgttctgggtgctcccgtattgggtacatatatatttaggatagttagctcttctcgttgctttgatccctttaccattatgtaacacccttctttgtctgttttgatctttgttggtttaaagtctgttttatcagagactaggattgcagcccctggttttttttgctttccatttgcttggtaaatgtttctccatccctttattttgaacctatgtatgtctttaatttgtttttaaaattattatatccatcctacttagtataaattggtttcttgttgtggttttgatttgcatttccctgatatgactaatgatcttgagcattttttcatgtgcttattggccattggtatatattcttttgagaagtgtatatctaagtcttttccccatttaaaaaatagggttgtctttttgttgtttaattgtaagaagtctttatgtattctggttaccagaccctcatgagatacaggatttgaaaatcgttttctctcattgtgtttgctgtgttttcactttcttgatggtgccctttgacatgcaaaagttttgacttttattaaaaatggggctgggcatggtggctcacacttgtcatcccagtgctttgggaggctgaggtggaggatttcttgaggccaggagtttcagaccatcctgggcaacataactggaccccatctctacaaaaaattaaagaaaaaatttagctaagagtatagttgtgtgctgcacttcctcaactaagaacataggtgtgtgccacaggtactcaagatgctgaggcgggaggattgctttagcccaagagttttgagacctcagtgagtcaaggtcacgccactgtgctcaagcctgtgtgacagagcaagaggctaactctaaggaaaaaaaatggggtaaacttatactttccttatttaaagttttaactccttaaaaccctgttgaattacagatacatctattatataacttaagagttgatgctataggctgggcacagtggctcacgcctgtaatcccagcactttgggaggccgagatgggtggatcacgaggtcaggagatagagaccatcctggctaacacggtgaaacctcgtctctgctaaaaatacaaaaaaattagccgggcgtggtggcgggcgcctgtagtcccagctacttgggaggctgaggccggagaatggtgtgaacccgggaggcagagcttgcagtgagccaagatcacgccactgcactccagcctgggtgacagagcaagactccgtcttttaaaaaaaaaaaaaaaaaaaaagagttgatgctataaaacttagttaatgaaatatttccctgggcgatggagctcttgcaagtcctgttgtattttttgttcatctttatgccagtcagttagacagttcttctatgtcaagcagaggatggaataataaaccaaaacactgcttagggctttcagagagtaagtgttcagtaaatatattcgataaattactgaattatttttttaaatgatggaaaggaaaatcttgccctctctttttctgggtgttggctagtataaatctttcttgaagtgataatctacatctatgttttgatttctaaggatttcccaaatataagctatatataagtgagaggaaataataacttaggtgcctaatgataatatgacaagataagtacaagggtcagctatttgttgtgaaatagcaatggatataatttaaatatgaatacctttttgctgtttaatcccccaaattttcttttgatttcttttaaaattcttttgtggtaggtaggtttattgtttcttaagaattaacttaagggtagtattttctgatacatttttaagtaacatgaagtttaacttctgtttaaacacatcatatagagtacattgaaagacctcagtattttcgaaatgtttagtaagtaatatcagcagtttccttaaatgatattttaatcctaggtaagtgtacaggtaggttgtgttactcatatttttatattcttagtgaaatagaattcttttttttttttttttttgagacagggtctgactgttgccttggctagagtgcagtggcatgatcttggctcactgcaacctctgcctcacaaggctcaagccatcctcccacctcagcctcctgagtagctgagaccacaggcatgagccacccatgctctattatgagccaccacacctggcctaaaattcgttttctttaatattttttctttctacacccacaactgtaacatttcccttagtttttactttgaatgtgcatactcttacacgacttacagtatggctatattttcagtttgctagagctttacaattaatttaaaacatgaaaggctaattaagggaattctttaaattttgttttaatagtgaaagcaagttgaatacattggtgcagaagcttcatgacttccttgcacactcatcagaagaatctgaagaaacaagttctcctccacgacttgcaatgaatcaaaacacaggtaaattgaaaaagaatgtgctataccttctagtcttttttctattttttttttacacttatggaggtaaccatttattttattcagagagcagcttttaaaagagatttcagtttgtggaaaatgacagattagcaagctttatagaagcccctattatgtatcttagctatatctgatacaggagattttaattttggtaagtatgactatagaaagcttagaaaaggaagcatttatggttttatatgtaatggaaatgtgttatagaatggctagtgaatgttgactgtgaaaaaatagtattagaagaggcaggagtagtataggaatgttttgtcctagcaatcattcatgtattaggagttaaatttttatttttatttttgtgatggagtctcgctctgtcacccagtctggagttcaatggcatgatcttggctcactgcaacttccgcctcttgggctcaagctattctgctgcctcagcctcctgagtagctgggatcacaggcgtctgccaccatgtttggctaattttggtatttttagtagagactgggtttcaccctgttggccaagctggtctggaactcaagtgatctgccctcgttggcctcccgaagtgctaggataacaggcatgagccatcacacccaacataagagttaaatttttatgttgtttgataatatccctgagtagatttggtgtatttattttttaaaataaaaccacttaacacctcctctctacctccctgtctctctcttttaaaaagatatatatatatatatatatatatatttttttttttttttttttttttaaagagacgaggtcttgctttgtcacccagactggagtgtagtggtgtaatcatagctcactgcagcctcagacttcttgggcttaagcaatcttctcacctcaccctcccggtagctgggattacaggtgtgtgccaccatgcctggttaatttcaaaaaaaaaaaaaaaaaaaaaaaaaaaaaaaaaaatttttagagacatggtcttgctatgttgtccagactggtcttggacttcctggcctcaaatgattctcctgcctcagcctcctgagtagctgaaattataagcatgagccattgtacctggttcccttttttaaaaaacattttgtatcatgtgacagttagcattttcaggttttcaagggtaactacaatacacatgcacacagacacacacaatatgtacaaaaaaagtataagagagttatagtgaaaagttcaaccatatgtgtaattagagttctagaaggaataaagagacttggttaaaagtcctatttggagagatacgggctgagcattttttaaaaagtgatgaaaaacatcagactagagattcaagaagttttgtgaaccctgaacaggataaatataaagaaaactacagctaggcatgtcataaccaaactcctaaagaacataaaccgagagaaaaatatcttaagtagccagaggaaaaaaatacattattttcaaaggaataacagtaacactggcagctcacttaacaacagaaatgatagaaggcagatgacaatgaaattatttctttaaaatgtcaaagaaaagtgcagtcatgcatcacttaactatgggataggtttttttgagaaagcattgttgggtgattttgtcattgtgcaaacattatggagtgtccttacataggctactacacacctaggctatatgttatagcctgttgctcataggctacaaacctgtgcagcgtgttcttgtactgaatacggtaggtaatcggaacacaatggtaaatatttgtgtgtctaaacacatggaaacatagaaaaggtacagtaaaaatacagtattataatcttatgggaccaccgatgtatatgtggtcagtcattgagtgaaatgtctttatgcagcatgtgattgtaattgccagcatagaactgtatattcagtgaaaacatccttcataaatgaagggtggaataaggccatatctgggcaaacaaaaagtgagaacttgatgtcaacagacctacactggagtgaataactacactagaggaaattacaagttttctgaaatgagaaagaaaataatttgaaatggcaacaccaaaatacaggaagtaatgaataagaatgggaaagctaaataggtaggtaaactaaataacataaagttatttaagccacagtccctattcttatttcatcaattaccccagtagtgttcacagataagtttttcccccttaaattcaggatccagttcaagatttagtagtcctgtttctttggttttttaaaaatctgaagcagtttgtctgccttttgggactatgactttttttgaaatgtacaggtgtgttactttgtgaaatggccctcaggattatctgtttagttatggttagattcaggttatacatttttggcaggaatactacataaagtggtgttctgttctccatgcatcctgttacatggcacatgatgtgatttgcccctttactggtgatgttaacttaggttgtttggttatggttgtgtttgctaggtaaacccagtctaaagttatgatttattccattgtaactaataactaatttaatggggggcactttgagattactaaggtattctttttattatcaaaacttaatatgttttcttttgcaaatgaccacaaagtttgcagcttaaaacaacccaaatttgttattttacagttctgtaggttcggagtccggtgggccttgctggacccttctcgggctatcacaaggtcaaagtcaagatgttagtaggactaggttcctttctggagactgtagaaaaatccattcctaagctcattcaggttgttggcagaattcagttctttatgataatcggttagaggtccttctttctcactcactattggccaagaccccctcctagttcttttcaggtgtcttcatttcttctcacgtgatgccctccatcttcaaatccagcaacagcacatcaagtctctctcaagctttgaagctctctgacctagctttttgcttgctaattctgctgccacctgctaccagctggagacatttttctgtttttaaggattcatgtgattagattaggtccctctccctctcatctcctcctgattatctcttgagtttaagatcaactgtgccatattacataacacagttatgggagtgatatgtcatcacattgataatttctggggatttgcggtgtagaatcttgtgggccattcctagaaggtctgtttatcacagcatacatttgtgattcttagctgaataatttattcctatgatgggttcaaaatggtgatgttctaacttgtctttccttctatgtttattagttgatattttattgtaagggaggggttcatgttctaacctattcaattatttgtatcagtatatacttacaattttttccatgaatattctctgtcattatttattttgatcctgaaattgtatcagttttggctagtaggagcctcacctggatggctcctgctgacctttttacaaatccgcatcatttcttgaacactttctttctgtcccttcaaagtattcaaggcttgctttccattctctgttccccagccctacaatcagttattttttgcaagagttctgattccttttagtgggatatagtgtttagaaatcaagatcagggtgtgtgatgtgctcattgccaccaagatgtctttgtttccaagctctttcacagagaaagccaataatatgttttatattttcatgagttgatactgatacttttaattcaattccagtcttctttctagacttccccttttcatgtttttaacttctttctccaacagaaagaaacctggttcctattatccccaatttatttatttttatttatttattctttttgagatggagtctcactctgttgccaggctggagttcagtggcgtgatctcagatcactgcaacctttgcctcccaggttcaagcgattctcctgcctcagcctaccaagtagctgagactacagtcatgcgccaccatacccagctaatttttgtatttttagtagagacagggtttcaccatgttggccaggatggtcttgatctcttgacttcatgatccgcctgcctcgacctcccaaagtgctgggattacaagtgtgagccactgtgcccagcctatccccagtttatttatttatttttatttttatttttttgagatggagtctcgctgtgtcacacaggctggagtgcagtggcgccatctcagctcactgcaacctccgcctcctgggttcaagcgattctcctgtctcagcctcttaagtagctggaactacaggtgcacaccaccgtgcccagctaatttttgtatttttagtggagacggcgttttgccatctctggatggcaggctggtctggaactcctgaccttaggtgatccacctgcctcagcctcccaaagtgctctgattacaggcgtgagccaccaagcccggcctttccccagtttatttgtattcatttttctagtcctcattgtacccacagtttcagagttgttaaccatatcatcgcattaaagaaacgtaactatagttcagtatttctttaaagttctttttgtctttagaatgatgttacgttgtcggagtcctgtgttcactagttgaggaactccttcagtagtggtatctccagttggacaaacagatgtcactcacaaataccaattgtaaattctgggcagcatactgaaggctagatatcaacaaagtagataaactggaggggagtcaacacatggaagaagaagtggcaatggctgaattccccattgttaatcctttttgcttcagccaaggatcctcttagctccatctgtggcctttaagacttggataaaaatctacagtcttattggatgtgaaatcaaggaaaaaatttagggagaccacagcagctgtaacatgagtagagagatcccatctagaaaagagccacagaatgggaaaaccagattgcacgaaaactctcccaatagctctggtcctgttgcctaagtgcactccagattccaaccagcctggttaggactaaaagaacagaacaaaagctttgagttgtttggtactacagggtggaaagggtttggagtttcatttcaagtaagttaactatctgtttgtttggttggttggttttttttgagacaggttctttttctgttgcctaggctggtgtgcagtgatgccatctcagctcacagcaacttccacctcccgggttcaagtgattcttgtgcctcagctttctgaatagctgggattacaggcacctgccaccacgcccagctaatttttgtatttttagtagaggcagtgtttcaccatgttggccaggctggtcttgaactcatgacttcaggttatctgcctgcctcggcttcccaaagtgctgggattacaggcgtgagccaccacacccagcccagttgactttttatgttggccttgtatcctgtgaacttgcttaacgtacttattagttctaaatagtatttttccccctcttgtagattctttgggattttctacttagacagttatatcacctgcaaatagggatagttttattttttcctttccatctgtataccttttaatttcttttcttgcttcattatattagctaggattttctgtattttccagtattacattgaagaatgatgatgatagcagacatcctcttagtgttaccaattttagtgggaaaacattcagtctttcacagtgaaggatgtttgctttataggtttcttgtaaatgccctttatcaagttgaggaagttcccctctattcctagtttgctgagaatttttttaagcttaaatttctatttgatttctatttgtaattataaattcacatgcagttgtaataactaatatagagagagctcttatgcactttggcagtttccctcaatggtaacatataaaactagaatacaatatcacaaccaggaaattgacattgataaaatctattaatcaagattttgtcagttttactttgtgtgtgtgtgtgtgtgtgtgtgtgtgtgttaaagttctatacattttttttttacctgggttgattcatgcatctaccaccacagttgagatacagaatagttcatcaacacaggattcctcatcttggcattttataatcacacccacttccctccgcctacctctgcctatgcttaacacctggcaaccactaatctgtcttccattttgaaaattttgtcatttcaaatatgttaaataaatggagtttatagtaaataatcttttggggttggagtgttttcacttggcataattctgtggagattcattgaggttgttgtatgtatcaacaatcctttccttttaattgcagggtaatattccatggtatggatgtacagattgagtatccttaaccccagaatcagaaatctgaaatgttccaagatcggaaacttttgagtgctgacatgacactcaaaggaaatgctcattggaacatttgggattttcagattagggatgctgaatccctaatgtgaataaaccagaatagtgcaaatatgctagaatctgaaaaaatccaaaatttgaaacacttctggtcccatgcattttggataaggaatacgcaacctgtaccacagttgtatttgtattgttttttttttttttttattgaaatggagtcttgttttgtcacccaggctagagggcagtggcatgatcttgactcactgcaacctccgcctcccaggttcaagtgattctcctgcttcagcctccggagtagctgggattacaggcaagcgccaccacacccggctaatttttgtatttatagtagagacgaggtttcaccatgttggccaggctggtctcgaactcctgacctcaggtgatccacccacctcggcctcccaaagtgctgggattacaggtgtgagccaccgcgcctggcctgtaccacagtttgtttaaccatttatttgttaaagcaaatctgggccgattcctgatttcagttgttacaattaaagctggtggtgaatatttatatatacgtttttatatgaatttatgttttcatttctttgcaataaatgccaggagtgcattttgcagttcatatgatggttacacatttatttttattaaattaattaaactacatttacattttattttattttgggtagagacagagcctcactgtgttggccaggcttgttatgaactcctgacctcaggtaatcctcctgccttgtcctctggaggcccttggattacagacatgaatcactgcacctggtttgcattttttttttttttttactccattggactctatcagtgcttttatttatttattggtatttatttatttatttattttaacttttaggttcagtggtacctgtgaaggtttgtcacataggtaaggtagcatcactggggtttattgtttagattatttcatcacttaggtattaagcccagtacctaatagttatcttgtctactcttacatgttcatttttttaaaagaaactcctgaactgttatccagagtggttgtactgttttatattcccacagcaatgtatgagtgatccagtttctccacatccttgccaacactgggtgttaatactatttttaaattttagccatttgatatttatggtatctcattgtggttttaatttgcatttacttaatgagtaataaattctttttaaatagaaacaggatattgctctgttgcccaggctggagtgcagtggtgcaattatagctcactgcagcctcaaactcctaggctcaagtgatcctcctgcctcagcctctcgagtagctgagactgcctcagcctgtcgagtagccaagactacaggcacatgccaccatacccagctaattttttaatgttctgtagagacggggtctggctctgttgcccatgctggtctcagactcctggcctcaagcgatcttcccaccatggcctcccaaagtatttagattacaggcatcagccactgcatctggctggtaataaaacattaaacatctttattgaaatataatttacatgccatacaattaacccatttaaagtataaaattcagtggtttttagtatattgaatatttacacatatgtacaaccatcaccaccatcaattttaaaatatttttatcacctcaaaaagaaactccataccctttagctatcaccccctagctctaagaaatcactaatctagtttcttgttttgagttttttatttttatttttatttttattttttttttgagacagagtctcgttctgttgcccaggctggagtgcagtggctattttggcttactgcaacctctgcctcccaggttcaaatgatttttgtgccttggcctcccaagtagctgggattataggcgtgcgccaccacacctggctaatttttgtattttttagtagagacagggttttgccatgttggccgggctggtctcaaactcctggcctcaagtcatctgcccacctcaggttcccaaagtcctgggattgcaggcgtgagccactgcgcctggcctatttccctattttggactttcatatgaatggcatcatataatacgtgtttttgtggctgatttctttcatttagcgtaatgtattcaagatatctgttgtaacatgtcttagtactccattcctttttatggccacataatattccattatatgtgtataccatatttgtttatccatttatccattgatggacatttgtcttgttcccatgttttggctgttaggaataatgcggctgtaaatattggtgtacagttttttgtgtgtagccatatatttttgtttatcttgtgtatatacctaggaatctaattgctggatttatatggtaactatgttaaattgtttgaggaaatgtcaaactgttttccaaagtagagatactattttacttttccaccaggagtatataaagattgtgagttcttcacgtccatgccaaccattgttaataacagactttttgattctagccattctagtgcatgtgaagtagtatctcattgtgattttagttttcaactgcctgaagggtaatgatgttgaacatcatttcatgtgcttatttgtagtttgtatatattccttggagaaacttctattcaaaccctctgtccagtctttttctttttgacagggtcctgctctgtttcccaggctggagtgcagtggcatgatctcagctcacagcaccctcaacctccctggctcaaatgatcttcccacctcagcctcccgagtagctaagactatgggtgtgtgccacagtgcccagctaatttttgtttattttttatagagatggggtcttaatttgttgaccaagctggtcttgaactcttgtgcttaagcaattcacccgcctcggcctcccaaagtgctgggattacaggcgtgagccaccgtgcccagcccctttgcccatttttaaaatgggtatttatgctttcattgttgatttgtaagaattctttatatattctaaattttttattgtaaaatatgcataacataaaaattgccattttaactaattttaaatgtacagtcctgtaacgttaagtaaaattgttgtgcattcaccaccaccatccatgtctagtactttttcatcttccccaagtgaaactctgtacccatcacatactaactccccaatcttccctctccttagccttgcaaacaccattctacattctcttcctaggaatttgactactctaggaacttcatatacgtataatcctacaatatttgtccttctgacatattttacttagcacaatgtgttgaaggttatccatgttgtagtatatctcaaaatttcatttcttttgaagtctgaataccattccattgtatgtatataccacattttgtttatctattcatatttcaatggacacttggataagatatataatttggaaatattttcccctattctttgagttgtctttatttatttttagagacagggttttgctctgttgctcaggctggggtgcagtggcaagatcatagttcactgcagccttgaactcctgggtacaagcaatccttccatctcagcctcccaagtagatgagactatagttgtgtgccaccatgtctggctagtatttttttttttttattttttagagatgaggtcttaccatgtagcccaggctgagcttgaactcctggcctcaggcgatccaccttggcctcacaagtagctgggattacaggcgtgagacactgcacccagttgggttgtctttaattgaagcacaagttactaattttgatgaacttttatttatctgtttttccttttgttgctcattcttttggtgtctttaagaatccattaccaaattgaaggtaatgaagatttacccccatgttttcttctaaaagttttatagatttagttcttaaatttaggtctttgatctactttgagttaatgttttgtatatgttgcgaagtaggggtccagcttcattttttgtaggtttctaaccagttgtctcagcaccatttattgaaagacaattctttcttcattgaatggtcttgccacccttgtcagaaatcagtgggactgttgggcatggtggctcatgtctgtaatcccagcactttgggaggccgaggtgggaggggtactcgggcccaggagttccagaccagcctggacaacacagtgagactccatctctattaaaaaaaaaaaaagccaggcgtagtggtgtgtgcctgtagtcccagctacttaggaggctgaggcagaaggatcacttgagcccaggagactgaggctgcagtgagccatgattgtaccactgcaccctagcctgggtgacagagtgagatcctgtctccaaaaaaaaaattaaaaaaaaaatcagctggtcatagatatatgggtttatttctggactcttaattctgtttgtccttttaccagtactccacggtcttgattgcattgttttacagttttgtgcaaagttgcaccaaagttgttgtgtagttttgcaaaactggcaatcaagtctgtgcagtactggcaaaattaggaagtgtgagtcttcatacttttcatttttcaaaattatctgcctattctgaatgttttcaattccctatgaattttaactctttgttttttcttggtagagatgaggtttcactatgtttctgaggctgttcttaaacttctgtcctcaagtgatccttccaccttggcctcccaaagtgctgggattataggtctgagccaccatgcctggtccatatgaattttggaatgagcttgtcaatttttacaaagaagtcagctgggattctgacagagattgcagcgtgtctgtagattagtttgtggagtattggtgatggcagcggtgggccgtctggagtggctgctgccatcacactggctgcagcagggagacgtggccagggctgcacggtctatagagttggtgggagccaggggcaagcaggagccctgccccttccaagttggagctccctgggtcctgctgcagctgcctaagcatggctgtagacctgggcatccctgtgctcttgagtcttgggagcaggctggagccccaccctcccaggtgcaactgcagctggccaaaccgtggctgcagtcccaggcctctcattccatggagcaggcaggagacccaccctcccgggtgcagctgcagtctcccaaactgcggctacagaaccttgccttctgctccacgagcaggcaggagccctgggtgcagcaggagccccgggtgcagccgcagccacccaaaccatggctgcagatctggtcctcctgctttatggagcaggctggagtcccaccctcctgggcacagctatagctgcccaaattgtgggtatagacctgggcctcctgctttatggggcaggcaggagccctgccccactgggtgcagctgcagccacccaaatcatgggggggctgcagacccaggtgtctctgcactcttggggcctgggaaggccccccttgctctcataggcttgggagtgcctgctcctgctgcctggcttcaccctgctattggcacctgctctgatcttgtggcaaagttggggccgagcctgggtgctgtcgtagcctggccaggtatccacatgcttggggaactgctgacatgccagccttctgctgccttgaccccctctggactttgggtactgacaaacatagggaagctgaggcagggctgagggcagttcagcactggcctgcaggtgcccccttgcatctacagcctgggcaccatgaatggcagcaggaggtagacaggttcctcagtggaaggtggcaggtccctggtgaggacccaccttcaggccagggaaagcctgaaggctggaggttgggctgccagttgcatggatcagagtgggaacttgtggtgccttttctgggcctgcctgtggaccaattggcatgcacatcctcccctctgaggcccataaaaaccccaggctcagccagagctgaacagatgtcaggatgaccagctgcagagaggagcaacccactctagggcctcctctctgctgtgagctgcagaggtgacaagatgaccttcctgcaaagaggtgccacacattctagggcctcctctttgctgagagctgcagagacgatgggtcgactttcctgcagagaggtactactcatactagggcctcctctctactgagagctgcagagacgaaggagagatgatggggagatgatgggatgacctgcctgcaaagagaagccacccactctcaggcctcctctctcctgagagctgtgcagatgacgggataatcagctgctgagaggagctaccctctctgctgatagctgaacacttgtagtaacgacttgcctagcagagaagaaccaccctctctgctaggagctgaacacttgtagtaatgacttgcctagcagagaagaaccaccctctctgctaggagctgaacacttgttgggataccttgactgtggaaaggagctgccccctttgggtttcctctgagctgttctattgctcaataaagcccctctttatcttgcttactctccacttttctatgcacctcattcttcttgggtgcaggacaagaacttgggacctgccagatgaggctaaaatagctgtaacacaaacagggctgagacatgccccttgctcaccttgttgcaggtgaagagaaggaaagaagagctgcagccctctggggagcccagacctgggagctccccaagccagggctgtgactccctctttggggccctgcctgcggttcctggtgtctccaaacttctgggtgccaccgtgttccctggtgccagctgtggatgctgcttgtggtgttcatggtccagctgcagcctcacagagaaagagctgatgcccatgctggcacctggagctgcgtgccctgctgcagctgccaggatgtctgattgcgcagtgaccggaccccacacttgctcacataccccttgctgcttcatccagtcttccttggctatcataggacacaggccagtagcatgagccgagtgtagccggccaggccaaataggcgggacaagcccagcaggcctgagcaaaactctggcacaggtgccaccagccgcagatgtttctggccagaaaagtgacaccccaaagattctgtaacactggcatcataagaatgataaatcttatggcttggcctggtggctgaaggaattgtgtactttaaatgggtaaattatatggtgtgtaaattgtatctcaaggatgtttaatgttttatcactggcgaggtgcggtgacttatgcctgtaattccagcactttgggaggctgaggtgggaggattacttgaggacaggaatttgagaccagcctgggaaacatagccagaacccatctctacaaaacatttaaaaatcagccaggcatggtggcatgtgcctgtagtgccagctaatcaggatactgaggcaggaggatcacttgagcccaggaatttgaggcggcagtgagctataattgcaccactgcactccagcctgggcaatagggtgagactctgtccctagtaaaaaaaaaatgttatcttctaattcatgaacatgaagtgtttttccattgatttaggtctttaatttctttcaatagcgttttataattttcagagtatgttttgtacttctttttttttcaaattatttccttctaattctgttataaatggaattcttttcttaatttcattttgagattattcattgcaagtgtatagacataacattgatttttgtttattgtccttgtacccatcaatcttcctgaactaattttattcccatagttcttttattattattattattattttttgagatagtcttgctctgttccccaggctggggtgcagtggtgcgatcttggctcactgcaacctctgcctcccaggttcaagcaattctcttgcctcggcttaccgagtagctgggattacaggcacctgccaccacgcccagctaatttttgtatttttagtagagacagggttttgccatgttggccaggctggtcttgaactcctgacctctggtgatccgcctgcctcggcctcccaaagttttgggattacaggcgtgagccactgcgcccagcctattccaataattctttagtggattccttaggatcttctatgtatgagataatgtcacattctaataaggatagttttattttttatttttttttgagacagagtctcgctttgttgaccagggtggagtgcagtggcatgacctcagctcactgcaacctctaccccctgggttcaagtgactttcctacctcagcatccctaggagctgggattacagggatgcgccaccacacccggcaaatttctgtacttttagtagagatggggttttgccatgttggctaggctggtcttgaactccggacctcgggtgatccacccgcctcagcctcccaaagtgctgggattacaggcatcagccaccgcgcctggccctctaataggaatagtttcataccttcattttaaatactgatgactttcaatttttttttttaacatgcatgctctgagtagaatccgtagtgcaaagttgaatagaaatggtgagagcagatttccttgccttgttcctgatcttaagggtttcggaaagcattcagtctgtcgccattaagtatgatattacctacctgtgggtttttgtagattttaaaatttcctttcttccttaatttattagaaaaaagatttttttttttttttgagacggagttttgctcttgttgcccaggctggagtgcaatggcacaatctcggctcactgcagcctccacctcctggattcaagtgattttcctgtctcagcctcccgagtagctaggattgcaggtgcatgccaccacgcccagctaatttttgtatttttagtagcaacagggtttcatcatattggtcaagctggtctcgaactcctgacctcaggtgatctgcccacctcagcctcccaaagtgctaggattacaggtgtgagccaccacacctggccagaaaaaaaagatatttttaaagagctgttttaggttcatagcaaaattgagcaaaaagtacagtgagttcccatatgtccctgcttccacacatgcacagcatctcccactatcagcattccgtaagagagttgtacatttgttatataacgttgatgaacctacattgacatgtcattattaccccaaatgcatagtttatgttaaggttcactcttggtgttatacattttaaagatttttgacaaatatataatgacctgcattcaccattgtggtatcatacagaatagtttcactgccctaaaaagattcctgtgctgtgcctgtttcttcatccctttctcccctgtgagcactggcagccactgatctttttactttctccatagttttgcctttttcagattgtcatagttgtaatcatatgtatgtaacctttccagactggcttctttcacatagtaatctgcatttgtttcctccatgtctctttgtagcttgatagctaatttatttctagtgctgaataatattccattgtctggatgtactacagtttgtttatccattcatcttctaaaggacatcttggttgcttctaagttttggcagttatgaataaagctgcttataaagatatttatataagtaaatgaagatgtttacataaaataaagacatttataaatatctccatgcaggttattttgtggatgtatgttttcagcttctttggataaataccaaggagtgtgattgctgctttatatatggtatgcttagttttgtaagaaattgctgaactgttttcctgagtggctgtatcattttgcattcccaccagcaataaatgatagtttcttttgctccatatgcttctcagcagttttgatgtagtcagtgttctggattttggctattctaataggcatgcaggggtatattgttttaatttgcaattccctaatgacatgttgagcattttttcatgtgcttatttgcgtctgtatatcttttttggtgaggtgtctgttcacatatttctttttttttccttgctttaaaatcatgttgtttgttttattgttgagttttaagcattctttgtatagtttggataattgtcttttatcagatgtgtactttgtgaagattttctcccagtctctagcctgtcttctgatttgaagttttctaatatttttgtggacttttgcatctatattcataagtgatacttgcctgtagttttctctatttgtgatatattttttatatcagggcaatactgttttcataaaatgagttgggaaatgttgcctccttttctgttttttagaagagtttgtgaaggattggtattagtccttttttaaatgtttgttataattaagtggtgagaacatttgggccttttctttatgggtagctttttttattgctaatttaatctcatcaattgttacaggtctgttcacacctgtttcttcttgagtcagttttagtagtttgtgttttggaatttgttcatttcatgtaagttatttagttttttggcacacagttgttcatagtattcctttataatccgtttatttcagtaagattagtagtaatgtcctctttttcatttctgattctagtaacttgagtcttgtttcttttttttcttggtcagtctaccctaaagtttgttcatcttttcttcccccacaggtaagttgttacacaatccctagcagattccaactttcatggccaaggtcctctttgatcatctttttaaaaaattagtttttggccaggtgcctgtggctcacgcctgcaatctcagcactttgggaggccaaggtgggcagaccacttgaacccaggagttagagaccaggctgggcaacatgacaaaaccccatctccacaaaaaattagccaggtgtggtggtgcgcgcctgtagtcccagctacctgggaggcttagaggggaggatcacctgaacccgggaggttgaggctaaagtgaaccatgatagcacctctgcactccagtatggacaatggagtgagaccctatctctaaaaaaaaaggaggaaaaggaaaagaactactctttggttttattgattttttttttctattgcttttctatttcctatttcattagtttcatgaatttctgccataatctttattatttccttctccttgattttggtttagtttgctcttattttcccagtattttatggtaaaatgaaatatactttattggtagtatgttttttatttttagtgtaatagtttaaattttcttctgctgggaaatgtcttgcaatatttataaactacaacaggaaatgtttttataccaaagtaatctttacagagatttcatgctttataaggaggggttagtatgcaaaaggagagtgattctagtgaaagaacacttctaggaatattttaatgtgagtagtatgttaacaatactgccagacttcatagtgtgagaatgggtttgtggagttataggtattgatgttctgtttgataatgcatcgaagagataaataatgttctttatttcttcttttttagataaaatcagtggttctggaagtaactctgatatgatggaaaacagcaaggaagaggtaaggataattatttagagatatttgttagttacgattaaccaagtagagcatatgtctttagattgcttctggacacatgtatgtgtcgaaggctactgatacccagttgtcattatacttcagtttcgttgttttccagtttgagaacaggtgttcattgtttctgttattgttgtggttcacttcagtggtttacctaaagtcagacaactgaagacttccaacagatagatattaaactgtctttatattgccccaaaggtgtttgaggtggatgttaagggcatgaactccatggttgtgaaatctctcaaaacttggtatctagagtctgctaagcattattatagcaactcataacaaggtcctttgcctgatacacaggtccacaactgtggttttgggaattttttgacctactgtaaaaaaaaactgaatccagtaaaatatattgattatactggcaaaatgagggtaagtttagtatctcaaagcaagttgtagaagttacttcatgccatatgttagcttagagaagaatgaaacatatttagatccttgaaactccctacttctcttgagatctgattacttctgcatctttgttttgtctttgttgactggggccatgatcattttgcagcagtgtattccccgcagcatgccacagcaaccatgtaaaaaacgagaaatttaatcttcagccaaggaaacctggcagtaaatgagaattagttttaatttttatttttttgcatctgtgttccttatgtggtagagaattagtttttgaagttccttttagaaaaatattctaggcacataaatagcatctcattatatcactgtattgaagttgctatagggaaatagctaattgtagggatgccgtttcgagaattttattcacttttatatttatgtctcacatctagggaactagctcttcagaaaaatccaagtcttcaggatcgtcacgatcaaagaggttggttgatgttgaagggacaaaaagttattttctttttcaggttattttctgtttctaaaaccatgtttttttctgaactcatgtcaaccactattctgagttaactattctatacaaatatacatatttgaaaatgattagcataatataatgaatccctttgtatctatcacctgatttcaacaattattattcattctaactttgaattctaaagggtttttaaggatttattatatattagtggcccttgcaatatgtagtttatttcattagacaatatatgtccttgaaaaaggacaaaataattgttgaatgcctatgaggcagtgggttttttgggttatatgaaattgtctaggatgggaagttagtcatcatagttgtaagttataaggagaaaaaagagtggtaaaaaacacttttttctgctaaattgtcaactcaagtcatacataaaaactgaaacttttctaacataatgtagtacccaatatactatgcagtataattgttattagaagtttgccgcttagtctattggactttcattgtttctaaccagtgggaatgtctcttaaaaaccaagcttgtttgatattaatttattctctgaagtagtgattcttaaagaagagtgtcctccagggtctccctggtagctttttcagaatgcgtatgccttggtcctgctccagacctactgaatcataatcttcagtgatatggtatagacatacatgcttccctaggtgattctgatgtgcttccttgttgagacccactgctcaatctcaacatgttatttatgttctttgggtattgttccagttgtcagaaacattcataattctatgaacttaattctttcataggaaaccttcaattgtaa

SEQ ID NO: 15468 - DNA, 102719 bp, Homo sapiens
tgcctgagcctcggcccaacaaaatggcggcggcagcggtgtcgctttgtttccgcggctcctgcggcggtggcagtggtagcggcctttgagctgtggggaggttccagcagcagctacagtgacgactaagactccagtgcatttctatcgtaaccgggcgcgggggagcgcagatcggcgcccagcaatcacagaagccgacaaggcgttcaagcgaaaacatgaccgctgagcccatgaggtaaaacgcaaccccgtctcatgggccccagcggtctgggcccaggcaccgtctgagtcgggtgtttgggaaggcgttcgcttggtgggttaggcctgtgtgttgcttagccgaaagaggcatcgttttctctttaggtgagaagggtttcggggtatcggcgcaaggctccgacgggggtgggggtggggatggggtggggggaggtggggggggcgcggcctagggtatggggcgcttcttgcaatctcccctaaacggtgacgcttggtcgggctcctctgtttattctttggtgcctgtgggattgagacctcgaagtcggaggcggtctttggtatcccggtcatttttgctaatctttgggcctagaaactgcgtggggaagaagcggggggagggtgagaagagggggaggggtgggcgggcgcgaggatgtgagatcccaggacgacttagaggcgtttaggttgctggagatgggaagcacccgggccctgcgggattttttttctgcagccccaggagacaagcctttttttgattgggttgtggtgcagttccaggtatttaggtatcttttctactccatatcctgaaggatatccttgggtttatttctaggcgaggggggacttaacacagggttttgcttccagaggaccctagtatactactttttgtgatgtccagccttaatgggacctcaagtgtttccccactttctgggcaaatttcgaggagtaattaggccctatctttatttacttatttattccatgaaggatgaagggcaggttaacgtgggctgatgcgaagtaagatttattgcaagggaaaatgcctggcaggcctcctcttaaccaatcaagcacgtttattaggttgaagctgtttttctgtgtgcttctgatttgcctcttgacgggtctgaaaatttgggtagtcaatatgaaatgtatacacttttacccaggtggctggctggcgtttcagtttgacatttgaattttcatcccacaatgtgaattaagtaatttttttactcggagatgcatccttggcgtccagtggcaaaataaaattacaaggagcatgggtcagaattgcatttcaagttggcgaaatgtgcctttgagtaactcttagattggcatatgtttttagagcaatttagctagaatgtagaattgggcaatgagcctatgatacgtatgtctgtatttctgcatgaacaagcagtagattatattttctttaccttggggaaagatatgcttcagttcttagattgtagatctctagttgtgtacacgattgtggccttggtttctgaatttgtcagtaggctcaaatacaacaaatctttatctgtggggtattaggcacgtaagtggtacccagtataacttgttggcctgtaattaccaggcactcatgttcatatgcatggatggtgtaccttacagttaaattatgacctctagattttactaagtttcacaaagtctacatttgaaactatagtttgaagtcggatcttctcagtttctttagaatgaacaaattacgtatatagaatttctgaatagaataattaattttacacaagggtcagtttttcttactagtcttggatttttgtagatcttgatgataagagtaataatcataactaagttgagtgcttattgtcgttctttataatcttgatgaattctcaaacctgtgaggtaagtacttggttttgcccattttaccgatgaggaggaaagtgagacatagatcaagaacttgaccgaagttatacagcttgtaattggtggagctggaattgaaccccatcttgacttcacagcttatgttcttaaccacaaggcattaatgcccccttcagctgccaggtctaacctgattatgaccatttaaatttagcccaagtgttacaatgaaagaagttcatattacctactctgatttgttgcaggtctatgattttgtagctgtttataatgttacattttttgtgtccaggtgtactatgtagtgagataactgaaatatttaatgctaggagagtcttaagctacatgaaaaacctctagtaaagaactgcatatatgcatgtagggaattaattaaaaagtgtgacactccctgatgatttactatgaaagagctccaagtaggtgttcagaactgtctcaggctgaagtgtcatcgatctcctaaaccataatcatggttaaaggagaatctgacaggtaatgcttgagttgaacccacagtaccaaatccctcttgagtcttttctaatgtgaggcagaaataatataagcattattgttaatattattttacacagtagttccagattttctctttatcaaatattttgtcaagcacttaaaaagcaggaacaaagactagttctaatttttacttgtgtttataaaaaaaagtaatattctaggattctgtggtggaaaaatggccagaagacaagaggaaggaaaataaaccgatgacctggctaaaacatacactgactaatcagtggctcagtctttaaaggttttgttgtttttaaaggatttttttggttgtttgtgttgtttgaaataagattgacttgcttctggcattataaaagataaggtcttttataatcaccaagctctcaatgtagtacttgggtacctgggtgtcactgctgattattttttaatttttaaatttatttttttgagacagagtctcactttgttgcccaggctggagtgaaggggcgtgatcttggcttactgccgcctccgcctcccaggttcaagtgattctcatgcctcagcctcccaagtaactgggattaacaggtgtgtgccaccacgcctggctaatttttgtatttttagtagagagggagtttcaccatattggctaggctggtcctgaactcctggactcaagtgatctacctgccttggcctcccaaagtgctgggattacaggtgtgatccaccgcgcctggctctctgctggttattcagggcccaagggctcttcagttatcaggtgatgtatgctgctaggactgggaccttcccttcagggcagcagattcccttctggcccaggatgtgtctagaattgtcatcctggagctagggcctggaatggaggcttcatgactgatgaactttaatttgttttctttatttttattttttttgagatggagtctcactctgttgcccaggctggagtgcaatggcaccatcttggctcactacaacctttgcctcctgggttcaagcgattctcctgcctcagcctcccaagtagctgggattacaggcaagtgccaccacacctggccaatttttgtatttttagtagagacggggtttcaccatgttggccagccaggctggtctcaaactcctgacctcaggtgatctgcccgcctctgcctcccaaagtgctgggattacaggtgtgagccactgcgcttggccttaatttatttgcatataaagatttcagtattgggagatttggtgaaatttgtcattctaatccttatggcaattgattacttgaaaagctgacagctatattaccttgttattgatcttaaatataaaaaggcagaagttgtctaaattgagagattttgaatgtcttagaaagtatctgttaaggtggtagtttacaagcagttacattgtaacctaattgttgaaaaatgttatctgtgaaatacttgcatttccactatgaaaagcatgaaaccaggcccttggagggggaggagatgcaaattttataaaggtttttaaaaagcatttaaatatcaatggcttggttatgtaatgggttggggtgaaaagaaagacatttgtgaccttaatttttatcaggcccagttttattattggccacccttggcatagttggccttgagctttcagttatgtattgtatttctagagataagataaatgtagtacttaaaataatatttaagtattgatgtaggtgtgtgaaataattgtttcataagtaattgtatgtgtctttttcacttttggggtctgaataaacttatgggttgggtaataggatacgggcaattcttgaatttacatgaagtgctttcccccagaccgtgaatgttcttttggatatcagaaactatttaaatagttgaagccagtgaaaactgatgcatagatcttcctttagaaatgttgaatataacagggcagtgaaaggagggtctaagcagtctgtctctaattttatcctaatgcttgtcttatgatcagcttggaagctgacatgcaagatgtttaacttctatttttccatctgtaaaatgggaataagctcaaatgggagtaaatatcaatatttatcaataatagatattgataaagtctaaaggtattctgaaggaggtaacatgtttgtaacaatggttcttaaaagagaaactaaagctctggggtcctagttttttttttttttttttttttttgagacagagtctcactatgttgcccaggctggagtacagtggcacgatctcaggtcactgcaaactccgccctccgggttcacgccattctcctgcctcagcctcccgagtagccgggactacaggcacctgccaccatgtgcggctaattgtttgtatttttagtacagacagggtttcaccgtgttggccaggatggtctcgatctcctgacctcgtgatttccacccgcttcggcctccaaagtgctaggattacaggtgtgagccaccgcgcccggctgttaatttttaagagtgaaaagaggtgctgcgactaaatggtttgagaactgcttgtatagaggaatgaacactgaactgtgagccaagccttggtttttcagttatagctctgttgcttgattgtatgactgtggacaaatcatttatctgttccaggcttctgctttgtcatttgcagaacgaacaagactagatggtctgtagcattaatttttttttgggacaaggtctcactgtcacccaagctgtagtgcagtgacactgaacatggctcactgtagccttgacctcctggctcaagcaatcctcctgcttcagcctcccatgtagctgggaccacaggtgtgtcatcatgccccgctaattttttgatttttttgtagaaacagtggtctcactttgttgcccagtctggtcttgaactcctggacttaagcgatcctcctgccttggcctcccaaagtgctgggattacaggtgtaaaccaccataccctgcctaaagttagtttttaaaaaattctgcttacaggccacgtgcagtggctcacgcctgtaatcccagcactttgggaggccgaggcaggtggatcatgaggtcaggagttcaagaccagcctggccaagatggtgaaaccccatctctactaaaaatacaaaaaaaaatcatctcggtgtggtggtgggcacctgtaatctcagctactagggaggctgagacagagaattgcttgaacccaggaggcggaggttgcagtgagctgagattgcgccactgcagcctgggcgacagggtgagagtctgtctcaaaaacaaaaacaaaaacaaataagcaaaaaattctgcttatatgagtgtttatcattttctcttatctgccttttgtgggttagggagaagggtagtggtgagataaagtttctttattcagtgtatttatatctttttgccttaaaacttacatggttaggttacaggtgttttgttgctgatacttgtcatagtatcatgtatacctggttgtataaacatttattggaaaggaaaaaacatttttgttggaaagtttggtaattattgtggcttaggatatgttctattttgaaagattgctatatccagtatatttctgcccttttatgattgaagatgtacgtctgaaaatacctatgttagttctagccggttgttctttttgcgctgggaagtctttgaattttgcactgtagctgctattttcagatcctgtctctgaaactttgtctctcagttttagcttgaagtagccatttcctgtatctgtagtccagcactcttgttaactgtcccatacaatatttgttaagaaattattgttctggcagtagtattcacatgtatatatcctgcactccatattttgggggaatgctttattagttgatcaaatacttaagtatcaatttggggccaggcatggcactgtgttagggttatgccaaaggtaataaaattcctgccatcttaaggcattcttagtcaagtgagggagattggtaagtaaatgagcaattagaaagcagtgctaaaatatggaaatatattgattgcgctagggatcagaaatgaaagaaagcctaatttgggggatgtctaggaaagttttgcaaaggagatgttaactgtattgagtcttgaatgagttagcagttaagggttgactgtgagagggcagtccagacagctattagtatggttaaagattagtcttattttccatatatcagaggaaataagacatgtacacgattagttttggtgcaagatataaagtgataaatgctgcatgaagtaaaagtaagttgttgtgtgagttcaaagtagaaagacatttctggtggggaccaaggaaagctttatagagagatagcatttgagccgggcgccgtggctcacacctgtaatcctagcactttgggaggctgaggcgggtggatcacgaggtcaggagatcgagaccatcctggctaacatggtgaaaacccgtctctactaaaaatacaaaaaaaaaaaaaaaaaaaaaaaaatccgggcatggtggcgggcgcctgtagtgccagctgctcgggaagttgaggcaggagaacttcgtgaacctgggaggcggagcttgcagtgggccgagatcgcgccactgcactctagtctgggcaacagagcgagactccgtttcaaaaaaaagaaaaaagagagatagcatttgaatctagtccttggaatataggtacagttttgacaaaggagactgtgggagaattccagatgtgaggagtagcagcttgagcaaaggaatgttgtgtatattagcattttctatttggaagaaggtcaacatcgaattttaaacttaatttctggacaaatactgtataactattgtgcctttttttttttttttgagacgtagtctcgctctgtcacccaggctggagtgcagtggcatgatcttggctcactgcaacctccgcttcccgggttcaagcgattctcctgcctcagcttcccgagtagcttggactacaggcgtgtgccaccatgcctagctaatttttgtatttttagtagagatgggatttcaccgtgttggccaggatggtcttgatctcctgacctcatgatccgcccgccttggcctcccaaagtgctgggattacaggcgtgagccaccgcgccctgcctattgtgcttttttttttttttttaagagacagggacttcctctgtcacccagcctggagtgcagtggggtgatcatagctcatagcttactgcatcctagaactcccgggctcaagtgatcctcccacctgagcctcctgagtagctgggaccacaggcatgtgccactatgcccagctactattgtgcattttgtatggtagcttttgtggcttgatgatcttgtaaaaggtacatgtgcctttgtgaatgggcctgataattttagttcagaattgtcaaaagtattatctacttttttttttttttttgagacagagtctcactctgtcacccgggctcagtggcaccatctcagcttactgcaacctccacctcctgggttcaagcgattcttctgcctcagcctccgagtagctgggactacaggtgtgagccaccatgcctggctagtttttgtatttttagtagagacggggtgtcaccatattggccaggctggtctcgaactcctagacctcgtgatctgcccacctcggcctcccaaagtgctgggattacaggcatgagccaccgcgcctggccagtattacctacttttaaataagattgtgtaggatttaatgcacagattttgaatcactgtgataaaaatgcatccttagttgtcttcattttgctcatttgaagtgctcagttgacttttgggtgggtaacatttgacttatagaatctaagataaaaaattatttctgagtaatactggatttgttattttgcttatttggattatattagttattttttggtttatttgatagcattccagatttagttttgctataatgcttgttttgaaaatgtggattttttccaaaagggttgatatttcagggaacaatttgaagcatacgacaaaatttgcatttgcttatgggggattttgtctgcagggtcagggatcagcatactgtggcctaccaaccagtggcctgttttttgtaaataaagttctttttttttgtttttgatctttgttttgttttgttttgttttgttgagacggagtcttgctctgtcgcccaggctggagtgcggtggtgtgatgtccgctcactgcaacctccgcctcttgggttcaagcgattctcatgcctcagcctcacgagtaggtgggatttcaggcatttgccaccacgcctggctgatttttgtattttttttttttttttttttttttttttttttagtagagacagggttttaccacattggcctggctggtcttgaactcctgacctcaggtgatccgcctgccttggcctcccaaagtgcagggattatagatgtgagccatgtaaataaagttctattggaatacacctatgtccatttatttacattgtctgtggctgcttttgcactgtagttgcagagttgaatagctgcagcagagacctagtagcccacaaagcctaaaatgtttactgtctggccctgtattgaaagagtttgctgattattgtgctagatgaatgcaggatactacacccctctaaaaagagctgcatagaaatacatgcatatagatgcacacacgtctgacatctaccagctacctcatttcaccacttgggttataaaccacacatatttacatctgttgtacaattttcaatccgatttcagataaccttccttctaccacttcacaataattcatgagctgcaacccttttgatgcccacttcacaagcaaacttcaggtctttttcaaagtaaagtgccacatttattgttatatttgagcatttattatttaacatgtcaaactgtgctaccatttttctttggtttctttgttttaaaaaaagtcactgatgaaatttttgaatgttgtgcttctaacctcatttttcctatgagttctatggtgttaattgcacaattttacatagtttggtggtttttaggaacccatatgttacattattgaggaactgactaattatcatcctgtaaaaagtactaattcattcaccaaacatttctggggtgatgtaaatattaagtgagttaaatgggcataaagcacttatgtctttattgttactcaaatattagttattactgattactattaccatgtgtcaggaactgtaataagtagtgcattgatgaacaagacagataagggacctgtctccatgaagcttacattgtatttttaaaaatctattaatatacattttggctagtaaccgagcccttgccccacagaaaagttgtgctgttacacaaaataatattttaagatccatccacaagtcaaagacatttcacttaaaacagctttctcagcagtgtctccttgatagggtataatattttattgaattattgtttttggctgggtgcagtggctcatgcctgtaatcccaccactttgggtggccaaggcaggtggttctcctgaggtcaggagttcaagaccagcctggccaacatggtgaaaccccgtctctactaaaaatacaaaaattagccgggcgtggtggcgcatgcctgtaatcccagctactcaggaggctgaggcaaaattgcttgaagccgggaggcagaggttggagtgagccgagatatcaccaccgcactccggcctgggcgacagaatgagattccgtttcaaaaataaataaataaataaataaataaataaataaagaattattgtttttaatttttgtttttttctgagataggctgttactctgtcactcaggctggagtgcattggtgcagtcatggctcactgcagcctccgcctccctggttgcaggtgatactcccacctcagcctcccgaatatctgggactataggtgcatgccaccatgctgagttaatttttgtatttttttgtggagatgagtttttgccatgttgcccaggctggtatcgaactcctggactcaagctatctgccctctttggcctcccaaagtgctgggattataggcatgagccaccaaacctggccatgtgattgtttttttgtaactgtaacctcaggagatgaatccgatctatctttagggagataaagagtaatcatcccttcctttttttactgtataaaaggttacaaaatataatttcagacttgtagaaaatttgtaaaaatagcacaaagattctcagatgtgcttcatccagatgcagcaaggggtaacattttaccatgtttactttatcatcctctattattatttttctgaattgtttcagagtaaattgcagacatgatgtccctttactcccaaatactttaatacatatttctcgaaactaggaatagtctgttacatgatcccagtatagttagcaaaattaaaaattagcattaaggctgagtgcggcctcccacacctgttatcccagcactttgggaggctgaggtgggaggattgtttgaggccaggaattcaagaccagtcttctcaacatagaccctgtctctacaaaacaaacaaacaaacaaacaaacaaacaaacaaaagtactaaattagccggtgtggagcatgcctggagtcccagctactcagaaagctagagtcaggaggatcacttgagcctagaagttccaggctgccatgaactatgatcatgccactgcagtctagtgtgaatgacagagtgagacccccatctcttaaaataaaagagagattagcattgatacaataccatttttttttttttgagacagagtctcacactgtcgcccaggctggagtgcggtggcgcgatcttggctcactgcaagctccgcctgctgggttcacgccattctcctgcctcagcctcccgagtagctgggtctacaggttcccgccatcacgcccagctaattttttgtatttttagtcgagacgggttttcaccgtgttagccaggatggtctcgatctcctgacctcatgatccgcctgcctcggcctcccaaagtgctgggattacaggcgtgagccactgcacccggccgatacaataccatttttaatctacagaccttattcacattttaccaattgcttcatgacatccttcatgatgaaagacaaaaagttcttgttttctgatctaccatctaattctagaacactcattatatttcattgtcatctggaacagctcaccttgccatttttttttttttgagacagttttgctcttgttgcccaggctggagtgcaatggcatagtcttggctcactgcaacctccatctcccaggttcaagtgattctcctacctcagccacccgagtaactgggactacagacatgccccaccacgcacggctaattttgtatttttagtagagatggggttgcaccatattggtcaggctggtcttgaactcctgacctcaggtggtctgcccgcctcggactcccaaagtgctgggattacagatgtgagccactgcgcccggcctcttctccatttttaaaagaacacaggccagttgatttgaatttgtctgatgtttccctttgattatatattttggtaggaacactatgaagtgatgttttgtccttcacagcacattttatcaggaggtgtataatgcctttgcttttactatgttttagaatgattttgctttgtttttttttttctgagacagagtcttgctctgtcgcccaggctggtgtgcagacgtgcgatctcggctcactgcagcctccgcctcctgggtccaggcgattctcctgcctcagcctcctgagtagctgggactacaggcgtgcaccaccatgcccagctaatttttatatttttagtagagacggggtttcactgtgttgatcaggatggtctcgatatcctgacttcgtgatccgcccgccttggcctttcaaagtgctgggattacaggcgtgagccatcgtgcctggccgattttgcttctcatgctaaaattattaatcagctcattctctgccattttatttagaggtttgaagtttggcttgattaatttctacagaattggggagagttttcccacctcccatttttcttgctttttccatttcctccttcctcagatacccccaaagttcaaaaccaaccaccccgattatgaattttcattttgtattctgaacatatagctaaaagcagagaattaagggtgaatgtttcatgttaaagtgattggacctgttgttaagcatatgaaataatatatttccttcaaaggctgactatactatagtgcatccaacatagcttgttgaatatctcagttcttttttttttttttttttttttttagctgaaatttgccacagggaaatatctctccagcctgggcaacatagtgagactctgtctcaaaaaaaaaaaaaaaattagccaggtgtggtggtgcacaactgtagtcctaaatacttgggaggctgaggagggaggatcctttgagcacaggagtctgaggctgcagtgagctatgattataccactgtactctagcctgggagacagagcaagaccccgtctctcaaaaaaaaaaaaaaattggtggtgaaatacacataccacaagatttagcattttaaccattaaaaaagtttgtttttggctgggtgtggtgactcacgcctttgggagtgatcccagcactttgggaggccgaggcggatggatcacgaggtcaagagatggagaccatcctgtccaaaatggtgaaaccctgtctctactaaaaatacaaaaaaaaaaactagctgggcatggtggtgtatgcctgaagtcccagctactcgggaggctgaggcaggagaattgcttgaacccagggggcagaggttgcagtgagccgagatggcgccactgcccgccagcctggagacagaacgagactctgtctcaaaaaaaagcttttttttttttttttttgagagaagggatctcgctatgtttcccaggctggtctcaaacttctggcctcaagcaatccttctgcttcggcctcccaaagtactgggattacaagagtgagccactgtacctggcctcatttttctattttgataaacacttttttttttttttttgagacggattcttgctgtgttgcccaggctggagtgcagtggcatgatcttggctcactgcacctctgcctcccgggttctctgcctcccgggttcaagcaattctgcctcagcctcctgagtagccgggactacaggcgtatgccaccgtgcccagctaattttttttgtagttttagtagagacgggttttccccatgttggtcaggatggtctcgaactcctgacctcaggtgatccgcccgcctcggcctcccacagtgctgggattacaggcgtgagccaccatgcctggctgataaacacttttaaggcttaacatgagctaagtattattttagaacagattgtctcaaccttggcactatagacattttgtccagaaaattttttgttagaggctgtcctgtgaatgcattttatccctgacctctacccactagataccagtaacacccctaccctgagttgtgacaagcaaaaatatttccagaaattgccagatgttccctgtgggcggtatgggtttgagaaccacttttctagataataggcatttgtagataatgaatactgagctaagtggaggagtaaatggttgaaatagactatgtggttaagtacagttacagagatataaaccaagagatgtggaagaatagcaaaaaatttccttagagagttgatagcaagtattttcccaagagagacagcaattctgagttgggtcattggggatggtggggggaaatgtgctgaggagggggaaatattctaggtggtggaacgggttatgtctagagatacggtagaggagcccttgggtgccttgagaaaaatgagataataagtatgattggagagaatatgggaggtagaattggaaagaaggatgctagttggggtcaggtttgagaaaggcttttttttttttttgagacggagtcttgccctgtcacccaggctggagtgcagtgcctcactcggctcactgcaacctccgccttctgggtttaagtgattcttctgcctcagcctcttgagtagctggcattacaggtgcgtgccaccacttccggctaattttgtatttttagtagagaccgggtttcaccatgttggccagactagtctcagaactcctgaccttgtgatccgccagcctcggcctcccaaagtgctgggattacaggcatgaaccaccacgcccggccgagaaaggctttttatgctatgctaaaatgtttcattttccccctttcattatagaaaatcaacaaatacttttaaagtctgtagagttatatgatcagctttttaaaagaatagtgatacagtgaaatggtaaaaatggtcaatggtgaatattaaactcaagaagataactctagcctgtaaagtaggaaaataggaagggatggagatttatataaaactaaaactagatgtcatatgttgcccttaaatcacatcaccctgtgtgtagacttcttcatcctcatttgtcaaaattctgacatattgtcaatactgatgaagattcttgatattcaaagcaggagtgaagtgggcaaaaatctgtattctaattttcattaccctaataatgtccttttaatttggagcagttctgtggcctctctttgtctgtcctgatcttgacatttttgaagagtatagaacaattattttttagaatgtatctctatttgggtttgtgtgatgcttctttatgattagatgaagggtatgcatttttggaagaaataacagaagtgatggtatgttgttttcagtgcctctgtaacaggagatgcatgacattggttggtcccattactgatgatggtaattttaatcacttgggtggtttccagtagatttttctatgtaaagtttatcatttttggccgggcatggtggctcacgcctgtaatgccagcactttgggaggctgaggcaagcagattacttgaggtcaggagtttgagaccagtctgaccaatgtggtgaaaccccatctctaaaaaaatacataaattagccaggcatggtggcatgcgtctgtaatcccagctgctcaggaggctgaggcaggagaatcacttgaaccctggaggtggaggttgcagtgagccgagattgtgccactgcacttcagcctgggtgacagagtgagactccgtgtcaaaaaaaaaaaaaagtttatcatttcccatttttattttgaaacagtcttgctctgttgcctaggctggagtgcattggcacaatctcagctcactgcagcctcaacctcctgggctcaagtgatcctcccacctcagtctcctcagtagcgtgttccaccacacccggctgctttttgtattttttggtagaggtggagtttcaccatgttgctcaggctggtctggaacccctgagctcaagggcactgatcacctcagcctcccaaagtgttgggattacaggtgtgagccaccacgcctggccctgaaaaatatttttaacggttacattatcatggagaattggatggtataaaacaatagcagttctcatatttgaaaataaattgatgtaatgaaacaaatgagaggatcaaataatattgtaaaaagaataaaaacccacatatggacaggtctgtggaaattgtattaaagcctacctctcccagattgtttccgtttgttgcaatccatttaagaacagtttttgggctgggcacggtggctcacgcctgtcatcccagcactttgggaggcccaggcaggtgtatcatgaggtcagatttcaagaccagcctggccaacatggtgaaaccctgtctctactaaaaatataaaaattagctgggcatggtggcatgcacttgtaatcccaggtactcgggaggctgaggcaggagaattgcttgaaccaggactcgggaggtggaggttgcagtgagccaagatagcaccactgcactccagcctggcctgggctacagggtgagactcagtctcaaaaaaaaaaaaaacaaacaaaaaacagtttgtgggaaaaaacaatccttgtgtatgacataatttgctgcttttcccatttagaaaatttaaaaaatacttatttgagatggggtctcactatgttgtccaggctagggtgcagtggctattcacaggtgtgaacatagtacactacagcctcgtactcctggccttagcatcttgagtagctgggactgcaggtgcacatcacagtgcctcgcttactttttccatttttgtctgttgatcctctctctcttcctttggggtaaaaattgtggcttgtgatggtggtttgtggggaaagaaaaagttggtaagctacaagctctgagcctttaatgtgtttttgttaaccatgcagacagacattagatacatagatacaacatagatgagttaaatttgaaagaaggcaccaaactttgttactttaaagcaggatttctcaaagggacactgttgacattgatttcagaagtgagattttcatggtttttaatgttattattataatggtatggatagtgttttgccctctaagaagtagctaggagtgtttccatagatgcatttagtttatatcacttatgtattctgtctctattttgtaagaaaattgcctatgaacagaattttttctgtatgtggatttaatgtcttcttctaaaggaaacatgggtgtggttcacatttccttagttttgagtagcatggcttaagttgtgatccaattttaaaaaatcagttgaataaataaatagaaaataaaaggataatttctgtactaaaaaagtcagctggacagttaaaacatctccttttattcgtaagtttttcaataaaaattgttaaaagcagtattcatttgtgtaatgatataatctttgttattgttttatgtgcttttctaaaatgcaggaaacataaggtaaggagaagtctttccttaccctgggaccagatgtctatgaggactgttgacttttctgctataaacaggatgataaattaacagtggtgtgataggtaaagtagatttgttatgacatatcttccattaagcgataataacttgatttttacttagttgatgaaataaaataactttgaaaccttgggtaacatgaaattgaatcaaaatattttcaagttatggaacatagtgttattaatagaatggagtgttgaaaaagcactggattatgctttctgtaacttttagttctgggtcttatgataactgtgaccctgagcctcagtgttttccttttaatctgtagtgatattttttagttcagtctctcattttaaactgcttttagctctaaaattttatctcagtgacctgttgagttatataacaatcgtatcaggtaacctagataagaagaggaaggcagtaacatttcagaaatacagtttggggttgggaatccttaagtgatccagacttctcctttggtccgaagatagtgtgaataaaacagctgagggatgtgggcatcaatatattgcagaggaaaaggttatttccaggagtggatttgcagctactcttaaatctattatgttggggctgggcactggggctcatggctgtaatcccagcactttgggaggctgaggcgggcggatcacctgaggtcaggagttcaagaccagcctggccaacgtggtgaaaccctgtctctacaaaaatacaaaattttgccgagcatgatggcgggtgcctataattccagctacttgggaggctgaggtgagagaattgcttgaacccaggagtcggaggttgcagtgagctgagattgtgccattgcactcctgcctgggtgacagagcgagactctgtctcaaaaagaaaaaaaaaatctattatgttggatagatggtcttttccagaagcaaattttatagatggaaagcattttaattaatctagtaaaattctctcattttacaaatgaggctccctctacctctctccccctctccccctctccctctctccctctctccctctctccctctccccacggtctccctctccctctctttccacggtctccctctgatgccgagccgaagctggactgtactgctgccatctcggctcactgcaacctccctgcctgattctcctgcctcagcctgccgagtgcctgcgattgcaggcgcgcgccaccacacctgactggttttcgtatttttttggtggagatggggtttcgctgtgttggccgggctggtctccagctcctaaccgcgagtgatccgccagcctcggcctcccgaggtgccgggattgcagacggagtctcgttcactcagtgctcaatggtgcccaggctggagtgcagtggcgtgatctcggctcgctacaacctcacctcccagccacctgccttggcctcccaaagtgccgagattgcagcctctgcccggccgccaccccgtctgggaagtgaggagcgtctctgcctggccgcccatcgtctgggatgtgaggagcccctctgcctggctgcccagtctggaaagtgaggagcgtctctgcccggccgccatcccatctaggaagtgaggagcgccttttcccggccgccatcccatctaggaagtgaggagcgtctctgcccggccgctcatcgtctgagatgtggggagcgcctctgccccgccgccccgtctgggatgtgaggagcgcctctgcccggctgcgaccccgtctgggaggtgaggagcgtctctgcctggccgccccgtctgagaagtgaggagaccctctgcgtggcaaccgcctcgtctgagaattgaggagcccctccgcctggcagccgccccgtctgagaagtgaggagcccctctgccccgctgccaccccgtctgggaagtgaggagcgtctccgcccggcagccaccccgtccaggagggaggtgggggggtcagccccccgcccggccagccgccccgtcggggaggtgaggggcgcctctgcccggccgcccctgctgggaagtgaggagcccctctgcccggccaccaccccgtctgggaggtgtgcccagcggctcattgagaacgggccatgatgacagtggcggttttgtggaatagaaaggggggaaaggtggggaaaagattgagaaatcggatggttgccgtgtctgtgtagaaagaggtagacatgggagacttcattttgttctgtactaagaaaaattcttctgccttgggatcctgttgatctgtgaccttacccccaaccctgtgctctctgaaacatgtgctgtgtccactcagggttaaatggattaagggcggtgcaagatgtgctttgttaaacagatgcttgaaggcagcatgctcgttaagaatcatcaccactccctaatctcaagtacccagggacacaaacactgtggaaggccgcagggtcctctgcctaggaaaaccagagacctttgttcacttgtttatctgctgaccttccctccactattgtcctatgaccctgccaaatccccctctgcgagaaacacccaagaatgatcaataaaaaaaataaaaataaaaataaaaaaaattaaaaaaaaatgagaaaattgagctctcctgaggttgcagtttgcttaacagcatagatctaattagtaattaggactagaaccaaggttatctgactcccagttcaaggttcttggtacagtaccgtgtttttaactagtccattaggttgttttctgtgtattttataacacttctgtaagaaagtggaatatttttctctaaggtatgttaaaactcttgttcgagaaaatacagtaaaggatacctgttgtatcttaaagtgatttttatgtttttctgtcaatgccacaatctgaagaaagtaaattagctacacttctattgctgtgacaatagattatttagaatcttcttgattacttgtattattgttcccgtgcttcagagctgtttccttgctatttaaaatcattatggtatagcccagaggctaagggggttttctaagagtatgcaatttgtcattgacatagtttttttgtttgtttttgtttgttttgtttgtttttgagacagagtttttgctctgttgcccaggctggagtgcaatggtgtgatctcggctcactgcaacctccacctcctgggttaaagcaattctcctgcctcagcctcccgagtagctgggattacaggcacccaccaccacacctgactaatttttgtagaggcagggtttcaccatgtcggcgaggctggtcttgaactcttgacctcatgtgatccacctgcctcggcctgtgaggattacaggcatgagccaccgcaccctgccaacacagttgtttttgattggaaaagtttattttcctaatctcaaagtagcttgtatctgttctttattgtgaaatgcagtttctacattgaatttgtgtagtctgtagttttgactgttttaagttcaataactagcttagtagtatacttgttagaggtcagagtaggttaactactagaaagaacagtccttctgcttactgtactaggaggaagtctgtggtggagggaaaaaaggagtaaaacaattccagtcttctgtaaaatttgagtaatttctttctctactccttctacatgaaaaatacatcttatttgatttttgcatcacatgccttctatatgtgttggaatctggatcaccatttcttcattacttgtgggtttttgttgtgaaaaatgtggagtaagttagaagttgactgtagaataggtaacattctcttaaattctttgatcagagtgagcagagtccagaagcttggctcagacttagggaactcatgacacttctcttaatatcctaagttcatgacatgtctcttaataccctaagtgtacaatacaatagtagatcaaggaaggcagaggtatctggcagacttagaagtaactgttcataaaaacaaggatcagtatgtttctacaagataatgatttaaagttgagccaggattagttatacctttaatataaaaaattgaaatagcttatttaatctgttctaggctatagtatacggagctaggtattaaaacattctctatatatttaactcttttttttgagacagggtctcactctgtctcccaggctagagtacagtggcatgatcttggatcactgcagcctagacctcctgggcacaagtgattctcccaccttagcctccacagtagctgggactacaggcctttgccaccacacctggctcatttttgtattttttgttgagacggggtttcaccttgttgcccaggctggtcttaaacccctaagctcaagtgatccgcttgcctcagcctcccaaagtgctgggattacaggtgtgcaccactgcgcccaggctatttgacttttttattctgtaaaattgcaagcatattcagaaataagaaaatagtataacggggccgggtgtggtggctcacgcctgtaatcccagcactttgggaggctgaggcaggtagatcacgaggtcaggagttcgagaccagcctggccaacatggtgaaaccccgtctctactaaaaatacaaaaattagccaggcgtggtggtgggcgcctgtaatcctagctactcgggaggccgaggcaggagaatttcttgaaccagggaggcggaggttgcagtgagccgagatcgtgccactgcactccagcctgggtgacagagcaagactcattttttttttttttttttttaaaaaaaagaaaaaagaaaatagtataatgggttgggcccggtggctcacgcctgtaatccagcactttgggaggccaaggtgggcggatcacctgaggtcaggagttcaagaccagcctggccaacatggtgaactcttgtttctactaaaaacacaaaaattagctgggcatggtggcaggcacctgtaatcccagctacttgggaggctgagttaggagactcacttgaacctgggaggtggaggtttcagtgagccaagattgtgccattgcagtccagcctgggcaacaagagcgagactccatcccaaaaaaaacaaaaaacaaaagacaactatatatatatatataaaataacgaaaccccctaagtacctgtcacccagcttcaacaattatcatcttgcagttagttgaatttggttaacacttacccttcagtggattattctagactaaatttccaaacataatcatattgtattgaagtgttttttgaacaaactatactatggggtatttacctaaaatgaactatttgcaaaaagataagttgattttttttcttctggtgccagtacacatcataattgtagttaaaagctattatcctcacattaaagtttaatttttaacacattatgaaaatttaaaacttacagcaaagctttaaaaattttacactgaacaccaatattattaacatctagattctacctttaacattttactcttcttttttttttactcttcttgttttatcacatattgatccatctgtccaactctccattgatgtaacatttcattttattttcttattcatttcaaagtaaattacagatattagtatagttgaggttcagtttttaaagtcatattttcaactaattgtttttcctgttttgaaagactgttatatctgaagttccacattatgacaactcatagtctctatggttccagtgcttcccattttgaacttttctttcatgttctacgaacctttattaaaatatttagagctatgtacaagtaatatatacagtatttagctaaaactaagtagaatgaatgagggttttgcttgtgtgtttattgcagtctttaaaaaaaatctcttctagtgagtcaatgtgtatcttttttttttttttttttttttttgagacagagtcttgctctgtcgcccaggctggagtgcagtggcgtgatctctgctcactgcaaagctccacctcccggattcatgccattctcctgcctcagcctcccgagtagctgcgactacaggcgcctgccaccacgcctggctaattttttttgtattttttgtagagatggggtttcattatgttagccaggatggtcttgatctcctgacctcgtgatctgcccgcctcggcctcccaaaatgctgggattacaggcatgagccaccgcgcctggccaagtcattgcgtatcttaagatggtacactaaactaatatgcttgccattggtgacaacatagatgaacctggaggacattatggcaagtgaagttagccagacgtggaaaaaataatacttcatgacttcaacctatatgtggaatctaagaatgccaagtctgcaaaagaagagagtagaaaagtagttaaatgggtaggaaggtgggagaaatggggagatattggttaaaggttaccaagttggaatcacgtaggatgactaggtctagagatctaatgtacagcatgaacactatagttaataatactgtatcatgtactggaaagttgttaaaagagtagatttcaggtgttttcagcacacacagaaaaagataactatatgtggagatgggacattttgcttgaccatagtaatcatttcactatgtatatgtatatcaaaacattcatgttgtacactttattgattgattgattgagacagggtctctcgctgttgcctcagctggagtgcagaggcatgatcacagttcactgcctgcttgacctcccaggctcaagcgatcatcccacctcagccccccaagtagctgggactacaggtgtatgctaccatgcctggctaatttttatagtttttgtagagatgggttttgccgtgttgcccaggctggtattgaactcctgagctcaagcaatctgcccgcctctgcctcccaaagtgctaggattacagatatgagccactgcgcctggccataccctttaaatatatacataaaaagaagaatgcctttaaaaattttccatttaacaattactctcagggccaaaactcactgtttaagtattttgctcttttactttgatcttggtgttctatgtagtgctaaaatatactttcatctccatatgactgcttgtaacaaaaagctgttcaccacattatgaactccctgaatacacacaataatcatatagtaaatgcttgttgaataaacaagacaaaattcatcagtttttatccttacttaattttttgaacttttccttgaacttctgttatcaaacttaatacatgaacaacagaaagatgctacggatctatgtagtacaaagtaaaatatgaaatttacacactaaatatttctgtagcatattttcagaagtaagtaattgaatataaacagaagcaagcatattctatttttttattatttaagtgggaaatattttaaaatcttatgtcatatttgctttagatttcttttaaagaattaaaacattacagatagagttgaagcctcatgggttattttaatgttttctacataaacatgtttccatatacataaaccttatttagaattttttcagtttatttatttatttttattattatactttaagttttagggtacatgtgcacattgtgcaggttacatacgtatacatgtgccatgctggtgtgctgcacccactaacttgtcatctagcattaggtatatctcccaatgctatccctcccccctcccccctccccccaccccacaacagtccccagagtgtgatgttccccttcctgtgtccatgtgatctcattgttcagttcccacctatgaatgagaatatgtggtgtttggttttttgttcttgcgatagtttactgagaatgaaattttttcagttttatacgtttatgtaagtggcaccatacagtacatattattttgcaacttgccttttttttttttgtttgtttgctcaatgttgtttttaggattttgatgtaactccagatctgcactgtccaatacaatagccactaactatctgtggctattgagtactggaaatgtagctagtccacattgagatgtgctagaaatatatttgtacatggaatttcaaatatttagtattaaaaacatgtaaaatatctcactaaaagtttagtatccctaagaatctgaaatagaaaatgctccaaaacccaaaattttttgattactgacatgactctcaaaggaaatgctcaaaggtttaatgcaaatattccaaaatctgaaaaaatctgatatattgaccacatatggaactgataatagtttggatgtattggattaaataaaatgtaaaaattttaccagtggtttccttttttaaaatatggctactagaaaatttaaatatatatttgaaatgccttacattatatgtctgttgggcagcactgatctatattgcccacttttcattcctgtttatttattattattttatttttatttttattttttgagacagagtctcgctgggtcgcccaggctggagtgcagtggtgctatctttgctcactgcagctgctgcctcccaggtccaagcaattctcttgccttggcctcccaagcagctgcgattacagctgtgcaccaccacacttggctaatttttgtatttttagtagagacggggtttctctgtgttggccaggctggtctcgaactcctgacctcaagtgatccacctgccttggcctcccaaagtgctgggattacaggtgtgagtcactgctcccagccttcactcctgtttagtattaagttatatagataatagtttgctactggtggatagttgttgttttttttttttacgaatttggtgctactaaagactgttctcatgagcattcttaaacatgtctcctttgcacatatgctagagtttctttctccctaatggttcttctgatttatacttccactggcagtttgagaatgttcttgttctgcagttcttcatcctggtcgatgtttttgtgtagataactgtaatttaatacttaaagtcaaaagcataaggaagcattggtaattatttaagtgaatataaaatgtcagcttatttttctcagtgaatcttttgtaatagtcaactcacattgcctattttttattgtagtgcttctgatctgaataaataaatttaaaatttaacagccatgttatgtatcttattagtaggcagctgcagttatgcaaccaaagaatgtcccatctttaagttccattagcttgaaaaagaaatggcagctttacgtcatggaatactgtgctgccactaaaaatgatgttttagaagaatatttaatgatgcagaaaaatattcacagtatcttaatggaaagaaaagattataaagcagtaaccatttcgttttgttaaaatcaggtctatgttagctttttttttttgagatggaatctcgctctgtcacccaggctaaagtgcagtggcgtgatctcggctcactgcaacctccgcctcctgggttcaagtgatgctcctgcctcagcctccctagtagctgggattacaggagcatgccaccacacccggctaatttttttgtatttttagtagagatggggtttcaccatgttggccaggctggtcttgaactcctgacctcaagtgatccacccgccttggcctcccaaagtgctgggattacaggtgtgagccaccgtgcccggcgagcatttccttacatgcttatctctggatggtcagattgtaggtaacttctattttgcacttcacactttttttttttttcttgagatggagtttcgctcttgttgcccaggctagagtgcaatggcgtcatcttggcccactgcaaactccgtgtcccgggttcaagcgattctcctgcctcagcttccagagtagctgggattacaggcgcccgccaccacacctgcctaatttttagtatttttagtagagacagaggttcaccatgttggccaggctggtctcgaactcctgacctcaagtgatccactcgcctcggcctcccaaagtgctgggattacaggcgtgagccaccgtgcccagcctgtacttcacacttttaatatttcattttctgtagtggatttactattaccagggaaggggaatgcaaggaggagggaagagttcttaacctaaaattttcatagttggaatattattataggaaagaagagattgaatgaggtgtcactgttcccatgtttaaagataagtcaattgggaggccgaggcaggtgaatcacgaggtcaggagttcaagaccagcctggccaatatggagaaaccccatctctactaaaaatacaaaaattagctgagcgtggtggcaggggcctgtaatcccagctactcgggaggctgagggaggagaatggcttgaacccagagggtggaggttgcagtgagctgagatcgtgccactgcactccagcctgggcgacagagtgagactttgtctccaaaaaaaaaaaaaaagataatactttccttctattcaatttcaggcttttcttaagttacaaatggaaccagccaaactatgttattgcttacccattgtttttccagcgttagaggagtttttcaaagaatattttttgatttagagattattttatttattatctatttagagattattcatcatttagagattgccatttaatttcagtaagagttccatttgcatctgatattttttagtttcggagaaaggaaatggtggagaaatggattcatctccaatcctttggaataaaattcagacagtttaagctctagtctcaacttgatttaatttggaattgcatgatgtggtgtcagatttgggttcacatccagttctcttgctgtgtaaccttgggaaatttacccagcatctgagttgtttcttcatgtgtgcagtggagacaataccaagatgaagatttcatgagatgtctagtgtagacatctatttttcagagtggatgcatttaacagttggatgctgaatttataagagtatggatttcataaaaagagcataaatttcatgatatgatgtatatatcaaaagatataggtcgggtgcagtggttcatgcctgtagtcccagcactttgggaagttgaagcggatggatcacttgatgccaggagttcgagaccagcctggccaacatggtgaaacttcgtctctactaaaaatacaaaaattagccaggcgtggtggtgtgtgcctgtaatcccagctacttgggaggctgaggcaggagaattgcttgaacccaggaggcagtggttgcagtgagccgattttgtgccactgcactccagcctgagtgacagattgagactccatcttaaaaaaaaaaaaatgatggctgaataggaacagctctggtctgcagctcccagtgagaccaaaatgtagaaggcgggggatttcttcatttccaactgaggtacccagttcatctcattgggactggttaggcagtgggtgcagcccatggagggtagcagaagcagggtggggcgtcgcctctcccggaagtgcaaggagcgagagatctcccttccccaagccaaaggaacccgtgagtctatgctatccggcacagatactacacttttcccatgatttttgcagtccgcagacccggagattccttagtgtgccaactccaccagccctgggtttcaagcacaaaactgggcatctgggcagacagtgagctagctgcaggagttttttttttttccccctcttcataccccagtggtgcctggaaccccagtgagatagacccattcactcccctggaaagggggctgaagccagggagctaggtggtcttgcttagcgggtcccactcccacagaacccagcaagctaagaaccactggcttgaaattctcattgccaacacagcagtctgaagctgacctgtgaagattgagcttggtgaggggaggggcgtctgccattactgaggcttgagtaggcagttttcccctgacagcactaaggaggctgggaagttcagactgggcagaactcaccacagcgtggcaaagtggctatggccagactgcgtctctagattcttcctctctgggcagggcatctctgaaagaaaggcagcagccccagtcaggggcttatagataaaactcacatcttcctgggacagataacctgtgggaaggtgcagctgtgggcgcagcttcagcagacttaaatgttcctgcctgctaggtctgaagaaagcagtggatcctgacaaggaggattctcctagcacagcacttgagctctgctaggggacagactgcctcctcaagcgggtccctgaccccagtgcctcctgactgggagagacctcccagcaggggttgacagacacgtcacacaggagagctcccgtgggcatcaggctggtgcccttctgggacgaagctcccagaggaaggagcaggcagcaatatttgctgttctccagcctccgctggtgatacccaggcaaacagggtcaggagtggacctttagcaaattgcagcagacctgcataagaggggcctgttagatgaaaaactaacaaatagaaagcaataatatcaacatcaacaaaaaggacccccacacaaaaaccccatcaaaaggtcatcagcctcaaagatcaaaggtagataaatccacgaagatgaggaaaacccagtgcaaaaatgctggaaattccaaaaacccgaatgcctcttctccttcaaatgaacacagctcctctctagcaaggccgcaaaactggacggagaatgagtttgacgaattgacagaactaggcttcagaaggtgggtaataacaaactcctctgagctaaaggagcatgttctaatccaatggaaggaagccaaggaacttgataaaaggttacaagaactgctaactagaataaccagtttagaggacataaatgacctgatggagctgaaaaacacagcacaagaacttcgtgaagcatacacatgtatcaatagtcaaatcgctgaagcggaaaaaaggatatcagatattgaagatgaacttactgaaataaggcatgaagacaagattagagaaaaaaggttgaaaaggaacaaacaaagcctctgaaaaaatatgggactatgtgaaaagaccaaacctatgattgattggggtccctgaaagtgatggggagaatggacccaagttggaaaacacacttcagggtattatccaggagaacttccacagcctaccaagacaggccaacgttcaaatcaggaaatacagagaacaccacaaagatactccttgagaagaccaaccccaagacacataatcgtcagattctccaaggttgaaatgaaggaaaaaatgttaagggcagccagagagaaaggtcgggttacccacaaagggaagctcccagaggaaggatatctgggcagaaaccctacaagccagaagagagtgggggccaatagtcaacattcttaaagaaaaaacttttcaacccagaatttcacatccagccaaactaagcttcgtaagcgaaggaggaataaaatcctttacggacaatcaaatgctaagagattttgtcaccactagacctgccttataagagctcccgaaggaagcactaaatacagaaaggaaaaactggtactagccactgcaaaaacattccaaattgtaaagaccatcgacactataaagaaactgcatcaactaacggtcagaataaccagctagcatcataatgacaggatcaaattcacacataataatatgaaccttaaatgtaaaagggctaaatgccccaattaaaaggcacagactggcaaattggataaagagtcaagacccattggtgtgctgtattcagaagacccatctgatgtgcaaagacacacataggctcaaaataaagggttggaggaatattaaccaagcaaatggaaaaaacaaaaaaaaaaggggtgttgtaatcctagtctctgataaaacagactttaaaccaacaaagttcaaaaaaggacaaagaagggcattacataatggttaagggatcgatgcaacaagaagagctattttaaatgtatatgcttccaatacaggagcacccagattcataaagcaagttcttagagacctacaaagagacttagattcccacacaataatagtgggagactttaacaccacactgtcaatattagacagatcactgagacagaaaattaacaaaaatattcaggacgtgaactcagctctggaccaagcagacctaatagtaacctacagaactctctaccacagatcaacagaatatacgttcttctcagcacatcacacttattcactcaaaaccccacaactacatggaaactgaacaacctgctcctgaatgactgctggtaaataacgaaattaaggcagaaataaagaagttctttgaaaccaatgagaacaaagagacaacgtaccagaaatctctgggacacagataaagcagtgtttagaggggaatttatatcactaaatgcccccatcagaaagcaggaaagatctaaaatgaacaccctgatatcacaattaaaagaactagagaaaaagagcaaacaaattcaaaagccagcagaagacaagaaataactaagttcagagcagaactgaaggagatagagacatgaaaacctctccaaaaatcaatgaatcaaggagctggttttttgaaaagattaacaaaatagaccatgagccagactaataaagaagaaaagagagaagaattaaatagacacaataaagaatgataaaggggatatcaccactgatcccacagaaatacagactaccatcagataatattataaacacctctacgcaaataaactagaaaatctagaagaaatggataaattcctggaaacatataccctcccaaggctaaaccaggaagaagttgactccctgaatagaccaataacaagttctgaaattgaggcagtaattaatagcctaccaaccaaaaaaagcccaggagcagatggattcacagccgaatgataccagaggtacaaagaggagctggtaccattccctctgaaactattccaagcaatagaaaaagaaggattccttcctaactcattttatgaggcaagcatcatcctgataccaaaacctgtcagagacacaaccaaaaaaggaaatttcaggccaatatccctgatgaccatcgatgtgaaaatcctcaataaaatactggcaaacagaatccagcagcacatcaaaaagcttatccaccattatcaagtctgcttcatctctgtgatgcaaggctggttcaacatacgcaaatcaataaaagtaatcaatcacataaacggaaccagtgacaagaaccacatgattatctcaatggatgccgaaaaggccttcgataaaattcaacaccccttcatgctagaaactctcaataaattacgtattgatggaacatatttcaaaataataagagctatttatgacaacccatagccagtatcatactgaatgggcaaaagttggaagcattccttttgaaaaccagcacaagacaaggatgccctctctcaccactcctattcaacatagtgttggaagttctggctaggcaagagaaagaaataaaggttattcaaatagcaagacaggaaatcaaattttctctgtttgcagatgacatgattgtatatttagaaaaccccatcatctcaacccaaaaactccttgagctgataagcaacttcagcaaagtctcaggatacaaaatcagtgtgcaaaaatcataagcattcctatgtaccaataatagacaaacagccaaattatgaaggaactccctttcacaattactacaaagagaataaaatacctaggaatgcaacttacaaggggtgtgaagggcctcttcaaggagaactacaaaccactgcttgaggaaataaggacgcaaacaaatggaaaaacattccatgctcatggatgggaagaatcaatatcgtgaaaatggccatactgcccaaagtaatttacagagtcaatgctattcctatcaagctaccattgactttcttcacagaactaggaaaaactacgtagagccaaaacaatcctaagcaaaaagaacaaagctggaggcatcctgctacctgacctcaaactatactacaaggctccagtaaccaaaacagcatggtactggtaccaaaacagatatatagaacaatggaacagaaccgaggcctcagaaataacaccacacatctacaaccatctgatcttcaacaaatctgacaaagacaagcaatggggaaaggattccctgttttataaatggtgctgggaaaactggctagccatatgcagaaaacagaaactggaccccttctttagagcttatacaaaaattaactcaagatcgattaaagacttaaatgtaaaacctaaaaccataaaaaccctagaagaaaacctaggcaataccgttcaggacataggcatgggcaaagacttccatgactaaaacaccaaaagcaatggcaacaaaagccaaaattgacaaatgagatctaattaaagagcttccacacagcaaaaaaactatcattggagtgaacaggcagcctacagaatgtgagaaaatttttgcaatctatgcatctgacaaagggctaatatccagaatctacaaggaacttaaattacaagaagaaaacaactccatcaaaaagtgggtaaaggatatgaacagacatttctcaaaagaagacatttatgtggccaacaaatgtgaaaaaaagctcatcatcactggtcattagagaaatgcaaattaaaaccacaatgagataccatctcacgccagttagaatggcgattattaaaaaggcaggaaacaacagatgctggagaggatgtggagaaataggaacacttttacacttttggtggaagggtaaattagttcaaccattgtggaagacagtgtggctattcctcaaggatctagaaaccagaaatacaatttgacccagcaatcccattactgggtatatacccaaaggattataaatcattctactataaagacacatgtacctgtatgtttattgcagcactatttacaatagcaaagacttggaaccaactcaaatgcccatcaatgacagactggataaggaaaatggggcacatatacaccatgaaatactatgcagccataaaaaagattgagttcgtgtcttttgcaggtacatggatgaagctgtaagccatcattgtcagcagagtaacacagtaacagaaaaccaaacactgcacgttctcactcataagtgggagtcgaacagtgagaacacatgggcacagggaggggaacgttacacattggggcctgtcaggggttggggggcaaggggagggagtgcattaggacaaatataatgcatgtggggcttaaaacctagatgatgggttgataggtgcagcaaaccaccatggcacatctatacctgtgtaacaaacctgcatgttctgcacatgtatttcagatcgtaaagtaaaaaaaaaaagatatggaagttactatgcgcgttaataaaatatgtttatacctcctcccttaggtgtctattatgtagaacaagtttattacattctaatgataaagtaaacactctgttttcaaaggtggtgttatacgtttgtgtatcttttgccccgggcatgatgatttcatcgtttgtgtaataaatttaatactaccatagtctccccttattcacacgggataagttccaagaccccaatggatgcctgaaactgtggatagtactgaatcctatatacacttatgtttttttcctgtacactcatatttatgataaagtttaacttataaattgtgcacagtgagagactgacaataactataataaaatagaacaattataacaatatactgtaataaaatttatgtgaatttggtttcaaaatatcttattgtactgtactcacccttatgatgatgatgttagatgataaaatgcttatgtgatgtgatgaaggtaggtgaattatgttaggcattgtaatgcagcatgaagctactattgaccttctggtgttacatcagaaggaggatcatctgcttgggtggtcctgaatcatcacgtcctgatgatgtctgttgctggttgtcaggagcagacagtgtccatgactaatgggcaggcagcgtatatagcatgtatacactggacaaagggatgtctcatgtccacggctggacagagcaggagagtgcaagattttgtcacactactcagaatcgtgcagtttaaaacttaccaattgtttatttctggaattttccgtttaatatttttggactgcagttgaccacaggtaactgaattcatggaaagcaaaacaaccatggacaaagtgggattactgtattatttcagattttaattagcatttttcaaaactctgtctagctagtgcttgcattgtagaatttgtctgatttcatttttattgattagggaaataagctttatttttatctggagtgatttgtttctttgtgcttcctcaaaattgagtagtggctactgagtatatatcgaaaaggaaataaattattatgtcaaaaagatacctacatttgtatgttgattgtagcactgttcacaagattaaagatatggaatcaacctaagtgatgaagaaaattggtgtgtgtgtgtgtttgtgtgtatacatacacactgtggaataatactattcagccacaaaaaagaaaaaaaaatcatgtcttttgcagcaacatggatgggactggaggccattatcctaactgaaataactcagaaagtcaaatactacatgttctcacttacaggtgggaacttaaatggttacacatagaatagagtagaataatagacattggagactccaaaaggtgagagggtggcaggggggtgagggttgaaaaattacctattgagtactttgttcagtatttgggtgatgggtacactaaaatcccactttaccaccatgcaatatatgcatgtacgaaatctgcacttgtaccccctaaatatatacaaataaaagttttttaaaacacttagtaaatagcctgtcatagggaataattgaaaccatttcgtatctcactttaaaacctttaggctgggtgctgttgcttatgcctataatcctagcactctgggaggccgaggtgggtggatcacctgaggtcaggagttcgagaccagcctggccaacatggcgaaatcccatctctactaaaaatataaaaattagccagtcatggtggcacacgcctgtaatgccagctccttgggaggctgaggcgggaaaatcacttgaacccaggaggcggaggttacagtgagccgagatcacaccactgcactccagtctgggcaacagagcgagactccatctccaaaaaaaaaaataaaaataaaaataaaaaacctttttagttctgtttcaatgttatcttctttttatttaattatttttggaataagaaataatatttatatggtttgaacaccaaaaggtataaaagatatttttaaaggtataaagtataaaagttagaaatttcccccacttccctgttctctgttcccacagctgccagcagcttaccaccccccagcccaatcactgctactgatgcctaacctatctttccagagttctttgtgtgttcagtagcagttaaccacagatctttaatcattcccctttataccataaaaggtggcatgttatgtacacttgcctcccctttgctttttccacttaatgtgtcttgagaagctttccatatatcagtacatggaaaactttcttatattgttttattttaaatttatatacaataaatgcatggatcagaaaaataattgaatagtgggccccaaattaaatgattactctaatgatttgtagatgggtttagttaaagcactgggatatttagctacaggtataggaatgcatgattattttctgtcaggaaacctagattttgttcttctccccttctttatcaaaggtgaaatcagactcttatttaaaccaggattaagtattctttgcataataatatatatttgctttcccaagttattcttcaggaaagtcttgactctctagcaaactttgtttcttaaaatggaggttagcaggtgttggaaataaggtgagagttttaacacttaaaggaaactatataaagattagatatagtcagaaatttagaaaacattaggaaattcacagagagatggatcccccttttctaccctagattacccctgggctgcttaatggcttgtctttactattagattgtgagctccttgaggtcaggttttatctgttttttatttcaataccaagtgccaagaatatattcagcatttggtgtaaatattataaaatgagtaaatgaatgtgctcttgaatagaagttaactctgattttgggttaagtcccccgccccctttttttgagacagtctcactctatagctcaggctggagtgcagtagcgcagtctcagctcactgcaacccccttctccggggttcaagcaattcttatgcctcagcctcccaagtagctgggattacaggtgtgtgccaccacacccggctgatttttgtatttttagtagagatggggtttcaccatgttggccaggctggtcctgatctcctgaccttaggtgatctgcctgccttggcctctcaaagtgctgggattacaagtatgatctactgcgtctggctgattttgtgttaaaatcctttatgtcagttccagaagaggttaaatggaagttttcgaggcaagagatacttgtgaatttgacatgagtggcctttgttttgaaattttaatgctacacagatgctgtaaaaggattttttcaggccgggcgcggtggctcacgcctgtaatcccagcactttgggaggccgaagcgggtggatcacgaggttaggagatcgagaccatcctggccaacatggtgaaacctcatctctactaaaaatacaaaaattagccgggcgtggtggtgtgcgcctgtagtctcagctactcaggaggctgaggcaggagaattgcttgaacccgggaggtggaggttgcagtagagccgagatcgcgccactgcaactccagcctgggccacagagcaagactccatctcaaaaaaagggtttttcaaaaaatcatgtacaattagaaaattgtgtctcttaaatctatttgcttatgttattaatcccagattatgactgttctttcccctaaggcattagcctgttgaaagaaacagacctataggacttttgttgatgttaaagccagaccagaaatttagaaaatcaggatatttgccattttgataagaaaaccatttaatagttgaatataggaatttgcattttgagagtgtgtactaatttagattctccaggaatagaaccatcatctgaaaataaataagtttaaccagacggacaaggagtgatatgtagttttaggtggtaagactgtgatattgttaggttacatgtatctagggcaagatgctcaaatacaataagtatatacagactaggaactctagttgtctttttttaattaatgaaaagagggttttatgcttcatttctaaacattctcaaaggaatttatgttttgttgatgatctttttttatttatataaatttacgggggtacttgtgcactttttttttaaacatggatagattacagagccgtcaagtcaagcctttagagtttccatcacccaaataacacacattgtattcattaagtaatttctcatgatctcccacctcctgctctctcacctttccaagtctgttatctatcattccatgctctacgtccatgtgtacacatttttcagcatccacatgtgaatgagaacatgtgttattcccaccaacagtgtatgagtgttcccttttctctgcaacctcaccaacttgtgttattttttgtctttttagtaatagtcattctaactggggctggatgatacctcattgtgggtatttttaaaataaaaaaaaatttgtgtgtacataggtatatttatttatggggtacatgagataatattgatacagacatacaatgttcaataactacatcagggttgtatccatcaccaagcatttatcctttcttggtgttagaaacaatctagtttctaatctctaatagtttctaatctctagtagttatattaaaatgcataatgaattattattgactgtagtcaccccattgtgctatcaaatgctaggtcttattcattctatctaactatatttttatacatattagccatccccactgtgccaccatccccattagtgccctggcccccactacccgtcctagcctctggtaaccatcattctactctctatctctatgagttcaattgttttgatttttagataccacaaataagtgagaacatgtgaagtttgtttttctatgtctagattatttcacttaatataatgacctacagttccatccatgttgttgcaatgacaggatctcatacttttttaagggctgaataggactccattgtgtatgtgtaacacattttctttattcgtccgtctgttgatggacactcaggttacttccaaatcttggttattgtgaatagtgctgcagtaatcatgggagtgcagataactctttgatatactgatttcctttctttggggtacatatttagcagtggaattgctggattatatggtagctctctagtttttttttttttttttttttttcatttttgagacagggtctcactctgttgcccaggctggaatgcagtggcggaggttcacttcagcctcaacctcgcaggcttaggggatccacccacttcagtcttccaagtagctgggactataggcgcataccaccatgcccagctaggtttttgttgttgttgttgttgttgttgaggcagagtctcactctgtcacccaggctggagtgcagtggtgcgatctcggctcactgcaacctctgcctcctcggttcaagccattctcctgccttagcctcccaagcagctgggattacaggcgcccaccaccatgcctggctaacccagctagtttttaattgttcgtagagatggggtttcaccatgttgtctagactggtctcgaactcctcgactcaagtgatcctcctgcgttggtgtctcaaagtgctgggattgcaggcacaaggcaccgtgcctggtcagaatttttttttaagggtttctcctttgtaaatttcttattcatatcttgaattgattttctgagtttcttgtattggttttcagacttttcttgcatctcagtgacccttaaaatcaatattttgaatattttatctgggattttgtggatttcattttggttaagatctgttgctgcagaatcgtgttcctttgacagtgtcatattaccttggtttctgatgtttcctttgtcttttcattgatttctgtgcatgtgctgtaacagtcacttcttatctttgaatttactttcatggtgaggggagatttcttcctgaagatgtgactataatgttggttgggccttgcttctgggtgcgtgcagtagtgaagtctctgtatgatttattttgagacagctctgttgcccaggctggagtgcagtggcacattcatagcttgcttcagcctcaaagtcctgggcataagtgatccttctgcctcagcctcctgagtacctaggactacaggcgtgtgccaccatgcctggctaattttcaattttcttttagagatgggggtctcattatattgcccaggctggtcttgaactcctggtctcaagcaatcctctctccttggcctcccaaaatgttaggattacaggcatgaaccaccgtgcccagcctctgtatgatttctttggctataaatagcattaatggtgtctgtggtttccttgatgtcttagcttgagtttatttgtggaggctgaagttgcgctggggattggaatgcctaataggcctgtctttaggtttcaatggtagtgatggtgggctaagcatgtctatccatgtgccctggggcagtgtgtgctggtaactgtgttggcagttccaggcaggctgattcttgggcttctgagtgactttctcagatgcctgttgtaatggtgtaccaggtgggtgagctggctcttgagctcctgggcaactggcatggcatagtttatggtggtagtagttttgttgagatactcttgtgggtcccaagcactttgcatttgtgttagcagtggttacaatgagatccaggccagtaaggtggtacttgcaggcatgaggcagctgaggcggtactggtagggtgttatccctgacctctgtcccctgggagaagtactctggtgtttcagagtgtttcaggtagtgggtttggttgtggaatcccctggtaacctggatcctgcactgtttctcagccaggtcaaagcctggtagagctggactgggaaagcttgcactcaggcccccacagtggtgtaatgtcatgataggcggggtggaatgatcttcaggctgctggcaaaatgcttgggtgagggatgagtgccactgctgagatcctgccatggggaagttgggcctggtcccaggagtgagttgtgttcctttcatgccccagtccaggcggagttccttcctcttgtccctgctgttcagtcagaactctgcagttcttgcctagtccctaaatcatcccagggtcgggtcatataagccccatccagctcaagacttaagcctccagggcaattaatcgtgctcaaatcctgggggtggtgtttgcttctagcactggtggtggctgcatcccacaccaggcagagccaccccatccccgcccctactcacactctgcctctccaaacagcagcccaagtttccctaatggctaggactggccctgttgcttccccgtactgctcacagttatgagctgagatcctgcatcgtgtcttgttacagctgcttaggtttcaaaaatggcatgggacacagaatgtgttccctccctgaaacagttctttctcacagtcttccagtcattccctaaattaattagattcagggcttaagagggtcagggtgctctactgaggactggattgtatggtagtggaccacagaaaaatactcaccctctcccatattggggaatcacttctggttccctgtgggtcccagccacacaggctctctgttttccttttgcttcctagattttggtttttgctgtcgcttttctgttgaactcctgtgttccctctgggataatatatccaaagtgtcattgtctacacaattttagctcttgtacctggatgaggcacgcttgaaattcttgcagtcatccatcttttcctgatcttgtttcttctgccccattccccaggttcctccagggtctcacagttcccctgtatgtgggaaaggcagttttctttctgcccaatcctgcttctcctttgtccacccagatgaggtttccgctagaattgctacttaaagtggttctgtggaacattttgtagcagagaaaatcagggctgagggagcaccataaaggttagaaaagattagaacattaggttagaaaatctgaactactctacctgtcttgattaggaggattagagttgatgttggatgggtttgttggtttattttccacttatctatcagaatgaagaacttactgccttttcttcttagttggtctaatatttatcactttaattatttttaagtgtacaattcagtggcattaaatatatttataatgtatcatgatcattactacctatgcccaaaactttttcatcatccccaacaaaactctatatccaaaaaaaaataaaaccctctatatgtacatggaacaattaagttgggcccctatcttgcaccatataaaacagttaaatgcatcaaagatcttaacgttaacagctaaaattataaaactcttagcagaaaacatttgggctgattttcatgacctgggatttggcaatgatttcataaacataatgtagaaagcacaggcagcaaaagaataagtaagttggacttcattaaaaatttaaaaatttttttacatcagaggtcactatcggctggatgtggtggctcacacctgtaatcccagcactttgagaggctgaggcgggtggatcacttgaggtcaggagttcgagaccagcctgaccaacatggtgaaaccctgtctctactaaaaatacaaaaattagctgggcatggtggcgcgcacctgtagtcccagctacttgagaggctgtggcaggagaatcacttgagcatgggaggtggaggttgtagtgagctgagatcgtgccactgcactagaacctgggcgagagcgcaagactccatctcaaaacaaacaaacaaacaaaatgaagcaatcccccccccaaaaaaaaggtcactatcaagagaataaaaagaaagacaactcagaatgggagaaaatatttgcaaatcatatgactgatgagggtttaatatccagaatgtgtaaagaacttttactgagcagcgaaaagaaaacccaatgaagaaatgaacaaaggccttcaagaaatgaacaaaggccttcaatagccatgactttacttttttaaatttaaatttaaattttttgagacaaagtcttactctcttgcttgggctggagtgcagtggtgtgactgtggctcactgcagccttgatctcccagactcaagtgattctcctacctcagtctctggagtagctaggatgacagactcacactaccacatgtgactttgtgtgtgtgtgtgtgtgtgtgtgtgtagagacagggtctcactatgttgctcaggctggtcttgacctcctgggctcaagtgagcctctcacttttatttttatttgtagtagagatgagatcttgctaatgttccccaagctggtctcgaactcctgagctcaagcaatcctaccttcctcggcctcccaaagggctgggattataggcgtgattcactgtgcctggcctagtttctttgttttaatttttttcctccccatttgtcttttgagtttccctgagaatctgtcttgctgctgtctcagttgtcattcactgttattacactggaaccctattgatgtagtggtaaggaattagggaggggaagtgttttgtaatctcatgattaaatgtcatttcttttttttttaattggtcctgagtccctgaattgtgactctcagaagtgtttcttagcccttgccctcccacttagatgagacaggaaggctataagcctcgggggttttctaattgtctttcctcttggtagataatggtgtgagcatatttgaatatagtttctttcctctcctcctgctcaaggcacaaggaaattttcctcaaatatttgcagtgaaaacatactaaaacccttgtaggattcctggaggtaaaacctaggaaagtgtaggggcccctctaagactgggatgtcaggatttttaaactctcaaactaatccatatttggcctccagaagttgtcagtttctacttgagtgtttctgttctaggaaagctgtgatattctgtatctgtctttctagttttttttggtggtggtttgccttgtgacctcagtttttggattgatctaagataaattactgattttcagttttctcagcgttttttcttgtcaggatagaagtgaggacctccaaaatccttacatattatagctgcctggtgagttttgtttgtttctttttttaaaaattttttttttttttttttttttttgggatggagttttgcgcttcttccccaggctggagtgcagtggcgcaatctcggctcactaaaacctctgcctcccaggttcaagcaattctcctgcctcagcctcccaagtagctgaaattacaggtgcccgccactatatctggctaattttttttatatttttgatagagatggggtttcgtcatgttggccaggctggtcttgaaatcctgacctcaggtgatctacccacctcggcctcccaaagtgctgggattacaagtatgagccaccttgcctggcccgttttttcttacttttagtaaaaataacctcacgtaaactgtcataggtgtctgtgggcttatttttgatgttctcctttgttggaaattcttgtgaaataccttccaggtcttagtctttgtgaggatcaggttctgctttcaattggatgttttaagaattagttttaaaataatttgtttttcttattattagcaccctatgtttagttgctgtacttatttggatagtgtggtaagcacagtggcttaggcatgagaaatataactagagatctcataattttatgtgtttataaagtgttttatttaaaaattaaataattgcaaatgagtggataaagaaactgatatatatatatctgattatatatatatatatctgattatgtatatatatctgattatatatatatgatggaatactacccggctataagaatgaatgaattaatggcatttgcagtaacctggatgggattggagactattattctaagtgaagtaactcaggaatggaaaaccaaacatcgttatgttctcgctcataagtaggagctaagctataaggatgcaaaggcataagaatgacacagtggcttttggggactcagagggaaagggtaggaaggagatgagggataaaagactacaaattgggttcatgtgtactgcttgggagatgggtgcaacaaaatctcagaaattaccactaaagaatttactcgtgtaaccaaataccacgtattccccagaagcctgtggaaataaaaaattaaaaaaattgcaaatgtaaataagacagtaacaaagatggcaaagaacaaagatgaaaaagtatgctgtattacctgaaagtgcttttatggatatcttagcttatccttcgtccatttaaatattgttagttttagccgggaacatgcctgtaatcccagcaccttgggaagctgaggcgggcagaccacttgagaccaggagtttgagaccagccaggccaacatggtgaaacccgtctctactgaaaatataaaaattagccgggcgttggggcgcatacctgtaatcccagctatttaggaggctgaggcaggacaatcacttgaacctgggaggcggaggttgcagtgagacgagattgtgccactgaactccagcatgggtgacagagtaagaccctgtctccaaaaaaaaaaaaaaaaaaaaaagacacaaaagagaaacaaaaaaaacatattgttagttttgatgattatctactagggtaagtacttttctactcattaaattccattagtgactgtgccttgatttccctgaaaggatgcagtatagagtaggcttttgattggagatagacttcctgattttccacttagtatttaggagtgaaaattattattattattatttattgttttttttttttttggagacagggtgtcactgtatcgcctaggctggagtgcagtggcttgatcctgactcactgtagccttgacttcctagggtcaagcaatcttcccacctcagcctcctgagtagctgggactacaggcacgtgccaccacagccggctaatttaaaaaaattctgtagagatgggatctcactatgttgttcaggcttgtctcaaactcttgggctcaaatcatcttcccacctcagcctccctaagtgctgggattataggtgtgagccactgcacccagccggaagtgcaaattatttaactcctttattttattcagcaaataaatgtctttctgagcctcagtttcctgtaataaggttcttataagttttaaatgaggtcagtgtgcattaaatgtacatgttagaatttggtaaggttagtaagaaaaccaaagacatgtggaccctttacaaaaaattccagcatttaccctaagagatgctttttaagtggttgaaatttggtggcatggaggaaatgtatatgggctcgtatcacatttgggagtaaaattaaggcatgaaatttaaacaaaaaataaaattgtgggtacatagtaggtgtatatatttatgggatttatgagattctgagacaggcatgaaatgtgtactaatcacatcatgtaaaatgggctgtccatcccctcaagcatgtatcctttgagttgaaaaacaatccaattttattctttcaggtattaaaaaatgtacaattaatttaatacagtaaataatacattaatttgatctcaaactcctgacctcaaatgattaattagattaattaatgtattatctattatttattatatacaccctgttgtgccatcaaatactaggccccccccccccttttttttttttggagacagagtcttgccctgtcgcctaagctggagtgcaatggtgcgatcttggctcactgtaacctccgcctcctgggttcaaatgattctgctgcctcagcctcccgagtagctgggattacaggcgcccaccaccaagcccagctaatttttgtatttttagtagagacggggtttcaccatgttggccaggctgctatcgaactcctgaccgcgtggttcgcccgccgcggcctcctaaagtgctgggagtacaggtgtgagccactgcgcctggccaaatactaggtcttattcatgctttccaactgtttttttttttgtacccattaaacgtcaccacatcttgccccccctcgcacttctcttttctttctactctgtgtctccatgagtttgttttgatttttagattccacaaataagtgagaatatgcaatgttggtctttctgtgcctggcttatttcacttagcataataacctctagttccatccatgttgttgcaaatgacgggatctcattcttttttatggctgaatagtagtccattttgtgtaactaccacattttctttatccattcatctcttttgatggatacttaggttgcatccaaacctggctattgggaacagtgctgtaataaacatgggaatgcaggtatccctttgatatgctgatttgctttatttctggtgtatacccaagcagctggattgctggatcatatggtagctcaatttttagttttataaggaacctccaaactgttcttcgtagtggttgtcctatttcacgttgttgccaactgtgtatgaggattttcttttctttacatcattgccaacatttgttattgcctgtcttttggatataagccatttcaactcaggcaagatggtatctcatggtagctttgatttgcatttctctgatgatcagtgatgtagaatgctttttcatatgcctatttgcaatttgtatgtcttcttttgagaaatgtgtatccacattttttgcccatttttgattggattattagatttttattctgtagagttgtttgagctacttacatattctggttattaatcgcttgttagatggatagtttgcaaatactttctcccattctttgggttgtttgttcactttgttgattgtttcttttgttatgcaaaagctttttaacttgatgtgatcccatttgtcaagttttgtttggttacctgtgcttgtggggtattgttcaagaaaattttgcccagactaatggcctagagagtttccccaatgttttcttgtagaggattcataaattgaagttttagataaaattctttaatccattttgattttatttatgtatagagcaagagataggagtctagtttctttttctttttttttttttgaggtggagtttcggctcttgttgcccatactggagtgcaatggcacggtctcagctcactgcaacctccgtctcccaggttcaagcgattctcctgcctcagcctcccgagtagctgggattacaagagcccaccaccatgcccgtctgatttttgtatttatttatttttatttatttatttatttatttatttagttttttgagacggagtcttgctctgtcacccaggctggagtgcagtggcacgatctcggctcactgcaagctccgcctcccgggttcacgccattctccagcctcagcctcccgagtagctgggattacaagagcccaccaccatgcccgtctgatttttgtatttatttttatttatttatttatttatttatttatttatttatttagttttttgagacggagtcttgctctgtcacccaggctggagtgcagtggcacgatctcggctcactgcaagctccgcctcccgggttcacgccattctccagcctcagcctcccgagtagctgggactacaggcgtccgtcactgtgccggctaattttttgtatttttattagagacggggtttcaccgtagccagaatggtctcgatctcctgacctcgtgatccgcctgccttggcctcccaaagtgctgggattacaggcgtgagtcattgcgccaggctaatttttgtatttttaatagagaccggatttcaccatgttggccaggctggccttgaactcctgacctcaggtggtctggccgtctcggcctcccaaactgctgagattacaggtatgagccactgcacccggcctggagtctagtttcattcttctgtatatggatatccagttttcccggcaccatttatttatttatttttatttattttatttttttttgagacagagtctcattccatcacccaggctggagtgcagtggtgtgatgtgggctcactgcaacctctgcctcccggattcaagcagttctcctgcctcagcctcccgagtagctgggattacaagctaatttttatattttgagtagagatggggtttcaccatgttggccaggctgatctcgaactcttgacctcaaatgatccacctgcctcggccccccaaattactgggattacaggcgtgagccaccgtgccgggccagcaccatttatttttattttattttacttatttttttgagagtgagtctccctatgttgcccaggctggagtgcagtggtgctatctcatctcactgcatgcagcctctgcctcctgcgttcaagcgattctcctgcctcagcctcccaagtagctgggattacaggcacccaccatgatgcccagctaatttttgtatttttagtagagacggggtttcaccatgttggccaggctggtctcaaactcctgacctcaggtgatccttccgccttggcctcccaaagtgctgggattacaggcatgagccaccatgcccagcctggagtctagtttcattcttccgtatatggatatccagttttcccggcaccgtttacttatttatatttatttattttattttttttgagacagagtctcatttcatcacccaggctggcgtgcagtggtgtgatctaggctcactgcaacctcttcctcctgggttcaagcaattctcctgcctcagcctcctgagtagctgggatgacaggtgtgtactaccaccatgcccaactaatttttgtatgtatgtatgtatgtatgtatgtatgtatgtatgtatgtatgtatgtatttgagacagaatcttgctcttttgtcgaggctggagtgcactggcacgatctcggctcactgcaacctccgcctcccaggttcaagcgattctcctgcctcagcctcctgaggagctgggattacaggtgcatgccaccacgcctggctaatttttttttcgtatttttagtagagatggagtttcaccatgttgcccaggctggtctcgaactcctgaccttgtgatctgctcacctcagcttcccaaagtgttgggattacaggtgtgagccagcgtgcctggccccagcaccttttattttatttattttatttatttttctgagagtgagtctcactgtgttgcccaggctggagtgcagtggtgctatctcccctcactgcaacctctgcctcctgggttcaagtgattcttctgcctcagccttccaagtagctgggattacaggtgcctgccaccatggctggctaattttttttttttttttttttttttttttagcatagatggggtttcaccctgttggccaggctggtctcaaactcctgacctcaagtgatccgtctgctttagccttccaaagttctgggattacagatgtgagccactgtgcctggccccagcatcatgtattgagcctttttcttttccccagcatatgttctcggcacctttctagaaatagaaaatgagttcaccgtagatgtgtggatttgtttctgagttctgtattctgtccattggtttatgtgtctgcttttatgccagaatcatgctgttttggttactataactctgtggtataatttgaagtctgataatgtgattcttccagttttgttctttctgcttagtatagttttgggaattctggaacttttgtagttccgtgtaagttttaggattgttttttctatttctgtgaagagtgtcattggtattttgatagggattgcattgaatctatagattgctttggatagtatggacagtttaacaatattgattcttccagtccatgaacatgaaatatctttacattttttggtgtcctcttcaatttcattcagtttgcttttcagattggtcactgtcgatgtttagaaatgctgctgatttttgtatattgattttttatactgacagtttactgaatttgtttatccgttctaatagtttttttgtagagtctgtaggtttttctaaatataagatcatatcatctgcaaataagggtaatttgacttcttcctttcccttatttctttctcttgtctggttgctgtagctaggacttccagtagtaccatgttgagtaactgctggaagtgggcattcttgtcgtgatctggatcttagaggaaaggcgttcagtttttcccctcagtttgataccagttgtgggtgtgttgtatatggcttttattatgttgaggtatgttcctcctaaacccatttttttgagggtttttatcatgaaggaatgttgaatattatcaaatagtttttaagcatcaattgatataatatggtttttgttcttcattctgttgatatgatgtatcacattgatttgcatatattgatcccctcttgcatccaagggataaactccacctggttacgatgaatgatctttttaatgtgtctgatttgctagtattttgttgaggatgtttgcagcaatatttatcagagatattggcctgtcattttctttttttgatgtgtttttgtcaggttttggtaacagggtaatactggcctcacagaatgtgtttggaagtattgcttccttttattttttggaatagtttgagtaggaatagtattgatgcaggaattttctcggcccctttgttggacttgtgacaggggcgaatgtttactcagcctgccgtgctcaaccccttgttggagggtgcatgtgagtgagtgagtgcgggacctggccagctggtgggggcactgacacagcagcaagccctgtgcagggaccacggccagaccaggcacaagcgagtgagtgtgggacccagctgttctgagcaccagcaggagcaggcctgtgcacagcacccaggttgatggggaggggggtggtgtctgtgaccccgaggcccctgagggggtgttaacagtgctcctttagttctgctgtctgctgatggctgtgtgttaacaagttggcctcttgccttgtcatgtggggtggctgccctccactggtgagggcaaagggctggtgtgacagtcttttttgggtacctgcactcagtgggtcctgagctcttgtctggcatccaagaagaatgaggttgagtggacacttgaaggatggtgaaggtgaagaattttattgagcagtgggaatggctcagtggagaggggagctggagaggggatgggaagggctgatctccctgaagtccggccgtttcttccctaagtcatgctgtctcctttcccaaagtttggccatcttctctccgaaattaagctgtttctctcctctctaccaactgaatctggggtctttataagcataggatcctctttataagcacaggatgggggcggggcaggctgtagaagttttggaaaaggcaacattctattggtaaagagacattattcaaacagaaccaatcgggagagagcggacaaacaggaatagaagttttcactttgggctgtgggtttcaggctttttggcttgaacgtggggtttcaccagggactgcccttgtcttcctagaatttctctgcctcctgcctctatcagtattagatcttctttaaatgtttggtagaattcagcagtgaagccatcaggtcccaggcttttatttactgggagaatttttattatggtgtcaatctcgttatttgttatagctgtgttcaggttgcagatttgttcatggttcaatcttggtagattgtgtctaggaatttgtccatttcttctaggttttccagttcattagcatatagtttttcatagtagccatgaatgaacctttttatttctgcagtattggttatcattgtaatgtctccattctcatctctggtttatatatttggatcttcttttttttttctttttttttttttactctggccaaaggtttttaaattttcttttaacttttacaaaaaccaacattttgttttattgatattttgtattattttctttatttcagtttcgtttgcttcactctgatctttattatttcttctaattttggggttggtttactcttgcttttcttattctttaagatgtgttgttaggttgtttatttgaagtatttcttcttttttcatgtaggcactcacagctataaacttcccttttagtaatgcttttgctgtatcccataggttttggtatgttgtgtttcagtatcatttgtttcaatgaattttccaattttcttcttaatttttgcattgacttactgatcattcaagaacatattgtttaatttacatgtatttgtatacttttcaaaatttctcattattgatttctagttttattccgttatcagaggagatgcttgatattatttcaatatttttaatgtcttaagacttgttttgttacttaacatatgttctatccttgagaataatccatgggctgaggagaagaatgtgtattctgcagcccttggatgaatttttctgtaaatatctattaggtccatttggcctctaatgcacattaagtctgatgcttcattgttggttttctttggaaggtctgtccaatgctgaaagtgggatattgaagtctccaagttttatcatattggggcctgtctctcccttttgctctaataatacttgctttatatatgtgagtgctccagtgttgggtgcatttatgtttaaaatggttacatcctcttgctgaattgactgctttatcattatatagtgaccctctttggcttttcctatagtttttgtcttgaaatctattttgtcttatattagtatagccacttctgcacttttttggtttccattggctttggaaaagatttctcgtaattctgtttgataaggacacatgttaggaggttttcaacacttcagtgagtagtaaacttgtaagtaaagcaggtatgaacagaatctcttgaattagtgaaaagtcaaaatcgttaattactgtttaatttaaaactgaaattataggtattaacaaataactatatgccttatactgtactttatttatttatttttccgagacggtcttgctctgttgcccaggctggagtgcggtgacgtgatcttggctcactgcagcctctgcctcccgggttcaagcaattttcatgcctcagcctaccgagtagctgggactacaggcatgcactggcacacccagctaagttttttgtatttttagtagagatgggatttcaccatgttgcccaggctggtctccaattcctgacctcaagtgatccacccaccttggcctcccaaagtgctgggattacaggcatgagccatcatgcccggccatataatgtactttaaacatgatgattttgaaactggaaacacacgcacatgtgagtaatttcttaaatggaattgaattaccttgaagaatcttagaaaaatgatgtttttaattttaaattagttttgcgtcatacatgtctttatttctcaaattttaaagaaaagtctatgaattaaagaaaataaaacttttcctgcatgaaagcaatgagtgtattatgtaccaaaaaggtagaagaaaaatatcttctgtaatattagctagatattacttactaaagatatttttggggtatatttattagcaatattttaatgcaattttaaacataattgtcatcatacttcatagacagtttatagcctgctatttttggttagcattgtagtatgagctattttccatattatttgaacttttaaaatttaatggttggtatgatattgtatgacttgtatgcatccttgtttacctagtctttattatacactttaattgattacagttttttttttttttttttgcttttgtgagcatctggcagataactttcttgagtaaagttattatgtagaaatattttctttgggccaggtgcggtggctcatgcctataatcccagcactttgggaggctgaggcaggtggaacatgaagtcaggagttcaagaccagcctggccaatatggtgaaaccccgtctatactaaaaatacaaaaatcagctgggcatggtggtgcatgcctgtagtcccaggtactcaggaggttgaggcaggagaattgcttgaacccgggaggtggagaggttgcagtgagccgagatcgaaccactgcactccagcctgggcgacagagcaagactccaactcaaaaaaaaaaaaagaaaagaaaagaaaagaaatactttcttactttctttgtatagataaagggagatagaattactagatcaaagtctcttgatggtttttgccaatttgttttgtaaatgtatgtatcaccacaggctatctatgagagtgtctatttcatggaaacttagcctacaatgaatagtcattttacccctaaatatttgataagttaaaaaatgctatcacatttaacatttcataggctttaagaagttgcagttttatattcatttcttcatgcattttgtgtactatttcaaaagtttctataggggaatgagagcaaagtaatgtgtttttcattatttattttgctaaccaaacatatttaattactaaccaaaaggatgatcctaattaagccaacacttggaattattttcatgtaaaatgtctgtgatagagataattgaatttaataatgaaaaaagtattacagaaatttgctcattaaactgagcttgttttcagctaatccttctgcgaagtgataatgactttttttttttttttttaaataaagatgggggctcgctatgttgaccaggctggtcttgaactcctggcctcaagtgatcctcccatctccgcctctcaaattgctaggaatacaggcatgagccaccacacttggtttaatagtggaatttttattacacttttttatggattcgaggagaggtggcattgtacataacacattctaccgctaattttccatctttcacttttctcattgtgctttccttcccattccgttcctggtgttgaaccaatgcatcatttgtaaatttgtagacagtctgagtttttctgccataatctgttgtttcttcagacttcttctctggtttataagaaaactgttgttttaaaactctcagttttgtattttttatttcttattatactttaagttctgggatatgtgagcagaacgtgcaagttttttacataagtatacatgtgccatggtggtttgctgcacccatcaacctatcatctccattgggtatttcttctaatgctatccctccccttgcccccaaccccccaacaggccccagtgtgatgttcccctccttgtgcccatatgttctcattgttcaactcccacttatgagtgagaacatgcagtgtttggttttctgttcctgtgttagtttgctgagagtgatggtttccagcttcatccatgtccctgcaaaatatatgaactgatcctttttttatggctgcatagtattccgtggtgtataggtgccacattttctttatccagtgtaccattgataggtatttgggttggttccaagtctttgctactgtgaatagtgctgcagtaaacatatgtgtgcatgtgtctttacagtagaatgatttataatcctttgggtatatacccagtaatgggattgctgggtcaaatggtatttctaattctagatcattgtggaatcgtcacactgtcttccacaatggttgaacgaatttatcctcccaccaacagtgtaaaagtgttcctatttctccacatcctctccagcatctgttgtttcctgacttcttaatgatcggcattctaattggcatgagatggtatctcattgtggttttgatttgcatttctctaatgaccagtgatgctgagctgtttttcatgtttgttggccatgtaaatgtcttctttggagaagtgtctattcatatcctatgcccactttttgatagggttatttgtttttttcttataaatttaagttctttgtagattctggatattagccctttgtcagatggataaaaaaacactatttttttaaaaaattttccaattcctcatcggtaaaaaagcagtaaaacattcatggtaatgatcatggcctatagttttttttttttttaagtgacattaggatttaaaactggtatgaaacctaatcatttattttagttagctaatatcaggatttagatttatttttttgacccaattgcagataggcagatcagatctcatagactgccatctgcctcaagctccttttgtagttatgtgaatgtgagcctgaaggctgaacccacttttctctaatggagatttttttttattacactttaagttctagggtacatgtgcacaacgtgcaggtttgttacatatgcatacatgtgccatgttggtgtgctgcacccattaactcgtcatttacattaggtatatctactaatgctatccctcccccctccccccaccccatgacaggccccggtgtgtgatgttccccttcctgtgtccaagtgttttcattgttgaattcccacctatgagtgagaacatgcggtgtttggttttttgtccttgcgatagtttgctgagaatgatggtttccagcttcatccatgtccctatataggacatgaactcatccttttttatggctgcatagtattccatggtgtgtatgtgccacattttcttaatccagtctgtcattgatggacatttgggttggttccaggtctttgctattgtgaatagtgctgcaataaacatacatgtgtgtgagtctttatagcagcatgattgataatcctttgggtatatacccagtaatggggtggctgggtcaaatggtatttctagttctagatccttgaggagtcaccacactgtcttccacaatggttgaactagtttacagtcccaccaacaatgtaaaagtgttcctatttctccacatcctctccagcatgtgttgtttcctgactttttaatgatcgccattctaactggcatgagatggtatctcattgtggttttgatttgcatttgtctgatgaccagtgatgatgagcatttttacatgtgtctttggctgcataaatgtcttcttttgagaagtgtctgttcatatcctttgcctactttttgatggggttgtttgatttttttcttgtaaatttgtttaagttctttgtagattctggatattagccctttgtcagatgagtagattgcaaaaattttctcccattctgtagtttgcctgttcactctgatggtagtttcttttgctgtgcagaagctcttgagtttaattagatcccatttgtcaattttggcttttgttgccattgcttttggtgttttagacatgaagtccttgcccatgcctatgtcctgaatggtattgcctaggttttcttctagggtttttatggttttaggtctgacgcttaagtctttaatccatcttgaattaatttttgtgtaaggtgtaaggaagggatccagtttcagctttctccatatggctagccagttttcccagcaccatttgttaaatagggaattctttccccattttttgtttttgtcaggtttgtcaaagatcaggtggttgtagatgtgtggtattatttctgagggctctgttttgttccattgttctatatctctgttttggtaccagtaccatgctgttttggttactgtagccttgtagtatagtttgaagtcaggtagcgtgatgcctccagctttgttctttttgcttaggattgttgtggcaatgcggtttaaccactctgaaaagatgtatttaaggacttttatctagactctatggtgaggtataacatagtgctggttgagtcagcttcaagtttttgtagagggaggaagagagtaacaaccatgtctggatttaataaaaagtttagcataagtaaatgtgtgctcttttgccttaagaaaatatttttcaatatataaaaaggattaatgagtgctgcctttcagatacttggtttggtgtgtttgaaacatcatttccaaagataggacatacacatttccagggatcatctctatgatatgactctagaaatgatgtagatttttaaaatcaatgtcagaacttatagacacaaatgtatgctttccttctaagtagtcactttgggagcccatatacataacagtggtgtcattcctgatgatatgttgggaactctcattttgtaaccagtttagaagtcatgcaagtaaataaatcttcaggattacttcagatttgggcaaaaaattagttttacccaacttgatcattttgcatttttcaccatatttgactctaagtgaaaactggctatttccaaaaatcatacccatcctgaggatgtgaagatatttttgggctgggcacggtagctcactcctgtaatcccagcagtttgggaggctgaggcagtagggttgtttgaggccagaatttgaagaccagcttggtcaacatagtgagactccctctctccaaaggaaaaaaaaaagtgaagttttttttttctttttcaaatgagtaggcagcattgtttagttatctgtttttttttcttttttttccactgttggacttctgtccattctctttatttgtttatttatttatttgagatggagttttgctctgttgtctaggccggagtgcagtggcgcgatcttggctcactgcagtctctccctcccggctcaagtgattctcctgcctcagcctcccaagtagctgggattacaggcatgcaccaccaggcccggctaattttgtgtttctaggggagacggggtttcaccatgttggccaggctggtctggaactcctgacctcaagtgatctgcctgtctagctcccaaagtgccggggttacaggtgtgagctaccgtgcctggcctgctgatcatactctcttgattttatttttgtactgtggtactgcggttgatggactgcactgatgttatccatatttttaaccttggtcacccacagtgtgaactcattaaatagctgactttgcaatttgattgctatgatttgggaatgagtgtggcagtcataattgtgcaggtttgctatcgtttcatttctagagaacttttctatggtgatctattgatgagataagatatagtatgacattatttattcctctttttgacttttggttctcaggaattttgggtgctgtgagttgacatgtagcatcatttcctcaggtctcattttctatctgagcacgattaaggacacagtgacctgatgataaatttttttgtacatctgactcttatctgaaagaatggttattggccaaatatggaaaccatacccacttggtacctttattctagaggcaaagtttgtttcaaaattttgtaaaacaaccctctccaccaaaagaaaacaaatacccacacaagatctctagttacggtgtctgttatatctcatttcttttccttccctaaatatactgagctattcttaactaaatacaggaaaattgtgcagaggaacacttactaagtgttcagtaaatgttttcatttttcttatgtgtatatctagaagtagaattgttgggtcattgagtaactgtttctgcgtaaatatctatacacgtgccatggtggtttgctgcacccatcaacccgtcatctacattacgtatttctcctaatgctatccctcccccaacccctaacaggccccagtgtgtgatgttcccctccctgtgtccatgtgttctcattgttcaactcccacttatgagtgagaacatgcagtatttggttttctgttcttgtgttagtttgctgagaatgatggtttccagctccatccatgtccctgcaaaggacataaacgcatccttttttatggctgcatagtattccatggggtatatgtgccacattttctttatccagtctatcactgatgggcatttgggttagttccaagtctttgctattgtgaatagtgctgcagtaaacatgtgtgcatgtgtctttatagtagaatgatttataatcctttgggtatatacccagtaatgggatggctgggtcaaatggtatttctagttctagatccttgaggaatcgccacactgtctgccacgatggttgaactaatttaccctcccatcaacagtgtaaaattgttcctatttctccacatcctctccagcatgtgttgttccctgactttttaatgttcgccattctaaccggcgtgaggtggtatctcattgtggtttttatttgcatttctctaatgaccagtgatgatgagttttttttcatatgtttgttggccacataaatgtcttcttttgagaaatgtctgttcatatcctttgcccactttttgttagggttgtttgcttttttcttgtaaatttgtttaagttctttgtagattctggatattagccctttgtcagatggatagatcacaaaaaagttctcccattctgtaggttgcctgttcactctgatgagatatatatatatattttttttttgctgtgcagaaggtctttagtttagttagatcccatttgtcaattttggcttttgttgtcattgcttttggtgttttagtcatgaagtctttgcccatgcctatgtcctgaatggtggtttgcctaggttttcttctagggtttttatggttttaggtcttatgtttaagtctttaatccatcttgagttaatttttatataatgtgtaaggaaggagtccagcttcagttttctgcatatggctagccagttttccaaacaccatttattaaatagggagtcctttctccattgcttgtttttgtcaggtttgtcaaagatcagatggttgtagatatgtggtgttatttctgaggcctcggttctgttccattgttctatatctctgttttggtaccagtaccatgctgttttggttactgtagccttgtagtatagtttgaagtcaggtagcatgatgcctccagctttgttctgtttgcttaggattgtcgtggccctgtggggtattttttggttccatatgaaatttaaagtagcttttttttccaattctgtgaagaaagtcagtggtagcttgatggggatagcattgaatgtatacattactttgggcagtatggccattttcatgatattgattcttcctatccatgagcatggaatgtttttccatttatttgagtcctctcttatttccttgagcagtggtttgtagttctccttgaagaggtccttcacatcccttgtaagttgtattcctaggtattttattgtctttgtagcagttgttaataggaattcactcatgatttggctctctatctgttattgttgtataagaatgcttgtgatttttgcacattgattttgtatcctgagacttcgctgaagttgcttgtcagcttaaggagattttgggctgagatggtggggttttctaaatatgcaatcatttcatctgcagacagagaatttgacttcctcttttccggattgaataccctttatttctttctgttgcctaaatgccctggccagaacttacaatactgtgttgaataggagtggtgagagtgggcatccttgtcttgtaccgggtttcaaagggaatgcttccagtttttgcccattcagtatgatgttggctgtggttttgtcataaatagctcttattattttgagatacgtttcatcggtacccagtttattgagagtttttagcgtgaaggagtgttgaattttattgaagtccttttctgcatctattgagataatcatgtggtttttgtcattggttctgtttatgtgatggattatgtttattgatttgcgtatgttgaaccagctgtgtatcacagggatgaagccgacttgatcgtggtggataagctttttgatgtgctgctggattcggcttgccagtattttattgaggatttttgcatcgatgttcatcagggatattggcctgaaattttctttatttgttgtgtctctgccaggttttggtatcaggatgatgctggcctcataaaatgagttagggaggattccctcgttttctattttttggaatagtttcagaaggaatggtaccagctcctctttgtacctctggtagaattcagctttgaatctgtctggtcctggacttattttgatcggtaggctattagttactgcctcaacttcagaactttttattggtttattcagggattcgacttcttccttgtttagtcttcggagggtgtatgtgtccaggcatttatccatttcctctagattttctagtttgtttgcatagaggtgcttatagtattctctgatggtagtttgtatttttgtgggatcagtggtgatatcccctttatcattttttattgcatctatttgattcttctctcttttgttctttattagtccggatagtggtctgttttgttgatcttctcaaaaaaacacctcctgaattcactgatagtttgaagggtttttcctgtctctatctctttgagttcttctctgatcttagttatttcttgtcttctcctagcttttgaagttgtttgctcttccttctctagttgttttaattatgatgttagggtgttgactttagatatttcctgctttctcttgtgggcatttagtgctataaatttccctgtacacactgctttaaatttgtcccagaaattctggtatgttgtctctttgttctcattggtttcaaagaacttctttatttctgccttaatttctttgtttacctagtagtcattcaggggcaggttgttcagtttccatgtagttgtgcggttttgaatgagtttcttaatcctgagttctaatttgattgcattatagtctgagagactgttatgatttccgttctttttcatttgcttaggagtgttttacttctaattatatggtcagttttagaataagcacgatgaggtgctgagaagaatgtatattctgttgctttggggtcaagagttctgtagatgtctgttaggtctgcttggtccagagctgagttcaagtgttgtatatccttgttaattttccgtcttgtcggtctgtctaatattgacagtgggttattaaaatctcccactattattgtgtgagagtctaagtctctttgtaggtctctaagaacttgctttatgttctgggtgctcccgtattgggtacatatatatttaggatagttagctcttctcgttgctttgatccctttaccattatgtaacacccttctttgtctgttttgatctttgttggtttaaagtctgttttatcagagactaggattgcagcccctggttttttttgctttccatttgcttggtaaatgtttctccatccctttattttgaacctatgtatgtctttaatttgtttttaaaattattatatccatcctacttagtataaattggtttcttgttgtggttttgatttgcatttccctgatatgactaatgatcttgagcattttttcatgtgcttattggccattggtatatattcttttgagaagtgtatatctaagtcttttccccatttaaaaaatagggttgtctttttgttgtttaattgtaagaagtctttatgtattctggttaccagaccctcatgagatacaggatttgaaaatcgttttctctcattgtgtttgctgtgttttcactttcttgatggtgccctttgacatgcaaaagttttgacttttattaaaaatggggctgggcatggtggctcacacttgtcatcccagtgctttgggaggctgaggtggaggatttcttgaggccaggagtttcagaccatcctgggcaacataactggaccccatctctacaaaaaattaaagaaaaaatttagctaagagtatagttgtgtgctgcacttcctcaactaagaacataggtgtgtgccacaggtactcaagatgctgaggcgggaggattgctttagcccaagagttttgagacctcagtgagtcaaggtcacgccactgtgctcaagcctgtgtgacagagcaagaggctaactctaaggaaaaaaaatggggtaaacttatactttccttatttaaagttttaactccttaaaaccctgttgaattacagatacatctattatataacttaagagttgatgctataggctgggcacagtggctcacgcctgtaatcccagcactttgggaggccgagatgggtggatcacgaggtcaggagatagagaccatcctggctaacacggtgaaacctcgtctctgctaaaaatacaaaaaaattagccgggcgtggtggcgggcgcctgtagtcccagctacttgggaggctgaggccggagaatggtgtgaacccgggaggcagagcttgcagtgagccaagatcacgccactgcactccagcctgggtgacagagcaagactccgtcttttaaaaaaaaaaaaaaaaaaaaagagttgatgctataaaacttagttaatgaaatatttccctgggcgatggagctcttgcaagtcctgttgtattttttgttcatctttatgccagtcagttagacagttcttctatgtcaagcagaggatggaataataaaccaaaacactgcttagggctttcagagagtaagtgttcagtaaatatattcgataaattactgaattatttttttaaatgatggaaaggaaaatcttgccctctctttttctgggtgttggctagtataaatctttcttgaagtgataatctacatctatgttttgatttctaaggatttcccaaatataagctatatataagtgagaggaaataataacttaggtgcctaatgataatatgacaagataagtacaagggtcagctatttgttgtgaaatagcaatggatataatttaaatatgaatacctttttgctgtttaatcccccaaattttcttttgatttcttttaaaattcttttgtggtaggtaggtttattgtttcttaagaattaacttaagggtagtattttctgatacatttttaagtaacatgaagtttaacttctgtttaaacacatcatatagagtacattgaaagacctcagtattttcgaaatgtttagtaagtaatatcagcagtttccttaaatgatattttaatcctaggtaagtgtacaggtaggttgtgttactcatatttttatattcttagtgaaatagaattcttttttttttttttttttgagacagggtctgactgttgccttggctagagtgcagtggcatgatcttggctcactgcaacctctgcctcacaaggctcaagccatcctcccacctcagcctcctgagtagctgagaccacaggcatgagccacccatgctctattatgagccaccacacctggcctaaaattcgttttctttaatattttttctttctacacccacaactgtaacatttcccttagtttttactttgaatgtgcatactcttacacgacttacagtatggctatattttcagtttgctagagctttacaattaatttaaaacatgaaaggctaattaagggaattctttaaattttgttttaatagtgaaagcaagttgaatacattggtgcagaagcttcatgacttccttgcacactcatcagaagaatctgaagaaacaagttctcctccacgacttgcaatgaatcaaaacacaggtaaattgaaaaagaatgtgctataccttctagtcttttttctattttttttttacacttatggaggtaaccatttattttattcagagagcagcttttaaaagagatttcagtttgtggaaaatgacagattagcaagctttatagaagcccctattatgtatcttagctatatctgatacaggagattttaattttggtaagtatgactatagaaagcttagaaaaggaagcatttatggttttatatgtaatggaaatgtgttatagaatggctagtgaatgttgactgtgaaaaaatagtattagaagaggcaggagtagtataggaatgttttgtcctagcaatcattcatgtattaggagttaaatttttatttttatttttgtgatggagtctcgctctgtcacccagtctggagttcaatggcatgatcttggctcactgcaacttccgcctcttgggctcaagctattctgctgcctcagcctcctgagtagctgggatcacaggcgtctgccaccatgtttggctaattttggtatttttagtagagactgggtttcaccctgttggccaagctggtctggaactcaagtgatctgccctcgttggcctcccgaagtgctaggataacaggcatgagccatcacacccaacataagagttaaatttttatgttgtttgataatatccctgagtagatttggtgtatttattttttaaaataaaaccacttaacacctcctctctacctccctgtctctctcttttaaaaagatatatatatatatatatatatatatttttttttttttttttttttttaaagagacgaggtcttgctttgtcacccagactggagtgtagtggtgtaatcatagctcactgcagcctcagacttcttgggcttaagcaatcttctcacctcaccctcccggtagctgggattacaggtgtgtgccaccatgcctggttaatttcaaaaaaaaaaaaaaaaaaaaaaaaaaaaaaaaaaatttttagagacatggtcttgctatgttgtccagactggtcttggacttcctggcctcaaatgattctcctgcctcagcctcctgagtagctgaaattataagcatgagccattgtacctggttcccttttttaaaaaacattttgtatcatgtgacagttagcattttcaggttttcaagggtaactacaatacacatgcacacagacacacacaatatgtacaaaaaaagtataagagagttatagtgaaaagttcaaccatatgtgtaattagagttctagaaggaataaagagacttggttaaaagtcctatttggagagatacgggctgagcattttttaaaaagtgatgaaaaacatcagactagagattcaagaagttttgtgaaccctgaacaggataaatataaagaaaactacagctaggcatgtcataaccaaactcctaaagaacataaaccgagagaaaaatatcttaagtagccagaggaaaaaaatacattattttcaaaggaataacagtaacactggcagctcacttaacaacagaaatgatagaaggcagatgacaatgaaattatttctttaaaatgtcaaagaaaagtgcagtcatgcatcacttaactatgggataggtttttttgagaaagcattgttgggtgattttgtcattgtgcaaacattatggagtgtccttacataggctactacacacctaggctatatgttatagcctgttgctcataggctacaaacctgtgcagcgtgttcttgtactgaatacggtaggtaatcggaacacaatggtaaatatttgtgtgtctaaacacatggaaacatagaaaaggtacagtaaaaatacagtattataatcttatgggaccaccgatgtatatgtggtcagtcattgagtgaaatgtctttatgcagcatgtgattgtaattgccagcatagaactgtatattcagtgaaaacatccttcataaatgaagggtggaataaggccatatctgggcaaacaaaaagtgagaacttgatgtcaacagacctacactggagtgaataactacactagaggaaattacaagttttctgaaatgagaaagaaaataatttgaaatggcaacaccaaaatacaggaagtaatgaataagaatgggaaagctaaataggtaggtaaactaaataacataaagttatttaagccacagtccctattcttatttcatcaattaccccagtagtgttcacagataagtttttcccccttaaattcaggatccagttcaagatttagtagtcctgtttctttggttttttaaaaatctgaagcagtttgtctgccttttgggactatgactttttttgaaatgtacaggtgtgttactttgtgaaatggccctcaggattatctgtttagttatggttagattcaggttatacatttttggcaggaatactacataaagtggtgttctgttctccatgcatcctgttacatggcacatgatgtgatttgcccctttactggtgatgttaacttaggttgtttggttatggttgtgtttgctaggtaaacccagtctaaagttatgatttattccattgtaactaataactaatttaatggggggcactttgagattactaaggtattctttttattatcaaaacttaatatgttttcttttgcaaatgaccacaaagtttgcagcttaaaacaacccaaatttgttattttacagttctgtaggttcggagtccggtgggccttgctggacccttctcgggctatcacaaggtcaaagtcaagatgttagtaggactaggttcctttctggagactgtagaaaaatccattcctaagctcattcaggttgttggcagaattcagttctttatgataatcggttagaggtccttctttctcactcactattggccaagaccccctcctagttcttttcaggtgtcttcatttcttctcacgtgatgccctccatcttcaaatccagcaacagcacatcaagtctctctcaagctttgaagctctctgacctagctttttgcttgctaattctgctgccacctgctaccagctggagacatttttctgtttttaaggattcatgtgattagattaggtccctctccctctcatctcctcctgattatctcttgagtttaagatcaactgtgccatattacataacacagttatgggagtgatatgtcatcacattgataatttctggggatttgcggtgtagaatcttgtgggccattcctagaaggtctgtttatcacagcatacatttgtgattcttagctgaataatttattcctatgatgggttcaaaatggtgatgttctaacttgtctttccttctatgtttattagttgatattttattgtaagggaggggttcatgttctaacctattcaattatttgtatcagtatatacttacaattttttccatgaatattctctgtcattatttattttgatcctgaaattgtatcagttttggctagtaggagcctcacctggatggctcctgctgacctttttacaaatccgcatcatttcttgaacactttctttctgtcccttcaaagtattcaaggcttgctttccattctctgttccccagccctacaatcagttattttttgcaagagttctgattccttttagtgggatatagtgtttagaaatcaagatcagggtgtgtgatgtgctcattgccaccaagatgtctttgtttccaagctctttcacagagaaagccaataatatgttttatattttcatgagttgatactgatacttttaattcaattccagtcttctttctagacttccccttttcatgtttttaacttctttctccaacagaaagaaacctggttcctattatccccaatttatttatttttatttatttattctttttgagatggagtctcactctgttgccaggctggagttcagtggcgtgatctcagatcactgcaacctttgcctcccaggttcaagcgattctcctgcctcagcctaccaagtagctgagactacagtcatgcgccaccatacccagctaatttttgtatttttagtagagacagggtttcaccatgttggccaggatggtcttgatctcttgacttcatgatccgcctgcctcgacctcccaaagtgctgggattacaagtgtgagccactgtgcccagcctatccccagtttatttatttatttttatttttatttttttgagatggagtctcgctgtgtcacacaggctggagtgcagtggcgccatctcagctcactgcaacctccgcctcctgggttcaagcgattctcctgtctcagcctcttaagtagctggaactacaggtgcacaccaccgtgcccagctaatttttgtatttttagtggagacggcgttttgccatctctggatggcaggctggtctggaactcctgaccttaggtgatccacctgcctcagcctcccaaagtgctctgattacaggcgtgagccaccaagcccggcctttccccagtttatttgtattcatttttctagtcctcattgtacccacagtttcagagttgttaaccatatcatcgcattaaagaaacgtaactatagttcagtatttctttaaagttctttttgtctttagaatgatgttacgttgtcggagtcctgtgttcactagttgaggaactccttcagtagtggtatctccagttggacaaacagatgtcactcacaaataccaattgtaaattctgggcagcatactgaaggctagatatcaacaaagtagataaactggaggggagtcaacacatggaagaagaagtggcaatggctgaattccccattgttaatcctttttgcttcagccaaggatcctcttagctccatctgtggcctttaagacttggataaaaatctacagtcttattggatgtgaaatcaaggaaaaaatttagggagaccacagcagctgtaacatgagtagagagatcccatctagaaaagagccacagaatgggaaaaccagattgcacgaaaactctcccaatagctctggtcctgttgcctaagtgcactccagattccaaccagcctggttaggactaaaagaacagaacaaaagctttgagttgtttggtactacagggtggaaagggtttggagtttcatttcaagtaagttaactatctgtttgtttggttggttggttttttttgagacaggttctttttctgttgcctaggctggtgtgcagtgatgccatctcagctcacagcaacttccacctcccgggttcaagtgattcttgtgcctcagctttctgaatagctgggattacaggcacctgccaccacgcccagctaatttttgtatttttagtagaggcagtgtttcaccatgttggccaggctggtcttgaactcatgacttcaggttatctgcctgcctcggcttcccaaagtgctgggattacaggcgtgagccaccacacccagcccagttgactttttatgttggccttgtatcctgtgaacttgcttaacgtacttattagttctaaatagtatttttccccctcttgtagattctttgggattttctacttagacagttatatcacctgcaaatagggatagttttattttttcctttccatctgtataccttttaatttcttttcttgcttcattatattagctaggattttctgtattttccagtattacattgaagaatgatgatgatagcagacatcctcttagtgttaccaattttagtgggaaaacattcagtctttcacagtgaaggatgtttgctttataggtttcttgtaaatgccctttatcaagttgaggaagttcccctctattcctagtttgctgagaatttttttaagcttaaatttctatttgatttctatttgtaattataaattcacatgcagttgtaataactaatatagagagagctcttatgcactttggcagtttccctcaatggtaacatataaaactagaatacaatatcacaaccaggaaattgacattgataaaatctattaatcaagattttgtcagttttactttgtgtgtgtgtgtgtgtgtgtgtgtgtgtgttaaagttctatacattttttttttacctgggttgattcatgcatctaccaccacagttgagatacagaatagttcatcaacacaggattcctcatcttggcattttataatcacacccacttccctccgcctacctctgcctatgcttaacacctggcaaccactaatctgtcttccattttgaaaattttgtcatttcaaatatgttaaataaatggagtttatagtaaataatcttttggggttggagtgttttcacttggcataattctgtggagattcattgaggttgttgtatgtatcaacaatcctttccttttaattgcagggtaatattccatggtatggatgtacagattgagtatccttaaccccagaatcagaaatctgaaatgttccaagatcggaaacttttgagtgctgacatgacactcaaaggaaatgctcattggaacatttgggattttcagattagggatgctgaatccctaatgtgaataaaccagaatagtgcaaatatgctagaatctgaaaaaatccaaaatttgaaacacttctggtcccatgcattttggataaggaatacgcaacctgtaccacagttgtatttgtattgttttttttttttttttattgaaatggagtcttgttttgtcacccaggctagagggcagtggcatgatcttgactcactgcaacctccgcctcccaggttcaagtgattctcctgcttcagcctccggagtagctgggattacaggcaagcgccaccacacccggctaatttttgtatttatagtagagacgaggtttcaccatgttggccaggctggtctcgaactcctgacctcaggtgatccacccacctcggcctcccaaagtgctgggattacaggtgtgagccaccgcgcctggcctgtaccacagtttgtttaaccatttatttgttaaagcaaatctgggccgattcctgatttcagttgttacaattaaagctggtggtgaatatttatatatacgtttttatatgaatttatgttttcatttctttgcaataaatgccaggagtgcattttgcagttcatatgatggttacacatttatttttattaaattaattaaactacatttacattttattttattttgggtagagacagagcctcactgtgttggccaggcttgttatgaactcctgacctcaggtaatcctcctgccttgtcctctggaggcccttggattacagacatgaatcactgcacctggtttgcattttttttttttttttactccattggactctatcagtgcttttatttatttattggtatttatttatttatttattttaacttttaggttcagtggtacctgtgaaggtttgtcacataggtaaggtagcatcactggggtttattgtttagattatttcatcacttaggtattaagcccagtacctaatagttatcttgtctactcttacatgttcatttttttaaaagaaactcctgaactgttatccagagtggttgtactgttttatattcccacagcaatgtatgagtgatccagtttctccacatccttgccaacactgggtgttaatactatttttaaattttagccatttgatatttatggtatctcattgtggttttaatttgcatttacttaatgagtaataaattctttttaaatagaaacaggatattgctctgttgcccaggctggagtgcagtggtgcaattatagctcactgcagcctcaaactcctaggctcaagtgatcctcctgcctcagcctctcgagtagctgagactgcctcagcctgtcgagtagccaagactacaggcacatgccaccatacccagctaattttttaatgttctgtagagacggggtctggctctgttgcccatgctggtctcagactcctggcctcaagcgatcttcccaccatggcctcccaaagtatttagattacaggcatcagccactgcatctggctggtaataaaacattaaacatctttattgaaatataatttacatgccatacaattaacccatttaaagtataaaattcagtggtttttagtatattgaatatttacacatatgtacaaccatcaccaccatcaattttaaaatatttttatcacctcaaaaagaaactccataccctttagctatcaccccctagctctaagaaatcactaatctagtttcttgttttgagttttttatttttatttttatttttattttttttttgagacagagtctcgttctgttgcccaggctggagtgcagtggctattttggcttactgcaacctctgcctcccaggttcaaatgatttttgtgccttggcctcccaagtagctgggattataggcgtgcgccaccacacctggctaatttttgtattttttagtagagacagggttttgccatgttggccgggctggtctcaaactcctggcctcaagtcatctgcccacctcaggttcccaaagtcctgggattgcaggcgtgagccactgcgcctggcctatttccctattttggactttcatatgaatggcatcatataatacgtgtttttgtggctgatttctttcatttagcgtaatgtattcaagatatctgttgtaacatgtcttagtactccattcctttttatggccacataatattccattatatgtgtataccatatttgtttatccatttatccattgatggacatttgtcttgttcccatgttttggctgttaggaataatgcggctgtaaatattggtgtacagttttttgtgtgtagccatatatttttgtttatcttgtgtatatacctaggaatctaattgctggatttatatggtaactatgttaaattgtttgaggaaatgtcaaactgttttccaaagtagagatactattttacttttccaccaggagtatataaagattgtgagttcttcacgtccatgccaaccattgttaataacagactttttgattctagccattctagtgcatgtgaagtagtatctcattgtgattttagttttcaactgcctgaagggtaatgatgttgaacatcatttcatgtgcttatttgtagtttgtatatattccttggagaaacttctattcaaaccctctgtccagtctttttctttttgacagggtcctgctctgtttcccaggctggagtgcagtggcatgatctcagctcacagcaccctcaacctccctggctcaaatgatcttcccacctcagcctcccgagtagctaagactatgggtgtgtgccacagtgcccagctaatttttgtttattttttatagagatggggtcttaatttgttgaccaagctggtcttgaactcttgtgcttaagcaattcacccgcctcggcctcccaaagtgctgggattacaggcgtgagccaccgtgcccagcccctttgcccatttttaaaatgggtatttatgctttcattgttgatttgtaagaattctttatatattctaaattttttattgtaaaatatgcataacataaaaattgccattttaactaattttaaatgtacagtcctgtaacgttaagtaaaattgttgtgcattcaccaccaccatccatgtctagtactttttcatcttccccaagtgaaactctgtacccatcacatactaactccccaatcttccctctccttagccttgcaaacaccattctacattctcttcctaggaatttgactactctaggaacttcatatacgtataatcctacaatatttgtccttctgacatattttacttagcacaatgtgttgaaggttatccatgttgtagtatatctcaaaatttcatttcttttgaagtctgaataccattccattgtatgtatataccacattttgtttatctattcatatttcaatggacacttggataagatatataatttggaaatattttcccctattctttgagttgtctttatttatttttagagacagggttttgctctgttgctcaggctggggtgcagtggcaagatcatagttcactgcagccttgaactcctgggtacaagcaatccttccatctcagcctcccaagtagatgagactatagttgtgtgccaccatgtctggctagtatttttttttttttattttttagagatgaggtcttaccatgtagcccaggctgagcttgaactcctggcctcaggcgatccaccttggcctcacaagtagctgggattacaggcgtgagacactgcacccagttgggttgtctttaattgaagcacaagttactaattttgatgaacttttatttatctgtttttccttttgttgctcattcttttggtgtctttaagaatccattaccaaattgaaggtaatgaagatttacccccatgttttcttctaaaagttttatagatttagttcttaaatttaggtctttgatctactttgagttaatgttttgtatatgttgcgaagtaggggtccagcttcattttttgtaggtttctaaccagttgtctcagcaccatttattgaaagacaattctttcttcattgaatggtcttgccacccttgtcagaaatcagtgggactgttgggcatggtggctcatgtctgtaatcccagcactttgggaggccgaggtgggaggggtactcgggcccaggagttccagaccagcctggacaacacagtgagactccatctctattaaaaaaaaaaaaagccaggcgtagtggtgtgtgcctgtagtcccagctacttaggaggctgaggcagaaggatcacttgagcccaggagactgaggctgcagtgagccatgattgtaccactgcaccctagcctgggtgacagagtgagatcctgtctccaaaaaaaaaattaaaaaaaaaatcagctggtcatagatatatgggtttatttctggactcttaattctgtttgtccttttaccagtactccacggtcttgattgcattgttttacagttttgtgcaaagttgcaccaaagttgttgtgtagttttgcaaaactggcaatcaagtctgtgcagtactggcaaaattaggaagtgtgagtcttcatacttttcatttttcaaaattatctgcctattctgaatgttttcaattccctatgaattttaactctttgttttttcttggtagagatgaggtttcactatgtttctgaggctgttcttaaacttctgtcctcaagtgatccttccaccttggcctcccaaagtgctgggattataggtctgagccaccatgcctggtccatatgaattttggaatgagcttgtcaatttttacaaagaagtcagctgggattctgacagagattgcagcgtgtctgtagattagtttgtggagtattggtgatggcagcggtgggccgtctggagtggctgctgccatcacactggctgcagcagggagacgtggccagggctgcacggtctatagagttggtgggagccaggggcaagcaggagccctgccccttccaagttggagctccctgggtcctgctgcagctgcctaagcatggctgtagacctgggcatccctgtgctcttgagtcttgggagcaggctggagccccaccctcccaggtgcaactgcagctggccaaaccgtggctgcagtcccaggcctctcattccatggagcaggcaggagacccaccctcccgggtgcagctgcagtctcccaaactgcggctacagaaccttgccttctgctccacgagcaggcaggagccctgggtgcagcaggagccccgggtgcagccgcagccacccaaaccatggctgcagatctggtcctcctgctttatggagcaggctggagtcccaccctcctgggcacagctatagctgcccaaattgtgggtatagacctgggcctcctgctttatggggcaggcaggagccctgccccactgggtgcagctgcagccacccaaatcatgggggggctgcagacccaggtgtctctgcactcttggggcctgggaaggccccccttgctctcataggcttgggagtgcctgctcctgctgcctggcttcaccctgctattggcacctgctctgatcttgtggcaaagttggggccgagcctgggtgctgtcgtagcctggccaggtatccacatgcttggggaactgctgacatgccagccttctgctgccttgaccccctctggactttgggtactgacaaacatagggaagctgaggcagggctgagggcagttcagcactggcctgcaggtgcccccttgcatctacagcctgggcaccatgaatggcagcaggaggtagacaggttcctcagtggaaggtggcaggtccctggtgaggacccaccttcaggccagggaaagcctgaaggctggaggttgggctgccagttgcatggatcagagtgggaacttgtggtgccttttctgggcctgcctgtggaccaattggcatgcacatcctcccctctgaggcccataaaaaccccaggctcagccagagctgaacagatgtcaggatgaccagctgcagagaggagcaacccactctagggcctcctctctgctgtgagctgcagaggtgacaagatgaccttcctgcaaagaggtgccacacattctagggcctcctctttgctgagagctgcagagacgatgggtcgactttcctgcagagaggtactactcatactagggcctcctctctactgagagctgcagagacgaaggagagatgatggggagatgatgggatgacctgcctgcaaagagaagccacccactctcaggcctcctctctcctgagagctgtgcagatgacgggataatcagctgctgagaggagctaccctctctgctgatagctgaacacttgtagtaacgacttgcctagcagagaagaaccaccctctctgctaggagctgaacacttgtagtaatgacttgcctagcagagaagaaccaccctctctgctaggagctgaacacttgttgggataccttgactgtggaaaggagctgccccctttgggtttcctctgagctgttctattgctcaataaagcccctctttatcttgcttactctccacttttctatgcacctcattcttcttgggtgcaggacaagaacttgggacctgccagatgaggctaaaatagctgtaacacaaacagggctgagacatgccccttgctcaccttgttgcaggtgaagagaaggaaagaagagctgcagccctctggggagcccagacctgggagctccccaagccagggctgtgactccctctttggggccctgcctgcggttcctggtgtctccaaacttctgggtgccaccgtgttccctggtgccagctgtggatgctgcttgtggtgttcatggtccagctgcagcctcacagagaaagagctgatgcccatgctggcacctggagctgcgtgccctgctgcagctgccaggatgtctgattgcgcagtgaccggaccccacacttgctcacataccccttgctgcttcatccagtcttccttggctatcataggacacaggccagtagcatgagccgagtgtagccggccaggccaaataggcgggacaagcccagcaggcctgagcaaaactctggcacaggtgccaccagccgcagatgtttctggccagaaaagtgacaccccaaagattctgtaacactggcatcataagaatgataaatcttatggcttggcctggtggctgaaggaattgtgtactttaaatgggtaaattatatggtgtgtaaattgtatctcaaggatgtttaatgttttatcactggcgaggtgcggtgacttatgcctgtaattccagcactttgggaggctgaggtgggaggattacttgaggacaggaatttgagaccagcctgggaaacatagccagaacccatctctacaaaacatttaaaaatcagccaggcatggtggcatgtgcctgtagtgccagctaatcaggatactgaggcaggaggatcacttgagcccaggaatttgaggcggcagtgagctataattgcaccactgcactccagcctgggcaatagggtgagactctgtccctagtaaaaaaaaaatgttatcttctaattcatgaacatgaagtgtttttccattgatttaggtctttaatttctttcaatagcgttttataattttcagagtatgttttgtacttctttttttttcaaattatttccttctaattctgttataaatggaattcttttcttaatttcattttgagattattcattgcaagtgtatagacataacattgatttttgtttattgtccttgtacccatcaatcttcctgaactaattttattcccatagttcttttattattattattattattttttgagatagtcttgctctgttccccaggctggggtgcagtggtgcgatcttggctcactgcaacctctgcctcccaggttcaagcaattctcttgcctcggcttaccgagtagctgggattacaggcacctgccaccacgcccagctaatttttgtatttttagtagagacagggttttgccatgttggccaggctggtcttgaactcctgacctctggtgatccgcctgcctcggcctcccaaagttttgggattacaggcgtgagccactgcgcccagcctattccaataattctttagtggattccttaggatcttctatgtatgagataatgtcacattctaataaggatagttttattttttatttttttttgagacagagtctcgctttgttgaccagggtggagtgcagtggcatgacctcagctcactgcaacctctaccccctgggttcaagtgactttcctacctcagcatccctaggagctgggattacagggatgcgccaccacacccggcaaatttctgtacttttagtagagatggggttttgccatgttggctaggctggtcttgaactccggacctcgggtgatccacccgcctcagcctcccaaagtgctgggattacaggcatcagccaccgcgcctggccctctaataggaatagtttcataccttcattttaaatactgatgactttcaatttttttttttaacatgcatgctctgagtagaatccgtagtgcaaagttgaatagaaatggtgagagcagatttccttgccttgttcctgatcttaagggtttcggaaagcattcagtctgtcgccattaagtatgatattacctacctgtgggtttttgtagattttaaaatttcctttcttccttaatttattagaaaaaagatttttttttttttttgagacggagttttgctcttgttgcccaggctggagtgcaatggcacaatctcggctcactgcagcctccacctcctggattcaagtgattttcctgtctcagcctcccgagtagctaggattgcaggtgcatgccaccacgcccagctaatttttgtatttttagtagcaacagggtttcatcatattggtcaagctggtctcgaactcctgacctcaggtgatctgcccacctcagcctcccaaagtgctaggattacaggtgtgagccaccacacctggccagaaaaaaaagatatttttaaagagctgttttaggttcatagcaaaattgagcaaaaagtacagtgagttcccatatgtccctgcttccacacatgcacagcatctcccactatcagcattccgtaagagagttgtacatttgttatataacgttgatgaacctacattgacatgtcattattaccccaaatgcatagtttatgttaaggttcactcttggtgttatacattttaaagatttttgacaaatatataatgacctgcattcaccattgtggtatcatacagaatagtttcactgccctaaaaagattcctgtgctgtgcctgtttcttcatccctttctcccctgtgagcactggcagccactgatctttttactttctccatagttttgcctttttcagattgtcatagttgtaatcatatgtatgtaacctttccagactggcttctttcacatagtaatctgcatttgtttcctccatgtctctttgtagcttgatagctaatttatttctagtgctgaataatattccattgtctggatgtactacagtttgtttatccattcatcttctaaaggacatcttggttgcttctaagttttggcagttatgaataaagctgcttataaagatatttatataagtaaatgaagatgtttacataaaataaagacatttataaatatctccatgcaggttattttgtggatgtatgttttcagcttctttggataaataccaaggagtgtgattgctgctttatatatggtatgcttagttttgtaagaaattgctgaactgttttcctgagtggctgtatcattttgcattcccaccagcaataaatgatagtttcttttgctccatatgcttctcagcagttttgatgtagtcagtgttctggattttggctattctaataggcatgcaggggtatattgttttaatttgcaattccctaatgacatgttgagcattttttcatgtgcttatttgcgtctgtatatcttttttggtgaggtgtctgttcacatatttctttttttttccttgctttaaaatcatgttgtttgttttattgttgagttttaagcattctttgtatagtttggataattgtcttttatcagatgtgtactttgtgaagattttctcccagtctctagcctgtcttctgatttgaagttttctaatatttttgtggacttttgcatctatattcataagtgatacttgcctgtagttttctctatttgtgatatattttttatatcagggcaatactgttttcataaaatgagttgggaaatgttgcctccttttctgttttttagaagagtttgtgaaggattggtattagtccttttttaaatgtttgttataattaagtggtgagaacatttgggccttttctttatgggtagctttttttattgctaatttaatctcatcaattgttacaggtctgttcacacctgtttcttcttgagtcagttttagtagtttgtgttttggaatttgttcatttcatgtaagttatttagttttttggcacacagttgttcatagtattcctttataatccgtttatttcagtaagattagtagtaatgtcctctttttcatttctgattctagtaacttgagtcttgtttcttttttttcttggtcagtctaccctaaagtttgttcatcttttcttcccccacaggtaagttgttacacaatccctagcagattccaactttcatggccaaggtcctctttgatcatctttttaaaaaattagtttttggccaggtgcctgtggctcacgcctgcaatctcagcactttgggaggccaaggtgggcagaccacttgaacccaggagttagagaccaggctgggcaacatgacaaaaccccatctccacaaaaaattagccaggtgtggtggtgcgcgcctgtagtcccagctacctgggaggcttagaggggaggatcacctgaacccgggaggttgaggctaaagtgaaccatgatagcacctctgcactccagtatggacaatggagtgagaccctatctctaaaaaaaaaggaggaaaaggaaaagaactactctttggttttattgattttttttttctattgcttttctatttcctatttcattagtttcatgaatttctgccataatctttattatttccttctccttgattttggtttagtttgctcttattttcccagtattttatggtaaaatgaaatatactttattggtagtatgttttttatttttagtgtaatagtttaaattttcttctgctgggaaatgtcttgcaatatttataaactacaacaggaaatgtttttataccaaagtaatctttacagagatttcatgctttataaggaggggttagtatgcaaaaggagagtgattctagtgaaagaacacttctaggaatattttaatgtgagtagtatgttaacaatactgccagacttcatagtgtgagaatgggtttgtggagttataggtattgatgttctgtttgataatgcatcgaagagataaataatgttctttatttcttcttttttagataaaatcagtggttctggaagtaactctgatatgatggaaaacagcaaggaagaggtaaggataattatttagagatatttgttagttacgattaaccaagtagagcatatgtctttagattgcttctggacacatgtatgtgtcgaaggctactgatacccagttgtcattatacttcagtttcgttgttttccagtttgagaacaggtgttcattgtttctgttattgttgtggttcacttcagtggtttacctaaagtcagacaactgaagacttccaacagatagatattaaactgtctttatattgccccaaaggtgtttgaggtggatgttaagggcatgaactccatggttgtgaaatctctcaaaacttggtatctagagtctgctaagcattattatagcaactcataacaaggtcctttgcctgatacacaggtccacaactgtggttttgggaattttttgacctactgtaaaaaaaaactgaatccagtaaaatatattgattatactggcaaaatgagggtaagtttagtatctcaaagcaagttgtagaagttacttcatgccatatgttagcttagagaagaatgaaacatatttagatccttgaaactccctacttctcttgagatctgattacttctgcatctttgttttgtctttgttgactggggccatgatcattttgcagcagtgtattccccgcagcatgccacagcaaccatgtaaaaaacgagaaatttaatcttcagccaaggaaacctggcagtaaatgagaattagttttaatttttatttttttgcatctgtgttccttatgtggtagagaattagtttttgaagttccttttagaaaaatattctaggcacataaatagcatctcattatatcactgtattgaagttgctatagggaaatagctaattgtagggatgccgtttcgagaattttattcacttttatatttatgtctcacatctagggaactagctcttcagaaaaatccaagtcttcaggatcgtcacgatcaaagaggttggttgatgttgaagggacaaaaagttattttctttttcaggttattttctgtttctaaaaccatgtttttttctgaactcatgtcaaccactattctgagttaactattctatacaaatatacatatttgaaaatgattagcataatataatgaatccctttgtatctatcacctgatttcaacaattattattcattctaactttgaattctaaagggtttttaaggatttattatatattagtggcccttgcaatatgtagtttatttcattagacaatatatgtccttgaaaaaggacaaaataattgttgaatgcctatgaggcagtgggttttttgggttatatgaaattgtctaggatgggaagttagtcatcatagttgtaagttataaggagaaaaaagagtggtaaaaaacacttttttctgctaaattgtcaactcaagtcatacataaaaactgaaacttttctaacataatgtagtacccaatatactatgcagtataattgttattagaagtttgccgcttagtctattggactttcattgtttctaaccagtgggaatgtctcttaaaaaccaagcttgtttgatattaatttattctctgaagtagtgattcttaaagaagagtgtcctccagggtctccctggtagctttttcagaatgcgtatgccttggtcctgctccagacctactgaatcataatcttcagtgatatggtatagacatacatgcttccctaggtgattctgatgtgcttccttgttgagacccactgctcaatctcaacatgttatttatgttctttgggtattgttccagttgtcagaaacattcataattctatgaacttaattctttcataggaaaccttcaattgtaacaaagtatgtagaatcagatgatgaaaaacctttggatgatgaaactgtaaatgaagatgcgtctaatgaaaattcagaaaatgatattactatgcagagcttgccaaaaggtaatgtgtgttaatttttcatgaagttaaagttgaaatgaatttttaaacatcatttttataaaattggaacttgattactgttaactatgtacaaacgaccaaacatggcattttcctagtggttgtctagaaatatatttgtatgccaatgataatatgtgttattgaagttaaaaatttggaatattcagttggttttgtaaagaatgaaatctatttttttctttcctttgagttttagacaaggggctttagtttccaaattatacttcagtgtgtaagcaggtttaaaaatttaatatattaggttttggttcagtcaatgttaatgtgcttgctttatacaaaaatgtaatgactgttcctgaaaacttaaaaatcatgtacagtctagtttagtcttattgcattcttaaattccctaaggctaaaagctgaagttaactatcatagatagatttagttgtatttcttgctgttatcttttttaaaaaactttgtcacatacctctcaactgttgaagttctaaccataaaaccttgttaataagaatagggaacaatagccaaatgaatatcttggactcttcatagctcaagtctgagagcaatataattggatgatgagaatgacagggaacttggttcaaagagtcaaattttagattttttttctttgttaaataatatgttgtagtctcttggcacatttttcaaattcattctcatagatcttttacagcagtgcttattaaaccttgttccctgtctatgtttttatgacatattttcaaattatggaagtttaaaaaatacagtaggtaggagggatgggactttccttgactaggataaattagaagttacaaaaggtgataaatgaaatgaggaaaggaaattaatgaaagaagagagataggggcctaccgcttacttagttttgcaaatcatttatgacaattttatgtaatggttttggtggccaagggcagaaacaactaacatgggagtctaagtcccataggtggtgacttactttggatttttacattctcagtggttgtcactgggagtgtttatgatgtaagaaataggaattcaaacttttgttttaattgtactgtggaagaaagtcagcatatgatgttactaacctgaactatgcctaattctgtcagaccaaaacaaaaacagacccgtttcataaggttaaatttgggtgtttatattattgttgtaatatttattgagtatgtataagtaccaggctcttacagaattaactcctttaatcctcaaaacaacactgtaaggtagttattattttgcttgtagagataaaggaacaaattcagaacccaaggaactttttcagctttaaattgagaagctaagatttcaacccaggtctgcttgaatccaaagcctagtgagtgctcttttcactctgctgctttgcttccaattctccctagaagaaatctagggagaattcagtttttttttttttttgtcgttgttgttaatttaaaatctttagttcttttcaaatgctggggcttctctgagtgtctacatgcaatgattgctgtgaataacttttttttggtggggattatttaattttactacaatctgtaaaatctcaatcatctgtgtcctccccccccccaccctttcagagactcagaaactcatttaacaactagatgctataacttgtcaaaatttgcttgttgaataacatagagccatatttcagagaaagcccctggtgactacctgcttttttttccttaattgttgccaatgatagccagttactaagcccagcaatgtaggtaaacattgaaacctaaaccctttttactatgcctgtcttatttgctcttgagagaactaatgaaaacttaaattgacagcctctctcttcaattcacatgttttatagttaaggaaggacattctttctaaaatattaacatagggatcaacaaatgatctcattctacaatttattgttagggtacttcagctaaagtatcttaatctgttaaaactctttaaggactttacagagtagtgaaactttgacataccagttgggaaatgctgcagtatagatacaggagtaatagaatgaacttcatttcccccaccaatacccctcccttgcaatataaaactacccttaaaaatctttctgagtttatgatttggattatgaaaataggatgtctttaaaaattttttccctctgaaccacacatattttatgaattctttatggaacttagcatagatgttcatattcataacagcttttgtgataggcactataaaaattcagaactgggttgaggctttctgtttgattcacacatttgttttgtaatcactccataatacctccctttcctgtttttatgaactatatttcaacaaataaactgttgacacctggcccttttactatttccctgttttatttacttttgtgaggtccttacaccaatatctaaagcttgaaagaaacaaactatgtaccagcaatgttggctttatctgaactgaagtcttgtacttcacttgcacatttaatatgtgtaatggttttttaaatgaaatcattctaggtacagtgattgtacagccagagccagtgctgaatgaagacaaagatgattttaaagggcctgaatttagaagcagaagtaaaatgaaaactgaaaatctcaaaaaacgcggaggtaaatacaagtgaaaatgaaacatgaatttaaattgctgtttatgaccatattggaaaatcggatgtgcttactaaaaatacctccacttttctgccttttgtttattaaaagcactacttaaatataacttctgtttctctctgagctctgaagcagaaaaggttaagcaccatttatcgaaacacctttgccttcagtggctattaagttatctcaagaagcgtagcatttccttcttccacatgttctataatacatatatgccataatactatgttttccccccaaccctaaaataattttagattcatgcaaaatcttgtctgtggcctacaggtaactttatatatatttagagttggatagagtgacgtacatctgcattagtattagttggggtattataaatgcaagtcccttgactccactcctcacaaattagaatttctgttgatgaggtcaagaatgtactccagtttgttcttgtgtacactgaagtttcaaatccactaatctaagaatggcaacatggacataagtaggaaggagtagggagctagagctgataaccctccctctgtcttccagaggcacctctccctttgtctgtctatcttcccttaaacacacaaacggtggggagtggtggctcacacctgtaataccagcactttaggaagccaaggcaggagaattacttgagtcctggagttcgagaccagcttgggcaatatggtgagaccccatatctacaaaaaataaaaatatcagctggacatagcggcgcatgcctgtagtcctagctattctggaggctgaggtgggaggatcacttgagcccaggtgatcgaggctgcagtgagccgtgattgcaccactgcactgcagcctggatgacagagtgagaccctgtctcaaaaaaattaaaacacacacacacacacacacacacacacacacacacacacacacactctaatattggctaaccatctataaaaagtttgcatcagaaggattcatttagaaataatagtggactatgtgtcccacttgtttgtgtgtgattcttaaatggtgcctatatatattttggggcagcttaataaagccagaattcataactataaaaggaatgaatctccaaatgatagaacatgacactaaatttctaagtagaagtgtagtgaaagcatatccatttaatattgatcagattatataattgtgaaattatagtgaagttcttatattggtgaaattttgtgtggatttttattttaatgctatgattatcttgctggaaccagtaaaatatatctatttttataacatattttatatattcattttccgattaaataatttgtaaggttgttggcaaaaataaaggaaatattatatagtcttttgtccacaaaggggtagtcaactccttttgagcataaggaatctttctgagaatctagttcatggtagggaaactgccattgcagcaacagagctcattaaagctaaggtagtagtcttaaaatttaagagaatcctcaattataaagtgatggtaaagatcagtagtaagagtttctttcctctgatcataggttctctagagaagacaaataactaagtgttctgcattgtgtacacttagtgtacagagtgtctaaatggtgttatttttgggaagggaccctgtagcagtcagtgtctgaaatgtggataagggctgaaagaataaaagaaccactgttgttgacgagggtattcctagtgccactttggtatgctgctgacatttggtctcagctgataagtttcaggaacattttattgaatgatctgtgtaggaatgttttggtatcacgcttaagggaatacatgcatttatagccatcagtagcacttaaatctttcacatctattttcatcttaatgatttgttacatttttaagctgtcagaaatcacacaggaaatttaacactaggtttactttatatacacatatatagataaattggtgatctgaaatactgaattggtgtagttaatatttaaactttttaagaaagctggttccaaattgaagcctaacttaggaaactgtcaagaatgtaaactttcttgtattacaagaaatgtaagacattacaagaatgtaagacaatatataaagtcttatattgatttggaataatattataacacaaagatacggttaaagttaacatttcaggagctgattttttaaaaaattttcagtatcataccctattttgacattctcttcccagtttaattgttagaaagtatattttacacctaacttttttacatgacacaataattttgttctatttaaaaccattaaaatctattgagctcagaaatgaaaatgcctcttttccatttataccctgtgttacaattttaaatatatttcataattaaaaataaaaaatttaaacatgtatacagcaacaagtacataaagtaacatttcaacattttaccatatttgcttcagatctcacttaagtaaaatattggttcagtcctactctcatccatttccccttcttcccaccccacaggtaatgattatattgaagttttatgcatgtgcatgtgtgtgcatgtttttctatgttttttatatatgtattcataaaacatttttcatttaaaagtataacaaaataatatgctgtatatatcatttgggaacgtttttcatttaacattgtttttgaattgtattcatgtcagtaaatgtacatctagtttgtttatttttcactgctctatagaattatgttatatcaataagccactattcatttcccacataggaagttattcccaatttttcattttctaattttctaattagtgctgtggtgaatatccttatatttgattccttgtgcacatgtgggagaaaatctccaaagaattacctagttttgtttaattcttgagcgatgtatgcaccaaagcacatagaagatacttagtaagtattacttaacactggatgaacattcagattctacattttatttatcttgttagtttatctgaatgaaatcattgtttgaaatgaaaaagtatggtgtggtgtatttgtttctgttaaaacaaatacagaatatatgaatacccaagatcaaactggtgtttgtaaataatgtgattataatacattaggcttgtaatgcctgctattaggtaggttgagataggaggattgcttgaactcaggcgtttgaggctacagtgatttataattgtgccattgtactccagtctgggtgatggattgagaccccatctttaaaattaaaaaaataaataaataaaaatattagcaacataaatagtaaaccttcaagtttacttttctaaaaaagtatgatggtgttcttatacattaacgtttttagcttctggctaggtgtggtggctcacacctgtaatcccagcattttgggaggctgatgccagaagattgcttgagcccaggagttggagaccagcctgggcaacacagtgagacccagtctttaaaaagaattagctgggtgtagtggtgtatgcctatagtcccagctactcaggaggctgaggtaggaggattgcttgagcctgggaggtagaggctgcagtgagctgaatttgcaccattgcattccagcctaggtgacagagtgagactctagctcttaaaaatttttttaaagtttctacaaataaaaatattcatgataatatttgggtccatggcgctttggaccttaaacctaacagaaacccaaaagagaaaattaaaagggtgaaaaatatatgtgatgttttgttttttatttaaggatggagccaatttgttttttagttgtctcctttttatttgtgaatgtaagcattttgagtgacttctgaattataatctaccatcttattttgatcaaggtcttggttgcacatcaggatcatctttgaaactttaagaaaatgcctgagagattttaattcagtggtttaggggtgggaatggctgtttttaaaaagattcttcagatgactctaatgtttagctcagggtgtgaaacactgccttagcagaactagggacaagagggaggctggagaggtttctgtaggttttcttcagtctgtttatcaggagacagtacagaatgggactctgcctttttcccccagtcgttctgatgttttgctgccaaaatagatatacctgcaatgtcttgtttgtctttatttggaaatagtagacagtattgatatggagtggatagtggagtacacatagaaaaaaggcagtttaatgacaatttatgtatagtgttgaagtaaatattagcaaggaaattggtaatatcataaaattaccaagtttttacataccatattgataggatctgtgcagacaattccaatgagaataaaaacctttatggcatacttaagtgtaggattgcaaaagaatctgttccgtatatgttacttacttccccattctttaaggactgatactgaatttatttgcaaagcaataacaaaataagagctcttggcccctagttttagaactttttatgggttctcttaatgttatttcaagttgtaaaaaatggcatttgcatctgtaaaaggaaacaattaggatttgtaacttggaatttgccaaggttgtcatgtgcttagtaagtcgataaaatattaaccttttttacttgtgtccaatatgccatttttctaaggattatgaggtatttcatgtctaatacaaaagttacaaaatgctgactaaagtaagtatctttttctgtgtataaatgtgtgaataatagccactcctttctcctagaagatgggcttcatgggattgtgagctgcactgcttgtggacaacaggtcaatcattttcaaaaagattccatttatagacacccttcattgcaagttcttatttgtaaggtatgtaatgatctgttgatatttcataccgtaaatatttgaatgcttaccatataccaggcctttgagggcacagtcttgaagaaagatgaaaatggtatctgcccttggaagacttctactatagtggggaaaatagacgtacaaagcctaagtgtcatgataggggagatactgtgattatgggagcacaccggaagcctgtgtaaataggatttggatggctttctagtggaaagctgtatgtgaaatatgaataagaatcagcctggtaagtgagattggttcatcatgttctgggaagaggcaacatagtattcagatactggtagttgagggagagcttggtgtgtttgaaaatctcaagagtggatgtgtgtaatgtttgtgttttataatctttccccttatatatcctacttccccaaatgtaaactatctatgtggagcagggttttgacataacttggagatgatagaattaaaaatgttttttatgtgttgattataattttaacagtctgtgccacttttttgttagtaataccttggagttaattttaaatatctataaatgtgggcctggcatggtggctcatgcttgtaatcctagcactttgggatgctgaggcaggtggatctcctgaggtcaggagttcgagaccagcctggctaacatggtgaaaccccgtgtctactaaaaatacaaaaaattagccgggcatggtggcgggtccctgtaatcccagctacttgggagactgaggcaggagaatcgcttgaacccgggaggtggaggttgcagcgagtcgagatcgcgccattgtactccagcctggacaacaagagggaaatttcgtctcagtaactacctacctacctataaatgtcaaggttatggttttcttaactcatattcctgctaagattaatcctatgttagtttgtttcccaataaaaagctgcctttgaaatgcagtggcaggccatgttttccttggaattctagctctagatcttttcttgcatgaatttttgatagattcagacatgcttaaatgaactgtactttgttctttagcaatttgtatccctcctttccttgaattcagttcagccaggggcctatctagggtatgtattagagagtttcattttaaattgtgacagtagaatctaatattgctggatttgtgacatgtatttgcctttctgttttcttatctatgtgattgtcttttttcaagaaccagtctgttgagcctaggccatttcactaatcggtagtttgtatcagtgagcaccttttccctttctgcagtcccactggaaagactttgaagtcagtcaaacttggatttgaataacagctttgcctcttactagttgtatgactttagatttatttacatattaatgaaagttagccttttctctcataatatgtcctaccttgcatggtaggtatttggtatttaaagataatatagattaattgtttagctgtatacatagtagctgtttgtatatggtggctattaaaattgttaagtacccaaatctaatacatttttatgtagagctttagtagctagatgtatgagaccagaaattagctttactaaaatcttttgtaaacttttttttttttttttttttttttttgagacggagtcttgctctgtcgcccaggctggagtacagtggcgcgatcttggctcacgacaacgtccacctcctgggtcaagtgattctcctgcctcagcctctcgagtagctgggattacaggtgtccactaccacacctggctaatttttgtatttttagtagagacggggttttaccctgttggccaggctggtcttgaactcctgacctcaagtgatccacccatctcagcctcccaaagtgctgggattacaggcatgagccaccaaacacccagccaaaaatcttttatacacttttaaataaggaatagtggtacttgagtgtatggaaatctgtttcaaggcattaattcttgagatagttagatgtctggaaaatacagacattgggtagtgggtagcagtgtttattttatttatttatttatttttgaggcggagtgtcactctgttgcccaggctggagtgcaatggcgtgatcttggctcactgcaacctccgcctcagggttcaagtgagtctcctgcctcaacctttagaatagctgggattacaggcgcttgccaccacgcccggctaatttttgtatttttagtagagactgggtttcgccatgttggccaggctggtcttgaactcctgacctcaggtgatccaccctcctcgtcctcccagagtgctgggattataggcatgagccactgtacccggctgcagtagtgcagtgtttttgctttgagtctctgaaacatgcacacatactcccttttttaaaaaaaaattgtttgtatttttaaaatttttgtgggttcatggtaggtgtatatatttatggcatacatgagatgttttaatactggcgtgcaatgtaaaataagcacattgtggaaaatggggtatccatcccctcaagcatttatcctttgagttacaagcaatctaattacattctttaagttatttaaaaatgtacaattaagttgctattgactgtagtcaccctattgtgctattaaatagtaggtcttattctttgtatttttttgtactcattaaccatccccacctcctccctatcccctcactacctttcccagcttcttgtaactgtccttcatgacatccttcattagttcatccatgagttcaattgttttgatttttagatcccacttataagtgacaacatgcagtgtttgtctttctgtgcctggcttatttcacttaacataatgatctccagttccttccatgttgttgcaaatgacaggatctcattcttttttatggctgaatagtactccattgtgtatatgtaccgcattttatttatttacttatctgttgatgggcacttaggttgcttccaaatctttgctattgtaaacagtggcccaacaatcataggagtgccagtatctctttgatatactcatttcctttcttttgtgtatatactcagcaggtggattgctggatcatacggtatctcaatttttagtttttttgaggaatctcccaactgttttctatagtgattgtactcatttacattcctaccaacagtatacaagggttcccttttctccacatccttgccagcatttgttattgcctgtcttttggatataagccattttaactggggtgagatgatatcttattatagttttgattaacatttctctgataatcaatgatggtgagcagcttttcatatgcctgtttgtcatttgtatgtcttctttggagaaatgtccagtctaatcttttgcccattttttgattggattatttgattttttcctatagaattgttggagctctttatatattgtggttattaatccattgtcagatgggcactttgcaaaatgttctcccattctgtgggttgtcttttcattttgttgattgtatcctttgctgtgcagaagctttttaacttgatgtgatctcatttgccaatttttgctttggttgcctgagcttgtgtaatatgctcaataaatctttgcccacaccagtgtcctggagattttccccagtgtttttaattacttaaaaaaataaagtttttgtcctttatgaatgttatcaatttcgaattaaatttccccttcctcttttcttttaatagaattgctttaagtattacatgagtgatgatattagccgtgactcagatggaatggatgaacaatgtaggtaggtaatatagatgagctaacattcagtgtttcctacttttgggaggaattgttacataatcatttatgaggtttgtctttcatagtatcgtcattgatgtctttaatgaaaggttgttcttttccataaaaccctggatttatgtctagtttaagtttctaataaagagtaagcagatgacctaaattaccactaaaattactggcagtaaaatttaaattgcattataacaaagagattaaaatgagttttgttgggaataatgtttatttttatttttttacatatcttttcagtttcctgaaagaagggaataatgttttaatctttaaaacatttcaggtggtgtgcggaaggtggaaacttgatttgttgtgacttttgccataatgctttctgcaagaaatgcattctacgcaaccttggtcgaaaggagttgtccacaataatggatgaaaacaaccaatggtattgctacatttgtcacccagagcctttgttggacttggtcactgcatgtaacagcgtatttgagaatttagaacagttgttgcagcaaaataagaagaagataaaagttgacagtgaaaagagtaataaagtatatgaacatacatccagattttctccaaagaagactagttcaaattgtaatggagaagaaaagaaattagatgattcctgttctggctctgtaacctactcttattccgcactaattgtgcccaaagagatgattaagaaggcaaaaaaactgattgagaccacagccaacatgaactccagttatgttaaatttttaaagcaggcaacagataattcagaaatcagttctgctacaaaattacgtcagcttaaggcttttaagtctgtgttggctgatattaagaaggctcatcttgcattggaagaagacttaaattccgagtttcgagcgatggatgctgtaaacaaagagaaaaataccaaagagcataaagtcatagatgctaagtttgaaacaaaagcacgaaaaggagaaaaaccttgtgctttggaaaagaaggatatttcaaagtcagaagctaaactttcaagaaaacaggtagatagtgagcacatgcatcagaatgttccaacagaggaacaaagaacaaataaaagtaccggtggtgaacataagaaatctgatagaaaagaagaacctcaatatgaacctgccaacacttctgaagatttagacatggatattgtgtctgttccttcctcagttccagaagacatttttgagaatcttgagactgctatggaagttcagagttcagttgatcatcaaggggatggcagcagtggaactgaacaagaagtggagagttcatctgtaaaattaaatatttcttcaaaagacaacagaggaggtattaaatcaaaaactacagctaaagtaaca

SEQ ID NO: 15469 - DNA, 89971 bp, Homo sapiens
taaatgggttacgtaagagtatactgagattttttttttaaagtgtactgagatattgatcctttgtcacttgggaatacaattagaatctgaggcagctggtttgcctccgtaaatgagtagtctcttctctttttcctggtatgctatataagcattaacgttttttacatatgccataatgtgaatgggttggaaagcactgggggcagaatgtaggaggctacatgttgtgagcccaaaaacacacagggaaggccatcagttccaaaagacaaattttgaccacttgtctaggatttttgtttcattttagttgtgtgcagtcaaatataagtcatttgtatatggatatattttatatatttttgtagcttatatacgtgtatagtatattagaagcattctccagaactaatagataataaaaatttatttttttctttgcatctaaattaactccatataaaatggagtatatcataatgtatggacatacgtagctggtattgtataactttaaaaaaaatgactttcttacagtaaatataagaaaatctgaataggaagtattaaggggctagtctgcctccttagcgcagtaggcagcacatcggtctcataatctgaaggaagtattaaagggttaacaatgttgtacctggaatttgaaatggatattaaataattaattacctataattgagctacaatatgatttttgccacatattttattttcacgtcaaagagttactgtttgctttaatccttttgtagtagctgtctcgtttttctgagaagcagcatcttgaatgagtcatttaagtttagcttacatcatccccatttctgtgttttaaatgttttttattagaaggagagttcatgatcacgaaatgactatgtaaattacttcaaagtgttagatttattattacttaagtatttttagagtaagcttcattggtaagcatttgcattttaaaacgtatgtaattgtatggatataaagttttgtgacagaatccttgtatatgatgtagagccgtaatattagtactaatataccatatttattcactcaacagatatttataaagtgcttactatatgcccagacataaggagggaactgataagcctaaatggtaaattgaagaaggtatgctatggaaatcctagggagatgctagtcttgagactagcagctttgattttcatttatccagggacaggatttgagacttcgagccctctataagttggagagttctgtgaccccttctcaaagctgaatccctttaaagtttacaatcccatcgacaatccagggagttgacaaggaagcttatctatttcagccagggctcttggttgggaaaaatagttacattgaatttacggtcatggccttcacctcacatactttatggtttgaatttatattactcatatagtctaaaagatccgaaactgaaatattaacttcacaagtaattctgagttggtgattccctggagacctggtagaagcaaatgtagaatcactctggagatatatgaccttaaccaaggctacccagaaatttcacagattgtagctacacctgagaaaataaccttaggaaaagctaggaacagaaagtattagtagtcaacctgaggaaagttagcatacaaaataaatggcatgattagattctcaagaacttctgataatagaagtatttgataaagactataagtatgtctaaaatgatatttttaaaattcctaatcataactttatgccagaaaatttaaaacttaaaatacacaatatttaagaaaaatatactcagcaatgagcattcgttgcagttatttcatattagccaaaaacaagaaacaatctagatgtctatgaggagaactaataaatgatagtgtattcatgcagtggaatactacatggtagttagaatgattgaacgggagctccatgtcaagcatgagtaaatctcgctttgagtgaaaaagtaatttgtaggattttacaaacagtatagccatttgtacagtttagtgatacacatgcagtaaaaaacataaaacactgcaaaaaatggtaaatatataatttaggggtttagttacctattggaaaggaaggaaggaaagagaatgggatcatgtaggatcatatattaggcttcagcttcatccgaagttttaacagtgttaaaatttgatgaagatggaatgtggaagcacatttgtttcttatatcttatatacttttctgagcatttaaatttttgtaacaaaaatatattttaaaatactttgcattaaaaagcaattgagaaagtgtataaacatgctaaacctgcatatttcttattttgaatcaaactatgtttaaatcttttaataaattattttatgctactttctccttccacctttcatagtcaaagtttgtggggaaaatatataagaacgaaatcatttaatatgatatgctgattctggggtcaattcttgttggcggtttccagatcctagtagcacagtgaaatgttttctacccccaaggtcttttctctcgtggtaactgagcctttccatctctgttgattcctgtctcatggagtatgtttgggggcattttactctcttagggcctggtgggaaggggatggtttctcttctctttgggtctctgtctttctgagctccactcctaccccgagggtttgtctcttacacttgcactctctcagagtcaatctcttgcttgttctcttatttggcatctccttcctttctctttttctatctagagctcactcttctgggatagtctctgtccttctgtgctgtatgtgcgtgtgcctgcctttctcttttttccctcccctctcccaagtccccatcagtttctttcttactctccccatgggtaggtctttttctgtctctcttgctctctttccatttcttttctaatttacctacttatgttccatttgtcttatttaggtaaagctacttcttcttctaatccaagcagcccagctccagactggtacaaagattttgttacagatgctgatgctgaggttttagagcattctgggaaaatggtacttctctttgaaattcttcgaatggcagaggaaattggggataaagtgtaagtgctttaccatatttattatataaattaaccttttgattatgtttttattgcttaaacaatgtatttgaacaaatctgttgcttttccttccttcctaaagatgtgatttatttggtcattgtagtgctaggccaatacaagcaactatcttttttgtaagccactagttctgattgcatattcaggttatttcttcagtgtaaatttctgcttctacctattgcaacttgaacttatttccttgggtagagctcttagttgaaatttgtgtttctccatcttcaaaatcatttttcggtttatgtagtgtgacttctaccgtgttgctttactgagatttccccctgtaaagtcactagtgaccttctaatcctcaaatctagtggacatctctcaggctttattttattttacctgcttgattattctttcttcttcttcttcttttttttttttttttcattatgagacagggtcttgctctgttgcccaggctggagtgcagtggcacaatcacagcttactgcagtcttgacctcccaggctcaggtgatcctcccacctcagcctctccagtagctgggactacaggcgcacaccaccatgcccagctagtgtttttatttttagcagagatagggtttcaccgtgttgcccaggctgatctcgaactcttgagctcaagcaatttgtgcgcctcagcctcccaaagtgctgggattacaggtgtgagccaccacacctggcctgattattctttctttatcatttattctttgttttttgttccacttctaacatttttgccaccattcctttctttgcatcttcaccccccttcaaattacttttccaaaaacattatttttttttttttgagacggagttttgctgttgttgcccaggcgggagtgcaatggtgcgatctcggctcatcgcaacctccgcctcccaggttcaagtgattctcctgcctgagcctcctgagtagctgggattccaggcacgcaccaccacgcccagctaattttgtatttttagtagagatggggtttctccatgttggtcaggctggtctcgaactcctgacctcaggtaatctgcctgcctcagcctcccaaagtgctgggattacaggcgtgagacaccacgcccggcctccaaaaacatatttttaaagttttgaacaagacttactgtctaggctgctaggtcccaacatctgattataaacgatttttaaaagtatctgagatgcttttttttttttttttttgagacggagttttgctcttgtcacccaggctggagtgcagtggcgcaatctcagctcactaaaatcacctccacttcctgggttcaagtgattctccagccttgcctcctgagtagctgggattacaggcacacaccaccacgcccagctaattttgtttttttaatagagacggggtttcaccacgttggcctagctggtcttgaactcctgacctcaggtgatccacccgcctcagcctcccaaaatgctgggattacaggtgtgagccaccgcgcctagcttgagatgcttttaataaaaattttaaataaggctaaaataaaataatcttttatgtttaaaaaaatctcaaaatatggtctgaaacaaaagagttcttcatgttgtctgcaactggaaaaggttaatagagagaaccattagtatagacatttaatcctaacaacttttttccttttctactgtaagacttctctgagttcagtggttcccagaaccagccttaattgctaactgactaaaatcaacctctttccagtatagtaacccagattgcagattaattccaatttaataattagtatttctaagactttaattttttcacttacgggaactttcaagaacttaatttgtagcacagaaagaattgattcaattatgtttttgattttgggaaagataaactactgaggggtcaaagcataggccttggtcatttgagctgagcaccaggagtcaattcattttcttaccaacattctagaagtagttaactgggagatagtagactccaacagtgtggagctcaggaagtcatacaataaaaaacacttaagtggttaactccaacagccgtttcatagcttcaattgttttcagttctactaaatctgaagatatgtagcagggaatgttgaaggatcttcaggagtcataagtaccttcttctcctatagtatagcttttagaataaaaataaaacttaaagcatacttgccacaggtatattgtttcttatatactgatctactttgtttgcatatataaagggcaatagaagacctcttatattctctttctagattttatttcttttctagtgtgtaagtatgttataaattctgtccagtgggttagaccagaatagtcattttagaactatttctcagagcccctgcaaattggtgaccgaaaggagagggtaagggaacagtaacatttttcctccttctcccgtaatgcctaaaacagcttgcttttataatttattttatttgaactctacacaaaacttgatgtgaccaaatagttttcatggctaaaaaggagttagaaaattactagggcagagaatgaggaatttgcagacatacttgaaatgtaatgacaaagtgttatagaatgcatgtaattttaaattactgaaatacttgtaatagggaaactttttacattctctaaaacagtgtcttttatagagcagaagttttaaattttgatgaagtctaatttatcaacttttaaaacaatgatactttgtgtcatgtgtaaataattttttacctaacccatgttatgaagattttcttctgtgttcttctaaacattctgttcttacagtttttacagttagatttatgctccattttaagttattttttgcataaggtatgcagtttaggttgaagttcactttttttcatgtggatgttcagttttgctaagaccattgtttttgtcatgtggatgttcagtttcgctaagaccattgtgtaggtttttttttttttttttttgagacagagtctcgctctgtcacccaagctggagtgcagtggtgcgatctccactcactgcaagctccgcctcctgggttcacgccattctcctacctcagcctcccgagtagctgggactacgggcgcccaccacagtgcccagcttattttttttgtatttttagtagagacggaatttcaccgtgttagccaggatggtctcgatctcctgacctcgtgatccacccgtctcggtctcccaaaatgctgggattacaggcgtgagccactgcgcccggctaccaagaccattggttaaaagactatccttttaccattgaaatgcctgggccctacaattaattatcctatgtggctctctatctggactctattctgttctattgatctgtgcctgtccctttactacactgtcttggttactgtaactttgtaagtaatgaaatcatgaagagtcagccctccaactttgtttttctttttcagaattgtcttccctcctctgaggtggcattctcatatacattttacaatcaccttgtaatttctacaaaaaaatcctgctgggatttttgttacaattgtgttaaatttgtagatcgatttaggaagaagtgatatctttactaggaatcttctaatccataaacactaatctgtttttttagccttgttttcagccagtccctcatatctctggacttgattgaagattttcttgaattagctagtagggagaagacagaagataaagataaaccccttatttataaaggtgagctacaaatatttctgtgtcgtaattttaaaaatactgatttaaacataccatacaaacattttagcaacaaaagaaacaaaactacccagtctcacaactctatcatatcaaaatttttttgcaatgtctatttgtccttatccatatatatgtatagtctttttcaaaataaaattgtattgtttatatttgaggtttacaacatggtgttatgggatacatatagatagtaaaatggctactgtagtgaagcagatgaacatatctatcatctcacatagttttttttggtgacaagagcagctaatatcaacttaagaaaaattcctaatacagcagtctttgttgttgaaattgttggataaattaaaactttttggtttctaaagcagttttattgagagataattcacatcctgtacaattcacccatttaaagtgtagaactcaatggttttaatatattcacagagatgtacaaacatcactagagtcagtttttgaacattttaatcactaccaaataaaactctgtaccctttaactattactcccctatccagcccaaaactccctcacataagcaaccactaatctcctttatgtttctaatagattcatatattctggaccagtcacataaatggaaacatgtaatatgtggtcttgatagatattagggttgttctcacctttcagctgttgtgaatagtgctgttgtgtacatttgttacacaggttttcatttatttaaacaaacggcaataccaaactgttttctacactgcctgtactatttcagtcctaccagcaatgtacaagcatttcagtttctccacattcttgtcaacacttgttatttttcatttttgtttttgttataaccatcctaatggttgtgaagtggtatcttatgattttaattttcatttctctaatgactaataatgttgaacatcttttaatgtacttgttgactatttctttatcttctttggaaaaaatgtttattcaggtcctttgcccatttttgaattggattgcttatctttttgttgttgaaatgtgttttaaaaaatatattctacatactaggcccctatcatatatatgatttgcaaatattttctctcattctgtgggttatcttttgctttcattaaaaaaaaaatagttccggtgatctgtatcactttcttttatttatttatttttaatttttcgtagagatgaggtctccctctatttgcccagactggtcttgaactcctgggctgaagcagtcctccctcgttggcctcccaaagtgctgggattaaggtgtgagccaccatacctggccatctgttgctttcttgagtgtgtcctctgatgcgcaaaaatattttattttgttgacatccaatttattttttcttttgttgcttgtgcttttactgtcatagctgagaaaccatttcgaaataaaaagtcgtgaagctttaacccctgtgtttgcttaaaagagttttatagttttagtccttgcacttaggtctttgatccattttgagttaatttttatgcatgatatgaggtaaaggctcaacttcagtcttttgctgtggttatccatttgtcccaggactgtttgttgaaaagaatattctttctttattgaatagtttttgtcactcttattaaaaaggaattgatgatggagacacatgtttgtttcctgaccctcaattctattccattgatctatatgtcagtcgctgtgctaatactgcactatttcattaccattgctttgaaagtgatgttgaaattggaaagtgtggctattccagatctcttggaattcaacatcaaccttagaatctcctataaatttctacaaagaagtcagcttagatgctaatagggattgtgttgaatgtatagttaattttaggaagtactgccatcttaatattatgtcttatccatgaacatggggtgttttgctgtttatttaggtctcttatttatttcaccaatattttatagtttgcagagtatacattttacacttttgttaaatgtatttgtacatattttatttctgaggctgagtgaaatttgttcttagtgaattctttaggattttttatatacaagatcatgtcatctgcaagtacagataatttcctttctaatctgaatggcttttatttgtttgcttatccagttgccctggttaagacctcaagtacaatgttgagtgaaagtggcaagagctggcatccttgtcttgtctctaatcatagtgtgaaggaatccagtttttcaacattttgtatgatgttagttttgtggatactatttatcaagttgaggaaattatcttctctttctagtttgttaaatgtgtttgtcatgaaagagtgtgacatactatcttgatttctctgcagctattgagatgatcatgtcatgttttttttttccccattctattaacatagtgtattactttgattttcacatgttaaaccaaccttgcatacctgggataaatcccacttgtcatggtgtataattctttttatatggtgctggatttagtttgctagtgttttttgttgttggcaatggaatgttttaattggctttttttgtcctgattatgaaagtattattatatcttgcatatataatattggctgtataatattctgtcatatggctgtacataacttatttaatcatttgattgctttctctaatttttcaactttttttttttttagagacagggtcttgctctgtcacccaagctgaagtgcagtcgagcaatcttggctcactacagcctctgcctcctgggttcaagcgattcttgtgcctcagcctcctgagtagctgggattacaggtgtgtgccaccatgcctggctaatttttgtattttttgtagagatggggttttgacatgttggctgggtcttgaactcctggcctcaagtgatccacccgccttggcctcttaaagcactgggattacaggcgtgagctaccacacctggcctaatttttcaacattttaaatttttgtacataagtttatatctgcgttttaaacttttttgcttaagatagattcctaagaggagaaatcatttaccaacaggtatgatcttttttaggacttttgaaacattgtcaacttattttccagaacagttggattagtactcctagtaggaatccttgaatgatcactacaccattgccataataactaaaacctttcttaatagatgaataatgatatcttgtatttgttttaatttgcatttattttataaccagtaacatagattgtctctgctaatctctttttgcttttactgctgactgatggctatgtttctgtctgcctgcaatgctctctccacccgcactatcttcttcacctgattaattcctatccattcttcatctttcatgtccagtgacactcctcagtactgacttccctcctcctgactccaatgtctgattttttccttttaatttttgtgggtgcatggtaggtgttatgtattcatgggttacatgagatattttgatacatgcatgcaatagataataattacatcagggtaaatgggatatctatcacctcaaacatttatcctttgtgatacaaaaaatccatttatactcttagttatttaaaaatatacaatttttaattatttttgacggtagtcaccctgttgtgctagcaattactagtttttattcattccaactatatatttgtacctgctaaccatcagtacttccaccccaaccacccactacccttcccagcctgtggtaaccatccttctactctgtatctccatgagttcaattatttttatttttagatcccacaaataaatgacaacatgcaaagtttgtctttctctgcctagcttatttcacttaatgacctccagttccatccatgttgttgtaaatgacaggatctttctcttttatggctgaatactattccattgtatataagtatcacattttcattatccattcatctgttgatggacacttaggttgtctccaagtcttggctattgtgaacagtgctacaatagacagtgcagatatgtcttcgatataccgatttccattattttgggtatatacctaggagtgggattgctggatccttttttttttttttttttttttttttttttttttttttttggtggggggagacaaggtcttgctctgtcacccaggctggagtgcagtggtgtgatcttggctcactgcaacttccacctcctgagttcaagggattctcccacctccgcctccccagtagctgggactacaggcatacactaccacgcccagctaatttttgtatttttttggtagagacagggtttcaccatgttggccaggctggtctcaaactcttgacctcaggttatctgcctgccttggcctcccaaagtgctgggattatataagtgagccactgcgtctggctgggattgccggattctatggtagctctatttttaattttttgaggaacctctgaactgttctccatagtggttttactaatttgtgttcccaccagcagtgtacaagagttcccttttctccaaatcctctctagtatttgttactccctgactttggataaaagccaagttaactggggtgggaagatatctcatagtttgatttgcatttttctgataatgaatgatgttgagcaccttttcctatacctgtttgccattggtatgtcttcttttgagaaatgattattattttgtccattttaaaatcagattattaaattttttttcctgtagagttgtttgagttctttatatattccggttattaatcgcttgtcagatgggtagttttcatatattttctcccatcctgtgggttgtctcttcactttgttgactgtgtcctttgttgcgcagaagctttttaacttgatgaaatcacatttgtctgtttttgcttttgttgcctctgcttgttgggtattactcaaaaaatctttgcctagtccaatgtcctggagagtttccccaatgttttcttgtagtagatttgcagtttgaggtctaagatttaaatctttaatccattttgacttgatttttatatatggcgagagataggggtctagtttttttctcctgaatatgtatatccagttttccccagcaccatttgctgaagagactgtcttttccccagggtatattcatggcaactttgtcaaaaatgagttcactgcagatttatacatttatctcagggttctctattgtgttgatctatgtgtttttatgccagtaccatagtgttttggttactatagttctgtagtataaagtcaggtaatgtgattcttacacttttgttcttttggcttagtatagctttggctattttgggtcttttgtggttccatataaatttttagggttgttttttgtatttctgtgaagaatgtcactggtattctatacagattgtaatgaatctgtagattgctttgggtagtatggacattttaataatatcgattattccaatccctgaacctggaatatcattctatgattttgtgtcttcagtttctttcagcatctttttatagttttcattgtagagatctttcacttctttggttaattcctaagtattttatttatagctattgtacatgggattactttcttgatgtcttaaaaaattttcttttaatttgtaagtttctttatttctctttcaggttgtttgctgttggtatatagaaatgctactgatttgtgtatgttgggtttatatcctgccacttcacagaatttctttatcatttctaatagttttctggtggagttttcagatttttccaagttaagatcagatcatctgcaaacaaggataatttgatttttttctttccaattttgatgccccttatttcttgttcttgtctaattactctagctaggacttccactactatgttgaataagtgatagaagtgggcatccttgtcatgttcttgatcttagaggaaagccttttagtttttctttctttagtatgatactagctatgggtctgtcatagatggcttttattatttttgaggtatgttccttatgtacttagtttttttagtgttttttcataaagggatgttgaattttgtcaaatgctttcttaccatgaattgaaatgatcatatggttttgttttttgttttttttttgagacggtctcactctgttgcccagactggaatgcaatggcgtgatcttggctcaccgcagtctctgccttgcaggttcaagtgattctcctgcttcagcctcctgagtagctgggattacaggcgtgtgccaccgcgcctaactaatttttgcatttttagtagagacgaggtttcaccatgttggccagacaggtcttgaactcctgacctcgagcggtccacctgcctcggccttccagagagctgggattacagacgtgagccaccacaccccggcgatcatatgggttttgtctttcatgctgttgatatgatgtatcacatcaatttgtatatgttgaactattcttgcatccctggagataagccccagttggtcatgatggatgatcattttattattgaattccgtttgctactgttttgttgaggatttttacattagtattcaccagtgatattggcttatagtttaatttttttatgtgtgtttatctggttttgttatcagggtaatactggccttgtaaaatgagtttggaagtattctgttctctacttttcagaatattttgagtaggatttgtcttatttcttatttaaatgtttgatagaattcagcagtgaagctattgggtcctgggattttccttgctgggtgactttttattatggcttcaatctcattactttttattggtctgttcagattttggacttcttcacggttcaatcttggtaggttgtgtgtgtctagaaatttatccatttcttctaaagttttccaatttatcggcatatagttgctgataatagcaactaatgattctttgaatttctgctgtaacagttgtaatatctttattttcatctctgattttatttttttgggtcttctctcttttttgcttagtctgtctcaaagtttgtcagttttgtttattttcttcaaaaaacctgttttttgtttcattgatcttttgtattgttttctttatttcaagtttatttatttctgctctgatctttatttctcttctactaattctgggcttggtttgttcttgcttttctaattcttctcttctcttcttttttgttttttttttctttttttttgagacaaggtctcgttttgttgcctaggctggaatacagtggcgcaatctcggctcactgcaacctctgcctctcaggttcaaatgattcttccgcctcagcctcctgagtagctgagattacaggcgcccgccaccatgcccagctaatttttgtatttttagtagagacagggtttcactgtgttggccaggctggtctcaaactcctgacctcaggtgatccacccgcctcagcctcccaaagtgctgtcattacaggcatgagccaccgcgaccagcctctgattctttaagatgccttgttacattatttgcagtttttctacttttttgatataggcatttatagctataagctttcctcttagtactgctttccctgtgtcttatgttttttggtatgttgtgtttccattatcattttttaaagaaaatttttgatttccttcttaattccttcattggcccaccggtcattcaggaatgtgttgtttaaattctatgtatttgtatagtttccaaaataccttgttattaatttctccttttattccactgtggtgagagaagatacttgatattatttcaggttgtttttgatgttttaagacttgttttgtgacctaacatatggatgatccacatgctgaggaaaaaaatgtgtattctgtagctgttggatgaaatattctgtaaatatgtattaggtccatttggtctatagtgtagataaagtgtgatgtttcttagttgattttctgtgtgtagtgttgaagtctccagctattattttattggggtctatctctctctttggctgtaacaatatttgctttgtatatgtgggtgctcccagggttgagtgcatatatattttaaattgttatatcctcttgtagaattgaactgtatcattatatagtgtccttctttgtctcttcttacagtttttatcttgaaatctattttgtcctatataagtatagctgttcctgctctttttggtttccattggcatggaatatccttttttatccctttattttcagcctatgtgtatttttacaggtgaagtgtgttcttgtaggcaacagatcattgggtattttttaaaatccattgagcccctctgtcttttgattggagagtttagtccatttacattgaatgttattattgattagtagggacctactcctgccattttgttatttgttttctagttgttttttgggctcgtcttctttccttccttcttatcttccttttaatgaaggtgattttctctagtggtatggtttagtttcttcctttttgtttgtttgtttatccattatatgttttttggtttgtggctcccatgaggcttggaaattctatcttaaaacccattattgtaagctgataacaactttacactgtttttataaacaaagaaagaaacaggcaaaaagaaaactaataaaaattctacaccttaactttgtccactttttagctttttgttgtttctgtttatatcttattgtactatgtcttgatatgttgttgtagttatttttgttgcttcaacatttagtctttctacttataataagagtaatttatacaccacagttacgctgttataatattctgtatttttctatgtacttactgtttttagtgagttttgtacctttagaggatttcttactgctcattcatgtccttttctttctgattaattacttcctttagcctttcttgtaggacaggtttggtgtggataaaatccctcagcttttgtttgtctggaaagtttttatttttcttttatgtttagaggttattttttccatttatataattctagggtgaaagttttttccttgagcactttaaatatttcatgctactcttctcctggcctgaaagatttccactgaaaagtctgctgccagacatattggagatccattgtatgttacttgtttcttttctcttgctgcttttaggatcctttctttatccttgacatttgggagttattaagtgccttgaagtagtcttttttgggttagatctgcttgatattctataaccttctacttgaatattagtatctttctttagatttgggtttctctgttattatccctttgaataaactttctacgccagtctttctctctacctcctgtttaagaccgatatctcttagatttgctttttttgtagctattttctatgccttgtaggcctgctttattcttttttattcttttctcttttgtctcctgtgactgtgtattttcaagtagcttatcttcaggctcactaattctttcttttgctttatcaattttgctattaagagactcttatgcattctttagtatgtcagttgcattttttgactccagaatgtctgctttgttcattttaattattccagcctcttcattaaatttatctgattggagtctgaattcctcctgtgttatcttgaatttcattgtttcctcaaatcagctattttgtgttctctctctgaaaggtcacatatctctgtctttcccggattttcccgattccctgtttagttcatttgatgaggtcatatttctctaaatggtcttgatgcttatggattttcgttggtgtcttggcattgaagagttaggtatttattgtagtctttgcagtctgggcttgtttgtacctgtcatttttgggaaggctttccaggtatttgaagggacttgggtgttgtgatctaactttttagtcactgaagctgtgtccacattaggggtcaccctaaggccagtaacgctgtagttcttgcagccttgtagaggtaccattttggtggtcttgtataagatccaaaagaattgtctgcattaccagatggagaatcttgttctcttcctttactttctcccaaacaaatggagtctctctgtgctgagttgcctggagctgggggtggggggtgggtgacacaagcacccctgtgactaccactgcgggtatagcacttggtcagatcttaagccagcagagcaatgggtcttgcccaaggcccactgtaaccactacctggttactgcctatgtttgctcaaggcccaagggctgtacattcagcaagtggtgaagcctgccagtactgggtctttcccttcatgttggcaaattctcttagtccctgggcgggtatagagatgctttctggagccagggcctggagccagaaatgttagaaatatacctagtgctttattctactatggctaaactggcacagaaataacaaaacaaagtccttcctactcttctctttcttttcctcaggcagaggagcctctcttcgtggccaccaccaggacaggcccgcagagagtactgccagtgtaccgccagtgttcacttaaggcctaagggctatttagtcagcttttggtgaatgctgccaggccagagactcacccttcagggcagtgggctccactctgccccaggctcagtccacaaattccattcaagagctaaggcctggaattggggacccaagagcccgtttgttgcttttgtccgctgtggccaacctggtagctacactgctagataaagtcccctttactcttccctctccttttctcaaacaggaagagcctctctttgtagccaccacaacttctaataagctgggtctcaccataacctaacacatttctgtctaatccatgccccacaatgtgtactacctggttattgctgctgatgattcagggcccaagggctctttggtcagcaggtgatgaatcctgccatgactgggtccctcgattcaaggcaatgggttgccttctggcccagggagctagggcctggaatgggggcttcacgattctgcccagggccctgtcctactgtgactgagctggtatccaagttgcaaaacaaagtgctttttctcttcccttttctctcctcaagtagaaagcagaggtctcttttggagctctaagctgcgctacctggaattggaggagtgaggagtggtggcataagcactctcttagccgccccagtggtatctgactaagtcaagtgcccccattttactggctccaagccctttacagcactaggacttgcccagaagttgcagtccttgtggcctagatagcctttcagttttatttagggccccagtgcactttagcccactgtggcgtgacttactaaaactcaacttctgatcactgtgatggatgattcccctctggtttgggcaggtttatatgctcccttcatgtgtgtaggctgagttccaattcaaagtcctatgatcactgcactctccttcccgcaagtgcactgattctctccctatgacacgtggccacttctgggggttgaggtagcagtggcattggcgattcaagattgtctttccccttctgtgcctctttcagtgatatgaagttaagatcaggtactataattgctcacctgatttttgtttcttatgatggtgcttttttgtgtagatagtcataacatttgctgtttatgctgggaggttgatcagtagcagcttctattcagccatcttattccacctccttccccagtactgccctgattgaatgagttggtatttgttcctgtttctgttttttggaattgtttgtaaagcattgagcttaattatttaaatgtttgttagaattcagcattgaagccatcttggcctgggctcttcttataggtagttttttttctttttagtattatggtaaatatatatataacataaaatttactattttgacagtaaaaaggcaacctaccatatgggaaaaatatttgcaaatcatacatctgataaggggttaatatcaaaaatacataaaggattcctacaacacaacaacaaaaataatatgatttaaatatgggcaaaagagttgatagacatttctctaaaaatgatatacaaatggccaagaagcacatgaaaagatgtctagcatcactaatccttagggaaatgcaaatgaaaactgtaatgagataccaccacacacccattaggatgggctactatgaaaaaacaataatgagagttggtgaggatatggagacattggaactcttgtgtactgttggttagaatgtaaaatggtatagctgctgtggaaaacagtgtggtgttcctcaaaaaattaaaaatagtattaccatgagatccagaagtactacttctgggtatatacccacaagaattgagttcagggtgtcagagaagtatttgtatttgtacgcccacattatagcagcattattcatgaccaaatcatggaagcaagtcaaatgtccatcaacagataactggataaacaaaatgtggtatatacatacagtggaacataatttagccttaataaggaaggaaactttgacacatggtggaacatgtatgaatcttgaagacaatatgccaagtgatctaagccagtctaaaaaggacaaatattacatgattcctattatgaggttcctagagtagtgaaatttgtagagacataaaatagaatggtgtttgccagggcctgtgggtaaggggaaatggggagtgtgagagaacagataactccacggggcttcccagagtgctccatgttgtatggggattatgtctgtctcataaatatatgtatcattggagacaggttcattactacccatttttgtatactctttgtctagcaccaagctagacatgtagtaggtccatagtaaatacttgttgaactggtaagggaataaattacccttatctgtaacttccctagtttttttatacagagaatgatgctctagttaggcattttcctaggtatatacttgcactttttatctttctcatttccccgctttctttgtttctagagtgagtttttggcatatctttaacatatatatgtgtagtatatatgtgtatttttacatttgactgtagttaaatataagcttaaatatattttttttctattatcactatacattttattagattctatgttctggcagtttttcattattgaaaagcctatgttacaaaaacataccaatttactaccatcaataaatggaaaatgcttatcttaatatgtattgtaactacattttcttcatctttaatgggtaaaaacagttgtcattgttttcattaataattttttgaccactagtagggttgtacttcttttatatgcttgctagtttatttctgattttgtaaattatctttagcaaatgtttactaatcagattggtctgcctttgagttactgctattaccactaccactaccattaccattaccactgtgtattgagcactgagcaagatttaaggggtactacaggaaatcatggtgtagaagaggaacagacacatatattatgtgccataatagaggcaggtgtaatttgtcatgggatcttgagtgataatattaagaactcagtaagcttttaattaccatgtgacaggcaccattctaagtagtttttaaaatattatctcattgaatcctcataacaaccctatgcaataggtactctgattatcttcattttacagataaagaaactgaggcacaaggagtttaattacttgccataagtgaaaatgttagtaaatggtgaaactgagattaaactcagggagtgtcactccaaagtctgtgttcttaactactaacctataatgactctatcagtttttaagtgttggattcatcgaggtggtattagagatattcatttgcattataataaaaggtgagtatgttgaaatgctttttaaaatagtcatatcattttccattcatttatgattatttattttaataattatcctgttcaagtgaacaattaatgcaaatgtgactccagcctcttacctttttatgcaagtatccatctcaaattctttttttcttggatgtgtatgcctttttttctaattgaaaaaaaaatcataaataaaatgactttcataagcattaatgaatttttaacaaggaaattctgggttttctatatcagtgaagatataggtaagaaacatggaaaagcatcttttttttaactaatgtactaaatttaaagagcttgctggaaagacataagtaaatctcagttttgttaactgttttattttaaggctctggggcatgatagaattttgcttggattggaaatagtagcattgtgtttacagttaaataattagaatagaaattatgtatgataaaatataaaagtgtcataagcccttaatctcttggtattttagtatcaatgcaagtcttgggtaaaatttcacctcacttcttcctggtgtagattaaaggaaaaaaaaaacttaaactcactgtctaaaattgacatgtcatatcattaactcataaagtcgtactcctttacacacacacacacacatacacacacaccacatttgaaatggaaacgtacactgaaatttgcagctaccccatagaataatttttggcacatagtaggcattcagtaaagatttgttcagtgaatgaataaaggcattctttatctctcatttttatttgatcattatcaagttgttgataaggagaaaaacgtggccatttacagatataacttaaaacatgcctcatgagcgaaatgtaagtttaatcatattcttttgacagttttaaggattctaatcaaggaaacccttttaagaaattctcatgtagatgaaataggctttaaaaatacctgtgctcatcactatctatttgaatgaaatctgtggttaatttatttataatgtaatgactccttgattaagaaaagtatataatgtattttgctatacaaatagaatatatataacccacttttaaatgatgagcaaggtggaaaatctgttcttaccagtaagcagagcgatatatcaaattccttttgtgttcttttgttaaattttcaggtgaggggaagtggcttcgaaacattgactattaccgtttagatggttccactactgcacagtcaaggaagaagtgggctgaagaatttaatgatgaaactaatgtgaggtaggaaaaattttctgtatatgtagaaacattaaaataattaattttaaaatttacataaagttcactatttttattgtgtatttgaatgtttttagcaaatgcaaggtacagtcaggttgcaaaacagtgtcatcactccctaaccactgaattcacttatggaatcatataatttgtagccttttgagtctcacttctttcacttagtgagatttatttgagaatcatttacattgttgcatataccaataatttttaaaaattgttgtatagtcttccattatagggctatatcacagtttgttcagctacttccacttgagggacatttgagttgtttccaggttttggaattaaaatcaaagctgctctaagctttcatgttcaagtttttgtgtgaacataagtatttacttaaatgaaacaaaagcctaggattgtgattgctgggtcatatagtaagtgtacatttatctttgtaagaaactatcaagcagttttccaaagtgactgtacaatttttcattcccacccgcagttgtatgagagttccagtttccttacattcttgtctgtacatggtattgtcattttttaaaaaaattattttactcattctaatgtatgtgtagtggcatctcttgtgattttaatttgctattccctaatgataaattatgttgagcatcttttcatgtgcttattgaccattttaatatcattaactgtagatacaaggcaatttgtgtgtgtattgatattgttttaagctgttagtaattgacaaaatcaagctacatttggaaagaaaaagttttatatatagtcatatgttgcttaacaaccagtatacattctgagaaatgcatcattaggcaattttgtcactatgcaaatatcatagagtgtactgtacatcagtaggctttctgtgatatagcttattgctcctaggctgcaaaactgtacagcatgttactgtactgaatactgtaggcaattggaacacaatggtatttgtgtatgtaacatatctaaacagaaaagatacagtaaaaatatgtattatactcttatgagattgcctttgtacatgctgtctgttattgaccaacacattatgtggcacatgactatacatacatctaaacatatgcacatacgcatacgtatacacatacacaaacataagaaagcatggcatttaagaaaaggataaaggagatggggttagtttagtagaaagatggctgaagtatgccttaataaatattttaaactatggagaatattatactgtgtgtttaaaacatgttttaattttagcagcatcatgaactagacctaggcttaaggctagagaaatttcagttacattttaggaagattattaattattgaaaacccgtagcctaagagagcttacaaagggatgatttgagtatagttaaattataaatgtatatgattgattatataattgtttaaagaataaatacatttttatattctgtgtttttcatgtttaaacaaattattatttgtacatgagtgtgaagaagtaattttattgagtaactcaaatttctcaaacataatctaaacctttggcttgctaggtttcccaaattttaaaatacgacagaggcatataatctgtcacgtgacatttatacttgatgactagtagggaaaaacattgaaatgtagatgttgagctgtcagcttggcttactcactagtgaattacccctaaacatatgccaaaaagcatgtcattcaaattcatgcttcaggcatatactggttgagtatttcttatccaaaatgcttgggggtgctagggacccgaagaatttcagatatgggatttttttcagatttttgaatatttgtattatattcttacctgttgagcataccaaatctgaaaatctaaatccaaaatgccccaatgagcattttcttcgagtgttacgttggcactcaaaaagttttggagtttggtgaatttaggatttcagacttacagatttgggctgttcaacctgtacatgtatattatggatttggggagttgctcttgagtagctgaacccatacacatgaaatccacagatgttatgctgtctctcaaaatgcacaaacaaacagaaaatgaaacaaaaaacaaaatgaaaagagcaaggaaaaaatccacaaatgttttagattatatctctgtaaattctaatttttcatgactcagtaattttcagtaaataggatataaatataatccttgtttatgccaaagcaatctgaaagacacattaaaataaactttaagataatgaccatttgtaacgttgttgttttgtgtgacctggaagtagttttcagcagtctcagagtgcctcgttagcttgatactatttttggtttgtttctcttttaatttagaaatgattatagattcacctgaacttgcaagtacagagaggtcctgtgaaccctttacctaattttccccaatggttaaatcttatatttcaatatcaaaactaagaagttgacagtgtttcaatgtttgcatatatctttttttccacatatacacaatcaagatacagaaatattccatcaccacaaagctcgctctctctcactacccttttatagtcacacccatttttactgccaaccttgtcactaaccttaacccctgacaatgactaatttatgctccatctctattattttatcatattaagactgtcatataaatggtatcattctctatatgtgacctcttgagattggcttttttcagtcagcataatgcccttgagttccatccaagttgtcacatgtatcaatagtttgttcctttttattacagagtagtattctatgggatggatgtaccacagatgtttaatcattcacttattgcaggacattttcattttgtccaggtttggctattataactaaagctgctgtgaacactgtgttccagctttttgtgtggacctaagttttcatttctctaggataaatgcccaggtatgctgtggctaggtcatatggtaagtacttttttaggaaactgccaaactcttaattagaatggctgtaccattttatagtcctaccaagcagtgtgtgagaaatcaagtttctctacatcctcaccagcatttgctattatcactgttttttattttaggagttctgataggtatgtagtggtatcttattgtggtcttaatttgcagttccctgacaaccagttatattgaacatcttatgtgtttatttgccatcaaatattgtatatcctcttgggtgaaaatctctttatgtctttttgtccattttcttattggattgcttgtttttttattgtagggttttgagagttctttatataatctagatatgtgtcctttgtcagatatatggtttgcaaatacttcctgccagtttatggcttgtcttttcatccccttcacagggtctttcagagaacaaagattttaattttgatgaaatctagtttgtcaatgtttgtttctttgttttgatcatggttctgatgtcaagtctaagaactcttcctcaaagccctaggtcttgaagactttgtcctgtgttgtattttacaagttttataattttaccttttatgtttaagtccatgttgtattgagttaatttttgtataaggtgtgaagtttaaaggttcatatttttggctgtggatgttcaattgctgcagcatcatttgttgaaaaaaactatctgtggcagtgcacagtggctcatacttgtaatcctagtggtttgggaggctgagcccaggaattcaagaccagcctgagcatcacagcgagaccctgtctctaaaaaaaaaaaaatacccaggcatggtgatgcacaccagtactcccagctactctggaggctgatgtgggaggatcacttgagatcaggaggtcgaggctgcagtgagccatgattgtaccacttcactccagcctgggtaacagaggaagacactgtctcaaaaaaaaaaaagaacgaagaaaaaaccatacttcctttactgaattggttttgcacctttgtgaaaaatcagttggctatacttgttttgggctgtttttcagtttgctattctattcctttattccatatgtctttctctgcatcattactacatagtcttgattactgtagctgtgtactaagccttaatatcacattgaatgattcttcccactttgttctacctttcacagattgttttagctatttttatatgaattttagaataatcttgtctagacctacaaaagttttgcaataattttaataggtattgtattaaacctattactaatttgtagagaattgatatcatttttcaactgtaatacttttagcagcagagaattgataactttattgttttctgatcagtgaacacagtgtatgtctccattagttgatctttgatttcttccatcagtgttttgtagttttcagtatacaggtcctgtagatcttttgttagatttacacccaggtatttctctttttgagttattgtaaatgttactgtatttttaatttttgtttccatgtgttcattgctcaaatatagaaatgcaattgatttttgtgttgatcttttgtctgtaatcttgctgacttcatttgttctaggagtttgttttatagatttctggggattttctaagtagatcattgtactatccacaaggagggatagttttatttcttcttttatgatctgtatgctgtttgtttccttttcttgtcttgctgcaagaaaagtctccaactataattgtgaatttgtctgtttctcctttaagttatgtcaggttttgcttccgatattttcagctctgtttattatgcatgtttagtattgctatgtccctccctatacctcatactagttaaaacttaagagtaatatagttagtagcaatggtgagagtggacatccttaccttcttcctgatcttaggagaaaagcattctgtcttcattaactatgatgttagctgtaaggttgtttttttgggtgggggggttgtttttgtttgtttttgttttgagacaaggtttctgtctatcaccatgactggagttctgtggtgtgatcatacctcactgcagcctcgaactcctaggctcaagggatcctcctgcctcagcctctttgagtaggaatgcacagccatgttgtactttttttgtaattactcttcatcaagttgaggtggttcccctctattcttaattttctgagtttttatgacgaataggtgtttacatttgacaaatgctttttctgcctcagtttgtatcatctgttatttcttcttaatctgttaatatggtgtgctatgtagattggtttttgaatactgaaccaacttttcatgcctggaataaaactccacttgatcgtaaggataattctttttatatagtacttggttctgtttgctaatactttgttgagagatatttatgagagttactcttatatattcagttgttttcgtgttgtcattgtctggttttggtatcaggttaatatcgacctcataaaataagtcaataattgttttctattttctgacaaaaattatggggatttgtgttaatcttaaatgtttggtaaaatttgccagtgaaaccagttctggccttgaagatttctttttttgggagtttaaaaatcactaattaaatttcctcagtagttttaggattattcaaatgatctattttatattgaatgtgttgttgtagtttgtgcttttgtaagaattggttcatttcatcgtaatttcaaatatatgtgtagaattgttcatagcattttcttaatatccttttcatgtctttagggtctatagtgatagcttctgtttcacttctgatactggtaatttgtgtgttttctttttactagtcttgctagaggtttgtcagtttcattaattgttacaaataactagtgttttattcccttgattttctttttctttttttttttttcctattttaatttcatcttgcttttggtttgttttgctcttgttctactttctggaggtagaagcttagattactaatttgatttgagactttttttcttttctcatgtaagcatttagtgttataaatttcgctttcagcactgctttagttatacaaactttgatgtgttatattttcatttagttcagtatatttttatttcagaattcatctttggctcagctagaagcatgttgtttaatttccatgcgtttggaggttcccattatttttctgttgtggatttctagttcaattatgttcaggaaatataatctgtatgatttcaattcttttaagtttgttatgctttgttttatgtctcaagtagactggcccttgaagagaatatgtactctgctgttgttgggtggagtgttctataaatactgattagattttgtttttcgatgaggttcttgtattcttctttacttttgctgattttttttttttggctatgtggttatcagtttttgagaggaaggttgaaatctccaactataattgtggatttttctgtttctccttcagttctgtcaggttttgcttctgatattttcagctctgttgtttattatgcacatttagtattgctgtgcccctgtctatccctcataatcttctttgctctgaaatctgttttatctgatactaatataaccactcttgttttattttgattggtgtttgcacggtatatagtttttcatccttttacttcaactcacctatgttgttgtatttgaagtgagtttcttgtagacagcatgtgattgggtcatgttttttgttttattttttatccacttaatttttcttttaaatggtgtatatagaccgtttatatttaatgtaaggcttcagtctaccattttatttttttgttcagttggttctctttcattttattttcttttgtttatgatttctttttcctcccttcctgtgggttagttttatatttttgaaattctattttgattcatctgtagttttttttagtgtttctctttgtatagctttgatagtggttgctgtaggtattacatcatacctatacacacacttattacagtctactggtgtcattttgccagtttaattgatgtgcagaaaccttacctctttatatccttttgattccctttttataatatgactgtctcaagtgtttaaccatatcagtcagtgtaatcattctttcttcaaccatagaatataatttagaaaacacaacagaatgaaattgttgtattgacttatatttattatttgctgttacttctccctaatgtttcagtattcctttttatatcatttgctttgtatttagagaacttattgtagccattcctttttttttaagcagggtcttgctctgtcacccaggctggcatacagtggtgcaatttcagctcactgcagccttgacctcctaggcttaagccatcctcccacctcagcgtcccaagtagctgggactacaggtgggcaccaccacacctggctaatttctgtattttttgtagagatggggttgtaccatattgcccaggctggtcttgaactcctgagctcaagtgatccacctgctttggcctcccaatgtgctgggattacaggcgtgagccaccatgcctggcctagccattctttaacagcaagtccgctggcaacaaatgatttccccttcattcttgaatggtatttcagctggatatagaattctgggttggcaattctttcctttcagtacttgaaaaatatgtgtcactaccttctcgtctccctggtttcttatgagaaacctgctgtttgaattgtttttccccccttagataaggtgtcgtttctctcttctttcaagattatttttctacgtttttggaagatgactgatatattttgtcacgtatttgtttgggtttatcctgtttgtggttcattcagctacttaagctgcaggtttatgtttcttaatacattttggtaattttcagtcattatttctttgaatttcagcccctccttccttctcctcttcttttaggactctaatgacaaaaatattaaatcttttgttatagtcccatgggtacatgagtctcttttccattccatttttctctgttgttcagattaggccatttctgttgtttagtcttcaaaatcaccaaatcttctgttctctgctttctactgaacacattctgagtttttaatttctgttatatttttcagttctaattttttttttttttgagacagggtctcactctcgcccaagctggagtgcagtagcaagatttcagctcactgcacactccaccttccaggttcaagcaattctcatgcctcagccacccaagtagctgggattgcaggcatgcaccaccacacccagctaacttttgtaattttagtacagacggggtttcaccatgttggccagactggtttggaactcctgacctcaagtaatctgcgtgcctttgcctcccaacttgctgggattacaggcctgagctgctgtgcccagcctaaaattttcagttgattctttttttatgtcttcttgtttctttgctgagactgtttgtttcatttgtctcaagtatgttaataattgcttatgaggcatttttataatgactactttaaaaatccttgtcagacaattctaacatctatgtcatctcagtgttggtgtctgttgattgtcttttctcgttgaacttgagatttttctggttcttattatgagaaagttctatttaaactgggcatgttggttactatatcatgagatgctggattttatttaaatcttttggtatagtaggcatcttctgacaaatgttttggcagggcatgagacgccctaccacattgttgccagttgatagtgggagttcagtctcctcactaggcctctactggtattaccttggctgggtggggggacagaggctcaagattacctgtttacttctttccagatggcctccactgacatcacagggggtgactcattagttattattggatggtggtataattccagtaggaagggaaggggttttcttgtaactgctgggtgtgggtggatgtattgtttccctacatggtcttcattgacactgttgggtcacagggaggaccttgtgaaatcagacttgtctgaccccaccctggtagtgccttgttataacttggttacggtagaaaggtgaggattcagctgcattttttgctgtactgtttggttggaattgagtggttatcctaacattttctgtcttgctgtgctgcccctttcctggtcctttggctggagggtaggcttttcttggagatttttttgacagcaccttctggagttcttcagcaaccaatctaggatacatgaggcagaaagaaagtctgtaacagctgggctcggtggctcacacctgtaatcccagcattttgggaagtgaggcaggaggatcacttgagcccaggagttgaagaccagtctgggcaacatagtgagaccctatctccacaaaaattttaaaaattagctgggtgcattagtgcatttctggagtcccagctacttgggaggctgaggtgggaggagtgcttgagcccagcaagtcaaggctgcagtgagctgtgatcatgccattgcactccagtgtgggtgacaattcaagaccctgtcgcaaaaaaaacaagcttttaaaaataaaaaggtagcccatgaaactcagtaccacattatcctttatatcctgagggccctacccatctgcctcatccttctgacttttcagagctgccttctgttccttgtatatatacaagattggtaatttgggcttcattaaaattaaggacttctgttcaccaaaggtgtgatagttaattttatgtgtcattttgactgcactaagagatgcccatgcagctgataaaacacttctggatatgtctgtgagggtgctcctgaaagggtatttgaattaatagactgagtaaagaagattgccctcatcagtgtgagtgggcatcatcctacccattgagggcctgaatagaccaaaaatgcagaggaagggcaaatttgctctctctttctttgagctgggacatccatcttatcgagcccttggagattggtaatcatggttcttcagccttcagactcagacagactaggacttataccaactgcccccacccacaaccctacccccggattttcaggcctttgaactgggaccaggatttatacgattagctccctggttttgcagcttgtgaacagtacattgtagcacttcacagcttccataatcacagtgaggctaatgccgtaatatgtctacacacacacacacacacacacacacacacacacacacgcatgtacacacaagttcttaactccttttggttctgtttctctggaaaaccctgactaatacaaacgtcatttcacattaagagtgtaaaggcaagccacaaagttggagaagctatttccaatatatagatataaaaaggtctcatccaggatatataaataactcttaaaaatcaattggataaactagacaacccaatagaaaaatgggcaaaaacttgaacaggactttacaaaagacgatatctgaatggccaataaatgtatgaaagcatggtgatccttattaattatcagagaaattcaagttaaaaatggttttgacaaaagatgcaaaagcaattaaatggagagagcatagccttttcaaaaactggtattgaaacaattagactttcataggccaaaaacaaacctttacttaagccttacccatattttaaaaaatcaagtcaaaaggaatcataaatctaaatgtaaaactattatacttgtataagaaaacagaagaaaatcttctgcatctagggttagtcagagttcttagtcatgatgccaaaggcatataacccattaaataaaaaatcaataattggacttaatcaaaaataaaaacttttgtctgtgaaagactcttagggaaaggaaaagacaacttatagacttggagaaaatatttgcaatttgcatatttaacaaaggactcattcagaatgtataaagaactcagaaagaaaacaacccagttagtaaatgggcaaaggacttgaactgacacttctctgaagaaggctatgcatgtcaaataagcatatgaaaagatagcatcactagccattagggaaatgtaatttaggtgaggctagtggctcaggcctgcaatcccagggctttgggaggctgaggtgagaggatcacttgaggccatgggttcaagaccagcctgggcaacatggtgagaatctgtctttacaaaaaattaaatacaattagctgggcatggtggcacatgtctatagtcataactacttaggaggctgaggaaggaggatcacttgagcccaggaattcgaggttgcagtgagctatgattgtgccactgcactccaacctgggagacagagtgagatcttgtctctaaaaaagaaagaaaatgtaatttaaaaccacatgagttgtcacttcacacctatcagcatggctaaaataaaaaatagtgacaacattaaatgcttgtgaggatatagagaaactagttctatcctacattactagtgggaatataaaataacaaccattctgggaaacaatttggcagtttaaaaaaacaaaactaaacaactaaacatacttgtcatataaccttgcaattacactctcagaaatgtatcccatggaaatgaaaacattttcacataaaaacctaaacacaaatgttcacagcagcttttatttagaatggtcctcaactagaaacaaccaaatgttatttaacatgtgaatggataaacaaattgtggtatatctatgtagtggaatgctgctcagcttactgatccaagcaacaacttatatggatctcatgctaactggaaaatgccattcttgatttgacagaagtataatgatagagaactgatctgtagttgacagggtttagggttaggggaagggcatgaatacgaagggataacacaaggaaggtgtttttttgtgatgacagaacagttctgtatcctgctatggtaatggttatgtgattctacatgcatgataaaattttgtagaactatacatcaaacaaaaaactgatgaaacccaaatgagctctgtacttgagttcataccaacatcaatttcctggttttgacaatgtattgttgttatataagttgtaggttaccattggaagccgagagtgaaggatatatgggagctcgactgctgtaatttttgtgaaccttaaactgtttttgaaaggttataataaaaacaaaaagatagtaccatgagttgtcaaggacctgaacaactggaagcctcatataatgctggtgggaatatgaattggaataactactttatagaacaatttgttcagtttaacagtgcatgtaaataccctatgactcagcaattccactcttagatatgtacctgacagaaatgcttttatcaaaagacacgtataatatggtttataggagcattatgcaaataatgctttatattttaattatgtttgttttgagcatatactttaatactaatacttagtattaagaatatctaaaaaaggtattgggtagtttatctcaatatggacttgcgtattgaagttctttaaggtttcatgtgtgttgtgtgtgtgtgtatgtatgtatgtatgtgtgttttttaacctacatagtttataccattctatatgcttgattcttttgtatagctctatgccatcttttgcttatgtgggatagatattaataactggaataattttggaccagcatttacccatataccttcaagtatgtcctctaatgaaagatgctacagtttattctctgtaatgactatgtgttatagaggtataaagatgaaacttgtcatcataatcccactgaccacagagaaccactattaacattgtgtttatatgttttgtttttaatgcatttgcaattgtatttagtaaggctctatattctgcttttcttccgcataacatagtattttggatttttaatggtaacatagccagagtgtaatttacttctctatgttatacatattgtttaattttcaaccttatgctactgtaaaataacactgtgataaatacattttcttcaaaattggtcaacttttgtgataatttctatagtctgtattcatagatgtgtggtagctccaaattgacataaaacatgaatttagtatctctatttattttataccaggatttttctttagtatataatatgattggtagactaaattgtaaactttttcccatcatttaaatttagagtttctttgcattctagtgtatagtgaatgctataaatgtaattagtatggcattttagtcattaattttctttcatgaaagaaaagaaaaacattttgtgttgattattgagagcttattatattccagggatttttgtcactctgtaagttaccagcaataagcaaattattaaataaattactgtacaatcatccaatgaaatactatgcagctaccaagcatgatgtttaccaagaaatttggggaaatgttcataatacatattgtatatacagttactatcctgactgcaaaatttaaaaagtatatatttagaaaaaaagaaaactgtaggaaatatatcatgatttgaatggaggttgtttctggggagtggaactgagtaattcttttccttagagttgtttttattttcaaaaagtgtttatccaatctttttcaaattaaattttcattaatatcaaagtaatatatttacatatttttaaaaaacagatagttttacaaggcttcaaataaaaaccagtcccgtgaccaaacctctttctacctgtgatttctactttctggaggtaaccaatttcaactcttggcaattcttacttacttacatacatcctttctaaagtgtaaggtagtaatttaccacaagcacaggcacacttttcctcattcgttttcccagtataatttttcataatatttgcctaaattaatttgcagtattttctttattgtggctacgtaaatatttgtaagccacttgaatactgtgattgtttttcctttttcgtgtacttgtttattatattttgctgaagtattcattcgtttttaccatttgcttagttttctatatacctatcaccaattcattcctaaattatcctgtagaaatattgtaaatcctggccaggcatggtagcacatgtctgtaatcccagcactttgggaggccgaggtgggcagattaccttaggtcaggagttcaagaccagcctggccaacatggtgaaaccctatctctactaaaaatacaaaaattaaccaggcatggtggtgttcctgtaatcccagctgctcaggaggctgaggcaggagaatcacttgaacctgggaggcagaggttgcagtgagtcgagattgcgccattgcactcccgcctgggtgacagagtgagtctccgtctcaaaaaaaaaaaaaaaaaaaaaaaaaaagggaaagaaagaaagaaaccttataaatgcttgtgttccaacaaatcaggtaatctatcagtttctttttttttttctttagacacccttcctggagccccgtgtctgtcttcttgcttctgttttatctacctcagtaccttgcatctgtctaacgcctctccttacattctttatgctgtattataaatgttgagtcacccctacatattcacctacttttgcattttccttcattttgatgtacttagtgcccctagctgtacccaatacaatatagactttcaggttacatataaattctctaaatttattcagaaatctgtagataaaaccttgactacattgtaaatatttgatttttcatttcatctttattcttaaatcagacgattttattttccaacaataggattcttcctgggcatatgtattatcatcctgactccttagataatatattattttcttcagtaagtaagaaatgaattctctgaactcttgatagttaaaaaaaaactaagtatcaaaaagtcatattgtaattaaaatatttgtaaagtactaattactgaagcatttattctatattttcattttcagaggacgattatttatcatttctactaaagcaggatctctaggaattaatctggtagctgctaatcgagtaattatattcgacgcttcttggaatccatcttatgacatccagagtatattcagagtttatcgctttggacaaactaagcctgtttatgtatataggttcttagctcaggtaggtttataattctctttttcatattgaaagtttatgtgaaactgataatattttagagatatggaacatatgtgtattacagagagggaaacaaagttggaaataccatttctgtacataaagcagcagaagtcagttttggcttttcttgattttctgttttgtagtgtatccatttctgtgatgtcatctttctcaggttgagattgttttgcatgaacacatttagcagatgctacccccagcagatgcaacccctctcagcctgcctccaaatctgggcttcttaaccagaaactgggttttttttggtagatccttgcttatttgatcttctttagtacataagttgattgacaactttatgtaaactctttcctgttatttgtttatttattcaattttcttttatttttttctttcctgttaagtttaaaacttctgtacattctcatttataatttgtattatatttaatatacatttaatataatgtatacatttaattaatgtagtttatatgtaatggatatggtattttatatttgttttctgtcttgaaattatagaaaataaaacgatataaaggcattttatggtgtttgttgatagcttattatattacattgaaaaggaatcaaactgctctcttgcattctaacttcaatatttacctaaatgttttttgtgtctgtccctttatttctgtttactctggtatctgcctgctgtcctcctcctacagagtacagaaataaataaagcaacacttgaatgcattttggtcagttaatatagaataattatcagtaatgtaattttatttattatggtaaactatgctaaacagatgaaatctttcatgaattaagcaaaattgctgatgagtttttctttatggcaatatactaccataaagttttaccatttcatattaaccagtaaccgtatttatccttgattaagtttcatgcttacaaaattttatttttttgtatattcttccttctttttacaaagggaaccatggaagataagatttatgatcggcaagtaactaagcagtcactgtcttttcgagttgttgatcagcagcaggtggagcgtcattttactatgaatgagcttactgaactttatacttttgagccagacttattagatgaccctaattcagaaaagaagaagaagagggatactcccatgctgccaaaggtaaacatatttagattattggcttaacaaaccaacgtggactaaggaaattttactactgatatcaaatttagtcatctgattaaggctatatttcagaatttttcaaggataataaaatgatatttaatgaattttgtctagaaaattataaatgatagggtgcttgatctgttctccatatagcaccacaaaaagatagtatattctgaaacacatattttatgccacatataatatatctaattagcatattttctaatatactttacacttcaacttttataagaagtagcagacaaattttccaattagaaaaggggaaattacttcgaatttattcatatggtgaatttcgggttgcaggaaaccagttaattttataaacgtgtattatttgctgactttgagaggtatactgtgagagaatactaagaaaaacaagacattgttcagattatctccctcaatccagcagctgaaaagcagatagtcctgttttcattttcaagatgaggaaactgaggttcagagaggctaggtaacttacccaagtttacacaccatattgtaaagctggtcttcaaatcatatctgaccaactcaaaagcattactcttaatcattataattttttgtcctccaaatggagattagaaagttattttcaaatacaagaagcaaagcagaggacctgggatttccagaattgaatgacatttaggatgctttattttagtttaaataaatctggactttaaaatatagaatgctttcacagtcagtaatattgtgtgatataactgttaagatggtataatatagtcagtttagcttatgtcttgtgaaggttaaatactcctcaaatttatggaaaactttaaggtttacaaaggcctgtctcatatacattatctcaggaagctgagatttagagtttgtgattacacaagggtacatgaccagtaagtgttacagctagaatttgaacccagtagttttctttctctcttctcccctccccctctctcccccacccccacctccctcctcccctctctccctctccctcttcccctctctccctctccctcttcccctctctccctctccctcttcccctctctccctctccctcttcccctctctccctcttcccctctctccctctccctctctccctctctccctctctccctctctccctctctccctctctccctctctccctctctccctttccccctctccctctccctctccttctacctctttttgagacagtctcactgtgtcgcccaggctggagtgcagtggcgcaatctcagctcactgcaacctccacctcctgggttcaagcgattctcctgcctcagcctcccaagtagctaggactataggcgcctgccaccacgcccagcaatttttttttctatttttagtagagatggggttttactatgttggccaggttggtcttgaactcctgaccttgtgatccacccacctcagcctcccaaagtgctgggattacaggtgtgagccaccgcgcctggtccttttttttgttcttttttcttttttactttaagttctgttatacgtgtgctgaacatgcagtttgttacataggtatacatgtgccatggtggtttgctgcacctatcaacccgtcatctaggttttaagccctgcatacattaggtatttgtcctaatgttctccctcccctttccccccaccccctgacaggccccagtgggtgatgtaaccctccccatgtccatatgttctcattgttcaactgccacttatgagtgagaacatgcagtgtttggttttctgttcttgtgttagtttgctgaggatgatggtttccagcttcatccatgtccctgcaaaggacttgaactcattctttttatggctgcatagtattccttggtgtgtatgtgccacattttctttatccagtctgtcattgatgggcatttgggttggttccaggtctttgctattgtaaatagtgctgtgataaacatacgtgtgcatgtgtctttatagtagaatgatttataatcctttgggtatatacccagtaatgagattgctgagtcaaatggtatttctggttctagatccttgaggaatcgccacactgtcttccataatggttgaactaacactcccaccaacagtgtaaaagcgttcctatttctccacatcctcaccagcatctgttgtttcctgacttatttaatgatcattattctaactggtgtgagatggcatctcattgtgaacccagtcgttttcaaactgtgttacaaggaaccccaggagatgctttagggactgctaccatgtggctaagcaagtacagaggggccaggcaatgaacactctgatcccgacatcccatttcagtcagagcccctcttttatctttttaatgtattggacttcaacataagatttaattcaaagagaggacgtgcctgctttttaaaaaaaagtttttaaaacacaatgccatgttgcctttctatcacagtaactaaaaactgtgagagatctatccaggaagtacaatcagatacctgaaggagctgataatccggttggggagaaaaaagtaacattcttaaaagggaaagaatgaagtgctgatgtgactggtgctgagtatctttgcttataataggggaaggatggagcattcagatacaattttgatgggagaaaaatcagacttggttggcctataaaagatggttagtatttaattggataaagggaagaatcaagtgtgaatgagagattgaacagtttgggcaaagggacagaggtaagaatttatgtaccaggcttaagggatgatgaaattggcctggcattgatgaagagtggaggttagataagtaggaaagccatgaaaggcaaatggaggcattgcgctttaaaataatgtttactataagttcttgaatgggactgttgtatgatgaatctgggcttttagaaaattagcctggagtgattattgtgggctcgatcagacatttcatgaaaataaatggtagaactcaactgataatagactagcttttaaagggataggcagcgaaaatgttttttttttctttgagacagagtctcactctgttgcccaggctggagtgcagcggcatgatctcggctcactgcagcctccgcctcctgggttcaaatgattcttgtgcctcggcttcccgagtagctgaggttatagacatgtgccaccacacccagctaatttttatatttttagtagagatggggtttcaccatgttggccaggctggtctcaaactcccgacctcagatgattcacctgccttggcctcccaaaatgctgggattgcaggtatgagctaccttgcccagccaaaaaattttatcttaaataatgaagcttagttattcattcattgatttaaactttttggggtgcctatgatatgccaattgtactggtctctaaggatacactcataaataagtctaggattctgttcccaagaagctatagtcttaaaagcttaccttaagcaagtaatatagtaagagttacagatcctataatagaaatctgtgcaggtgccaaggaaggaatattcatttctttcttggaaagtttgggatggatattgatgtgcttgaacagatgttgaaagtagaactgggtaactgtttgcattgctaagacggcagaagagcaaaaggcctttcaagatggggaatagaaaaaaagaagcacatgcataacatggcatgataagtttgaagaacctcaagtagttaaaaataaataagagtataaggagatactggtagagtaagggtgagtgtgggaagaggtaaaagtaaagactggaaaggtaggtgggaatcaaatcatagaaattagtttgtaagttgtgttataggttgtggtatctatttaacaattttaagcaagagactaccgtcacattttcattttagaaaaaaatcattttatgtatcagtgtggaggatggatcagagaaaagaaaatggatattaagatacttgttaggatgctactaaaatgattcaggtgggagaggtaatacaggcctgatatgagatgttagcagtggagacagagaagtactgggcataatatagatactcagtaattattaatgttcccttgatttataattagaatttcatgtaagatttccactagtttaatagaatttgaaaactggtcatctgaaatgggtacgttttgatattcatggcgagggatttcttggtacgtttggatattcatggtgatggattttttggtatttgaagctgcttttattcaaggtattttgaagttggttcctgttattatagtacaattgcaaacaccttccttcttgtccatgatttttaagatgaaagactgctaaaaatgatacattttcatcctttcaattgctgttatctaagtaataattaaattccatgcttttatgaggtttttttgtcttttggtagtcccgaaagcacttctttttaacttacttgatatgtgattactgtatctctttctgcttcatcacttcctccttaggtcattattacttaattcctgttcctccatttctcttcttgttcagtttttacttctctacttctaatttgatttaatacctcagacttaattagccacctgactatttttcttgtctttgtacctctttaaaggcaagaactgcattctgtgcttccttcagtatccttagtgaataatgcaatgcttggcacttttttattattattatactttaagttctggggtacatgtacacaacgtgcaggtttgttacatatgtatacgtgtgccatgttggtgtgctgcacccattaactcgtcgtctaggttaggtatatctcctaatgctatccctcccccctccccccaccccatgacaggccctggtatgtgatgttctccttcctgtgtccaagtgttctcattgttcaattcccacctatgagtgagaacatggggtgtttggttttctatccttgcaatagtttgctgagaatgatggtttccagcttcatccatgtccctacaaaggacaggaactcatcattttttatggctgcatagtattccatggtgtatatgtgccacattttcttaatccagtctatcattggtgggcatttgggttggttccaagtctttgctattgtgaatagtaaacatacatgcgcatgtgtttttctagcagcatgatttataatcctttgggtatatacccagtaatgggattgctgggtcaaatggtatttctagttctggatccttgaggaatcgccacactgtcttccacaatggttgaactagtttacagtcccaccaacagtgtaaaagtgttcctatttctccacatcctctccagcacctgttgtttcctgactttttgatgattgccattccaactggtatgagatggtatctcattgtggttttgatttgcatttgtctgatgaccagtgatgatgagcattttttcatgtgtctgttggctgcataaatgtcttcttttgagaagtgtctgttcatacccttcactcacttgttgacggggttgtttgtttgttttcttgtaaatatgtttgagttcattgtagattctggttattagccctttgtcagatgggtagattgcaaaaattttctcccattctataggttgcccattcactctgatggtagtttcttttgctgtgcggaggctctttagtttaattagatcccatttgtcaattttggcttttgttgccattgcttttggtgtcttagacatgaagtccttgcccatgcctatttcctgaatggtattgcctaggttttcttctagggattttatggttttaggtctaccatttaagtctttaatccatcttgaattaatttttgtataaggcgtaaggaagggatccagttccagctttctacatatggctagccagttttcccagcacaccatttattaaacagggaatcctttccccatttcttgtttttgtcaggtttgtcaaagatcagatggttgtagatgtgtgatattgtttccgagggctctattctgttccattggtctatatctctgttttggtaccagtaccatgctgttttggttactatagccttgtagtatagtttgaagtcaggtagcgtgatgcctcccgctttgttcttttggcttaggattgacttggcaatgcggggtcttttttggttccatatgaactttaaagtagttttttccaattctgtgaagaaagtcattggtagcttgatggggatggcattgaatctttaaattaccttgggcagtgtggccattttcatgatattgattcttcctatccatgagcatggaatgttcttccatttgtttgtgtcctcttttatttcattgagcagtggtttgtagttctccttgaagaggtccttcacatcccttgtaagttggattcctaggtattttattctctttgaagcaactgagaatgggagttcactcatgatttggctctctgtttgtctcttattagtgtataggaatgcttgtgatttttgcacattgattttgtatcctggactttgctgaagttgtttatcagcttaaggagattttgggctgagacaatggggttttctagatatacagtcatgtcatctgcaaacagggacaatttgacttcctcttttcctaattgaataccctttatttctttctcctgcctgattgccctggccagaacttccaacactatgttgaataggagtggtgagagagggcatccctgtcttgtgccagttttcaaagggaatacttccagtttttgcccattcagtatgatattggctgtgggtatgtcataaatagctcttattattttgagatacgtcccatcaatacctaatttattgagagtttttagcatgaaggttgttgaattttgtcaaaggccttttctgcatctattgagataatcatgtggtttttgtctttgcttctgtttatatgctggattacgtttattgatttgcatatgttgaaccagccttgcatcccagggatgaagcccacttgatcatggtggataattgcttggcacttttatctagacttttttgaaattctagttgtctttatagtgttccttagtgatccatatatcattgaaaagcagtgttggaattagacttacttttcaagcagtaaaattgagatgaagattggttagtctgtcacagtgggtttgtggaaggaagagaattcgagctttaatttatatcttcagttagattcttaatttgctatcttagcttcattcaccactctactcattactttattatttttattttattttatttcatttcatttcatttcatttcatttcatttttgagacaaggtctcgttctattgcctaggctggtcctgaactcctggcatcatgtgatcctcctgccttggcctcccaaagtgttaggattacaggcatgagccactatgcctgtccactttattattttaaatcccctcattggattcttactgttgctgcttttcccttttggaaatataatagccttgacgtcctgtgaacctattttttaataagttgatttaagggcctcctgaatcatctctaccaagtatctgtgcatctttttagttgttcaggataatgtttctcagccattttgaaactgtagcatgatctagacttataagtagtttaacacaagtttctagcaataccgatttgttaacttattcttaatggcttgtgtttaaaatgttaaattaatagctaacctctgttaacgtttatgtaaatgttaaattgatagctaacctgttaacatttatgtaaattatgttagagaaagtaccttttctggtaataaacttattaattatacagatatcagagatgaaaattttggtcaaggtcatgttttattttattttgagacagtctcactctgtcacccaggatggagtgcagtgctgcaatctcagttcactgcaacctccgcctctggggttcaagtgattctcgtgcctcagccacctgagtagctgggattacaggcatgcgccaccacgcctggctaatttttgtatttttcatagagatgggctttctccatgttggccaggctggtctcgaactcctggcctcaagtgatcgacccacctcggtctcctaaagtgctgggattacaggcatgagtcaccacctgcagccaaggttatattttataatatgcttaagtgggtgttttgttcctcttaagtacagtatacacagcctactctgtaccttttattaagaaaacaaaagccaataaaactggcatagaaatgtttttatacttcccttttccagcactggactacgtatgtctttttaaatgtgaactacttgatgattacagggagaacaaaatggggatttaaattaaagtatcttaagtgaggctttaggtttgttttctctacgctgaatttgtgtgcagtgttctcccctttctttagtcctgtattcaaactttaatacttcaaagcataatttactgaacagagatgttattgtacagttttattagccggcagatggtaatataaggtttcaccttagtcattcttaataccagtgtgaaatacattccattaaaataatttgatgtaaagtatgaaatagctaatccacttatttcaggaactttctggtaacctgcctacatttacttttgagaataaaggttcaaaataacacatttaattgtagagcaagtgttagtagcctatggggtatgaaccacatggtggtatgtgaacctaatatttgttgtcatattcttctaggaagccatgctcataattgaagcatatataaggtttgatgtcattgtctcctacttctttgccttttttttaatcacaggttttggatttttttgtttaataaaacaagtttgaatattattcctatctttgtatttactagtataaaatgattgttattcatctgtatatgaatagaccaccagaaaaaataacgggcatcagaaaaattgtttgaattctaccatttctttgcagattacaaaagtgtcctattcgttttttgttggggtgattgatgccaagtaaaaagagcagcttgtttaagccctctcctaaataacttgccaaccacccttttcagatgtaatcttaggcaaaccatgtaagctttctaagcctcatttttctgaagaaaataagaatagtgccagtacttctctcacaaaggaggtaattcatgtaaacatactacctagcacatagtaagtgttcaaatgttagctgctgtttttgtttccataattgttattaatattaccattatagtaggttcatttctctgaaatacttatggacttacatttttggaatttcagaggagtcatgtgaggtcctgatcctgagtagaaaattaagcttgatatatgacagaccagtagaaaactaaaaacatttaggagccagaggagatcatctcagctaagctgcagaagacataggtatttgaggcttgcattcccccagagatcagttgtaatcaggaaggaatatattagatattgatcttcactttcaataaagttagcatgcagttgacaaagaacattgaaaggggttttttttcttaaataatataagcaactttagaataaagtctaccttatagccagctgatgcttctgtagtaattttccaaagtaaagagatgcttctattttccctccacaaactacacaataaatacttgttaacagactgaccatactttatttatagtgctgttttgtcttattttttattgtaccaccttatgacacaagaaaaactattaaggagccatttaccaagtcttttagggaaaacatttgggttacagaaaccatggagccaatgataccctgagatggcagcctccctaacgctggcaagctgtcttataaataattgtccatggaaacatcaatgtagataaggcagccttgctggcagtgttggggtggagggcagagttggggatggtatgcaagattctattggggagagtttaggatagactttaaaaagtgtctccttatggagagttggaagtactagaaatatttgctgcttaaggtcatagaaatcctgaaatttaaaataccaggtttgcatttaataaatgctcatttaataaatgaattaaatggtaagcttttttactttataggcaaattaaaatatctattctctctagaatatgaacttcctattagcctaggaaggcaagaactatattaatgcatcttcatcactctatccccaatacctggcataatacataatatagcacatagcaagtattcaataaaaatgtgctatgtgaacaaatgaatttttgtgctaaaattgcaagctaaatgttgtgaggcaatagttgacatgcctttgaaatagtgtttttccttgtgtgtacttcttggagaatcacctggtggcttgattaaaaatgcagattcctagtcggacacagtggcacacacctctaatctcagcactttgggaggccaaggtgggaggattgcttgaatccaggagttcaggatcagcctggtcaacgtggcaagactctgtctctacaaaaaattagccaggcttggtggcatgcacctgtagtctcagctgttttggagactgagttgggaggatcccttgaacctaggaggtcgaggctgcagtgagcaagtttgtaccactacactccagcctgggtgacagagtgagaccctgtctcaaaaaaaaaaaaatgcagattcctggcttcatctaagacctactgaatcagaatttctggaggtaggccttgggaatctatttttgacaaggtctaccactcttgtgtgtacaaggtatgtagtagtataatttgcctttacaatagttatcagctaaacctttgaattaaaaaaacaaacagtatctaagctttattgagcaatgtttatgccaggaactgtgctaaggattttactagcattaccttatttaatccttacaaagcaggtacaattttttctattttctgatgaaattatggcatggaaagtggtggcaccggggcttgaactcagtgctgtgactccagactccacactctttaaccattacactatactatcctgacattaatattctatatgattaagcttgcggagaagtaaattgaggtttgatatgactttacaccgttttaatcaatactgtgggtttatggaaaggcacagtgttatcaaggtgtataatattggggagggtatggatttcatctagttactacacaatcttacagtgtcagagctgatcctagtcctccttgattgtctttggtgctgaacttactgatccttagccctaagtcagtgtagcagagtggttaaggacaggggtcctggggcaagaccagggtttgaatctttatcttagtcaaaatatctgacttctatgcctcagttttttcattatacttctgagaaatgtatgtccattagttcttcaaaaatatcatcctttgcatttttatttttgtctctttctgagactgttactatctgaatgcctgctcttctagcctccatatcttttagcttttcttttgcattcctatttctttattctttcttactatcttctggaagagtatctcagtcttatctcctaattcactaagatattcaactgtaccccgcttgctgtttatactgagttattttttcaactgttatttttttttcctaatatttcatttagactcttaaatttgtttgaattccatattggtaatatcttcctttatttcatctgtttcagtaactatgttttagataaaatatgatgccagttgttaccccagggatgtctgtgtgtgtgtacatgcacatatgcacacattgtctataagtttctggaattcatattgccttttcccttctatagtttctgcagagttggttttgagggcaggagctagcagctcatgctggtttgccatgggagtagtttcgtccataatatggggatgatgattatatgtgcttcatagagttattatgaaaaattaaatgaagttcttagaacagtgctggtatgcagccatgcattcagtttagctttaaacaaatctacagatggctaagtttccagatcccaactttcgaatatactcttttgaaaagctagattatggttttgatttgcatttctctgatggccagtgatgatgagcattttttcatgtgttttttggctgcataaatgtcttcttttgagaagtgtctgttcatgtcctttgcccactttttgatggggttgtttgtttttttcttgtaaatttgtttgagttcattgtagattctggatattagccctttgtcagatgagtaggtttattcacgatagcaaagacttggaaccaacccaaatgtccaacaatgatggactggattaagaaaatgtggcacatatacaccatggaatactatgcagccataaaaaatgatgagttcatgtcctttgtagggacatgggtgaaattggaaatcatcattctcagtaaactatcgcaagaacaaaaaaccagacaccgcatattctcactcataggtggaaattgaacaatgagatcacatggacacaggaaggggaatatcacactctggggactgttgtggggtggagggaggggggagggatagcattgggagatatacctaatgctagatgacgagttagtgggtgcagcgcaccagcatggcacacgtatacatatgtaactaacctgcacaatgtgcacatgtacgctaaaacttaaagtataataataaaaaaaaagaaaaagaaaagctagattatagagctaatcagaagggggaagggtactgaccctctcttttagagtttgagctgtcccaggattctgccatatattctaatgttttctgtctctcttgttgcaaggaaaatatgaaaaaaattgttaattaattttcaaaaattcccattgtgaacatattcaaaccagaaaaatatattcatatacccatccgctagatttaccaattattgttttgccacatttgcctcatctatttttctgaaatcttttaaattacaagtatatggcatttcacttgtaaatacttcagtatataatacatctttgaaatagtaagacatttcttatataattacaataccataaaatgaataacttcctaattccctaacaccatctcataacacatccatattttgattaccctgcttgtgtccaatatatatatatatatatttaatattctaagttctggggtacatgtgcagaaagtacagttttgttacatagttatacacatgccatagtggtttgctatacccatcaacccgtcacctacattagatatttctcctaatgctatccctcccctagatccccacccctcaacaggccccagtgtgtgatattcccctccttgtgtccatgtgttctcattgttcacctcccgcttatgagcgagaacatgtggtgtttgattttctgttcttgtgtcagtttgcagagaatgatggtttccagtttcatccatgtccctgcaaaggacatgaactcgttcttttttatggccgcatagtattccatggtgtatatatgccacgttttctttattcagtctgtcattgatgggcatttgagttggttccaagtcttcgctattgtgaatagtgccgcaataaacatatgtgtgcatgtatctttatagtagaatgatttataatcctttgggtatatacccagtaatgggatcgctgagtcaaaatggtatttctggttctagatccttgaggaatcgccacattgtcttccataatggttgaactaatttacactcccaccaacagtgtaaaagcattcctatttctccacatcctctccagcacctgttgtttcctgactttttaaagatcgccattctaactggcatgagatggtatttcattgtggttttgatttgcatttctctaatgagcagtaatgatgagtattttttcatgtctgttggctgcatatatgtcttcttctgagaagtgtctgttcatatactttgcccactttttgatagggttgtttttttcttgtaaatttgtttaaattctttgtagattccggatattagccctttgtcagatgagtagattgcaaaaattttctcctgttctgtaggttgcctgttcactctgatggtagtttcttttgctgtgcagaagctctttagtttaattacatcccatttatcaattttggcttttgttgccattgcttttggttttttagacatgaagtctttgcccatgtcctgaatggtattgcctaggttttcttctaggatttttatggttttaggtcttatgtttaagtctttaatccatattgacttaatttttgtataaggtgtaaggaaggggtccagtttcagttttctgcatatggccaaccagttttcccaacaccatttattaaatagggagtcctttccccattgcttctttgtgtcaggtttgtcaaagatcagatggttgtagatgtgtggtgttatttctgaggcctctgttttgttccattggtctatatatctgttttggtaccagtaccatgctgttttggttactggagcattgtggtatagtttgaagtcaggtagcatgatgcctccagctttgttctttttgcttagaattgtcttggctttgcaggctcttttctggttccatttgaagtttagagtagttttttccaattctgtgaataaagtcagtggtagcttgatggggacagcattgaatctataaattactttggtcagtatggccattttcacgatattgattcttcctatctttcagcatggaatgtttttccatttgtttgtgtcctctctttatttccttgaacagtggtttgtagttctccttgaagaggtctttcacatcccttgtaagttgtattcctaggtattttattctcttagtagtaattgtgaatgggacttcactcatgatttggctctatgtttgtctgttattggtgtatagaaatgcttgtgatttttgcacattgattttgtattctgggactttgctgaagttgcttatcagcttaaggagattttgggctgaggcgatggggttttctaaatatacaatcatgttgtctgcaaacagacaatttgactttctcttttcctatttgaataccctttatttctttctcttgcctgattgccttggccagaacttccaatactatgttgaataggagtgatgagagagggcatccttgtcttgtgctggttttcaaagggaatgcattcagtttttgcccattcagtatgatattggctgtgggtttgtcataaatagctcttattattttgagatacgttccatcagtacctaatttattgagaatttttatcatgaagggttgttgacttttgtcgaaggtcttttctgcatctattgagataatcatatggtttttgtcattggttctgtttatatgctagattacatttattcatttgagtatgttgaactagccatgtattgcagggatgaagccgacttgattgtggtggataagctttttgatgtgctgctggattcggtttgccagtattttattgaggatttcatggatgttcatcagggatattggcctgaaattttctttattttgttgtgtctctgccaggttttggtattcaggaggatgctggcctcataaaatgagttagggaggattccctctttttctattgattggaatagtttcagaaggaatggtatcagctcctctttgtacctctggtagaattcagctgtgaatccatctggtcctggacttccttttgtttgtgggctattaattactgcctcagtttcagaacttgttattagtctattcacagattcgacttcttcccggtttagacttgggagggtgcatgtgtccaggaattcatccatttcttctagattttctagtttatttgcaccaaggtgtttttagtattctctgatgttagtttgtatttctgtgggatcagtggtgatatcccctttatcattttttattgcgtctatttgattcttctctcctttcttctttatcagtctggctagcggtctatctattttgttgatcttttcaaacaaccagctcctggattcattgattttttttgaaggtttttttatgtctctatctccttcagctcttctctgatcttagttatttcttgtcttctgctagcttttgaatatgttgctcttgcttctctagttcttttaattgtgatgttagagtgttgattttagatctttcctgctgtctcttgtgggcatttagtgctataaatttccctctacaggctgctttaaatgtgtcccagagattttgatacgttgtatctttgttctcattggtttcaaagaacttctttatttctgccttaattttgttatttacccagtagtcattcaggaggaggttgttcagtttccatgtagttgtgcagttttgagtgagtttcttaatctcgagttctgatttgattgcgctgtgttctgagagactgtttgttatgatttccattcttttgcatttgctgaggagtgttttacttccaattatgtggtcaattttagaataagtgcaaggagttgctgagaagaatgcattgttctgttgatttagggtggagagttctgtagatatcttttaggtccatttggtccagagctgagttcaagtcctgaatatccttgttaattttctctcattgatctgtctcatattgacagtggggtgttaaagtctcccactattattgtgtgggagtctgagtctctttgtaggcctctaagaacttgctttatgaatctgggtgctcttgtattgggtgcatatatatttaggatagttagctctttttggtgcattgatccttttaccattatgtaatgcccttctttgtctcttttgatctttgttggttttaaagtctgttttatccgagattagcattgcaactcctgcttttttttgctttccatttgcttggtaaatattcctctatctctttgttttgagcctatgagtgtctttgcaagtgagatgggtctcttgaatacagcacaccaatgggtcttgattctatccaatttgccagtctgtgccttttaagtgggggaatttagcccatttacatttaaggttaatattgttatgtttgaatttgatcctgtcattatgattctagctggttattttgcccattagttgatgcagtttcttcatagcgttgatggtctttacaatttggcatgtttttgcagtgtcttatactggttgttcctttccatgtttagtgcttccttcaggagctcttacaaggcaggcctggtggtgacaaaatctctcagcatttgcttgtctgtaaaggaatttatttctccttcgcttataaagcttagtttagctggatatgaaattctgggttgaatattcttttctttaagaatgttgaatattggcccccattctcttctggcttgtaggatttctgcagagagatctgctgttagtctgtggtggtcgtttctgtttgttatgtctcttttttttttagcgtattcattttctcaccctccattctggatttgtttgattatttcctggcggtgtttgaacttattctacctcttatatgttctacctcttatatatcctgtacactagaaatcagaaattagatgtaaaggcttgattagatttatgacatacatttttggcaagaatgtcttaggaatgacatgtaaaaaggggttaatatttttttaaaaaccagtatgggaaagggagtaatatatatattgagtgcttatactatctacttttaaatacattgtctcatttactccttacaatagctctgagctatagatgatattattcctttgtagtaaaggatcgcccaactattaaggagcaaagtggccaggtgcagtggctcatgcctgtaatcccagcactttaggaggccgaggcaggcggatcacgaggtcaagagatcgagaccattctggccaacatggtgaaaccctgtctctactaaaagtagaaaaattagctgggcttggtggtgctcacctgtagtcccagctactcgggaggctgaggcagtagaattgcttgaacccaggagacggaggttgcagtgagctgcgattgcgccactgcactccagcctggcgacagagtgagactctgtatcaaaaaaaaaaaaaaaaaatggagcaaagttagcattcagaaagagaagaaaataaatccaacaaggccctttacctttacttaaacttaaaaattactaacaaatcacttaatgtctgcgcctcagtctctggtaaagtaagagcagcaaattaacttacttccaaagtttcttatagttccaacattatttgatcctcacaattgctcaggctactgtgtttttcattttaggtaatgagaggtgttctttatgcatcagctaacttttttaatttaaaaatttctttatttttatagatttagggagtacaagtgcattgtttttaaacagatatattgcacagtggtgaagtctgggtttttagcgtaaccatcacctgaatagtgttaattgtacacaatacgtaatttcttatccctcatctccctcctaccctcccaccttttggagtctctagtgtctattattccattctgtttgtccctgtgtgcacattgtttagcccccacttataagtgagaatatgtagtatttgactttgtatttctgagttatttccttaagataatggcctctctagttccatcaatgttgtggcaaaagacatgatttcatttatttttatgtctgagtagtattccatggtgtgtgtgtgtgtgtgtgtgtgtgtgtgtgtgtgtttgtgtgtgtatacacacatttccttttttatccttcagcttttaagttcgggggcacatgtgcaagatgtgcagatttacatgggtaaacgtgtgccatggtggtttgctgtacagatcacctcaacacctaagtattaagcccagcatctattagctattcttcctgatgctctccctcccctcaaccctcaccccgacagtccctagcgtgtgttgttcccttcaacgtgttcatgtgttctcatcattcagctcccacttataagtgagaacatgcacataccacattttctttatccagtcatccattggtggacacttaggctgattccgtgactttgctattgtgtatctgctaagtttttaaaaatacatatatatatattcaggacaggtaataactattggtctttccaaagttatgacagccatatatctaggattttcttggacaactccaatatcagataatttgtcctgtcaaacatctcaattttttattagaaaaacttggttagggtgtaaaacacctctgtatagaaatatgttttttttttaagagatagagtctcactatgttgcccaggctggtcttgaactcctcagcccaagcaatcctcccgcttcagcctcccaagttgctgaatctacaggcgtgcaccaccatgccaggctcttttctttctttttttttctttttaaggtgagggtcagctttcacactattagaaaaggtgttagaaataatagaaagtggtaaataacaccagtagagttctcccagaagccagccaagagaagagagtattttgatgaagagagtgattaaattctgtcacatgttactgatgagtaagataggatcaggtctgataattgaccaattagatttagtgacacaaaggtcattggtaaaccaggcactgtactcagcacttcatgtgtagtatttaatctccacaataatcccatgaagtagatgcttagtagcccattttatataccagaagactgagggttcagcaagttaacttgctcaaggacaaagggctaataagtggtggaactaggattaaaatctgcttgagactcactgttcaatacaagagccactagctccatatggctacttacatttacattaaaattaagttaaaaaatcagtttctccatcacattagtcacacttcagatactcagtagtcacatgtggcttgtagctactgtcttggatagtgcaaacacagaacatttccatcgttgcagagagtactattagagagcagtattccagagcctgtgatcttaatcactacacctaaagcctcccagttgacaaagttaccacctttttttggtgtgtgtgcacgtgcgtgtgtgtgtgtgtaagtatatataatttaaatcattccattaaatttacctctgaaattcaaaagactgaaacagatcttctttttatcaaataagttgattgcagagattatattggtgtttacatttcaggcaacctgctcatgaaattatccattgtagagagaaacctgggaaacaaagctatacgtcctttaatttttttccccattttcatttaaagttcagaagaacataatatgttggaatgatcaatgattctgaattaatatagatatttgaatgtcacagtatctgtatattaatatcctaaagtggtgttactatattggttaggttgactgattcatacatgtaagtcttttaacactcctggagtaagagtagcaagaaactgaagctatgatccttttaagggtttaagtaggtgaatacctcacttttgtctcttccattactagtgttttcatgaccaagttttttacatcagatttattattttggacccttaaaggaatataaattgcaagagagattttgatcagtgtaagaattactagatggccttatttatttccttctttattattgtacttcttatcttttattaatgttttctttctctaagatatatttgaaagccaggcatggtgacacacccctgtagttccagctactcaggagactgaggcaggaggattgtttgagctcaggggttcgaggctatgtagtacataatcacacctatgactagccactgcattccagcctgggtaacatagcgagcccctgtctcttaaaaaacaaaagatgtggccaggcatggtggctcacacctgtaatcccagcactttgggaggctgaggtgggcggatcacttgaggtcaggggttcaagaccagcctggacaacatggtaaaaccctgtatctacaaaaatacaaaaaaaaaaaaacacaaaaaaattagccaggcatgtggtggtggcaggcgcctgtaatcccagctacttgggaggctgagccaagataattgcttgtacccaggaggcagaggttgcaatgagctgagattgcgccactgcactccagcctgggtgacagagtgagactctgtctcaaaaaaaaaagacataatttaaactgctaaatagctgctttcattcctatttcatatcttctgtttcctttttacattgtacctataattgagttagagaatgtaacaatgtttgtgaaatgttaactcaagattgtgtagaatgaaaattgagtttcgattcaggctatacttggaaagctgcaacctctagaatgtcactgcagtcatataaaatctagaatgatgactttctacctcacagtggcatgtggcatatgtaatagttgtaatggatatccaatttttaaaggtaaattgctaaatatagtatctagttctttaagtgttaaggagaaaacattcttatcaaaggaggcttttaccttccacctaagtcattttggcaggcctgccttttctttcatttaaagtgataagttctgtagttgtcactatcttattcataccaacaatttgggaatctggatatatttataaatgctctttggcaaaggttatgtgctcgtgaccaaaaaatctgatacaaggtgttatgtgaatttcattcaataagctctctagttacttatcaaattcactgcattttttccagcgtagtttgggaagaaagaaccttcaaatttgaaagtagaggctttttgaccaggaatattaaatttctttactaagaagctagatttatttaagcaataaaaggaatttttcatagctttttgagtgggtcatgtggcagttaagtattctggtgattttatttccagatattacaaaactcaaattgaaagtaatggcaagcaaaatatttttgaaacatggcaaaccccctcccttacccccaggcaaagccttgattatttttttagatattttattttcaaggttgaatttcagaattaattagatgggaatttttgtcagcttgccaaatactttaaacttctaagtaaattaacttaaacttataatttatcattaattttgttttattaattgaactagtcgttttaaaagcttaaactaatttagattgtgagctagaatatagaccttgcttttccctgtgtataagctttttcacttatttaaggaaaaaaaagtttagacaaagaaaagtaaaggtacacatttggatgtaatttaaatctcattttgatgactgttggcttagtgattatagattctgctccactattgttttcaataatagtgttactctagcaactaatataaatgcatgcttttacaggataaaacaaaaacctttccaccagttgtgttgtgtattgggatgaaattttctttattaacttttataacttgctctggactttgcaaaactgttttttcccaaagaaataatctgaagatcctgttacaaatacttttttgtccccttaatttcattatttgtttcttatattgatagtatgctgctattaatttaaaaggggaagatttagaaacagtttgtatcagaaatcctatgtcttttttttctcttattcatgtcttacatagcactctggaggaaagaaagacttctgccttcctgcttatgaactacataaatgattttcaatttaaaaaaccagttaacttacttgcacggtcttttctttgttaaaatgaaaattatggaaagcatgcttatctttagtctttgaattttttggcataatcatataaagaagtgattgaaatacattaaactttattcattaacccttgttcgcagatttggtaataaaaactggaagcagtcttaatgttttaataaactcttaagtaagggaatgattaaatagatgataaagtataactatataagcactgtgcagctattagaaatgatgaaggtttggatttgatgtaaaatgatatccacggaaaggtattaagagataagagtatgtttcaaaactacatatacttcaattccattttttttctttcaacttttaagttccagaatacatgtgcagctttgttatgcaggtaaatgtgtgccatggtgggttactgcacagatcatcccatcacccaggtattaagctcagcatccattagctattcttcctgatgcactccctcccccaaccccccacaggtgccaagtgtgtgttgtccccctccatgtgtccatgtgttctcatcgatcaggtcccactttataagtgagaacatgtggggtttggttttctgttccttcattagtttgagaataatggcttccatctccatccatgtccctgcaaaggacatgatcttgttcctttttatggctgcatagtgtgtatatgtaccatctggtatatgtaccacattttctttatccagtctatcattgatgggcatgtaggttgattccatgactttgcttttgtaaatagtgctgcagtgaacatacgcatgcatgtatctttataatagaatgatttctattcctttgggtatatacccagtaatgggattgctgggtcaaatgttatttctgcctctaggtctttgaggaatcgccacactgtcttccacaatggttgaacaccaacagtataaaagtgttatttttctccacaacttttccagcatctgctgttttttgactttttagtaatagccattctgattggcatcagatggtatctcattgtagttttgatttgcatttctctaacgatcagtgatgatgagctttttttcatatgtttataggctacaagtgtgtcttcttttgagaaatgtctgttcatgtcctttgcctactttttaatggggttgtttctttctcatagatttgtttaaatgtcttgtagattctggatattatacctttgtaatatagatagattgcaaacgttttcttccattttgtaggttgtctgttcgctctgatgatcgtttcttttgctgtgcagaagctttttagtttaattagatcccatttgtcaattttggcttctgttgcaattgcttttggtgtttttctcatgaaatctttgcccatgcctatatcctgaatggtattgcctagattttcttctggggtttttatagtttggagttttacatttcagtctgtaatccatcttgagttaaattttgtgtatggtgtaaggaaggattctagtttcagttttctgcatatggcttgcctgttctcctagcaccacttattaaatagggaatcctttccccattgctcgttttggtcaggtttgtcaaagagcagatggctgtaggtgtgcagtcttatttctgggttctctattctattccattccattggtcgatgtgtctgtttttgtaccagtaccatgctgttttggttactgtaggcttgtggtatagataaaatcaggtagcatgatgccttcagctttgttctttttgcttaggattcattggctatttgggctcttttttggttccatatgaattttcaaatagttttttttttctaattctgtgaagaattgtcagtggtagtttaatgggaatagcattgaatctgtaagttactttgggaagtatggccgttttcacactattgattcttcctatccatgagcatggaatgtttctctatttgtttgtatcctctctgatttccctgagcagtggtttgttgttctccttgaagaggtccttcacttcccccttgctagctgtattcctaggtattttattctctctgtagcaattgtgaatgagagtttattcatgatttggctctttgcttgcctgttgttggtgtataggaatgctagtaatttttacacattgattttatatcctgagaatttgctgaagtttcttatcagcttaagaagcttttgggctgagacagtggggttttctagctatagggacatgtcatctgcaaacaaagatattttgacttcctctcttcctatttgaatatactttatttctttctcttgcctgattgccctggccaggacttccaatactacgttgaataggagtggtgagagaaggcatctttgtcttgtgccagttttcaaggggaatgcttccagcttttgcccattcagtatgatattggccatgggtttgtcgtatattgctcatattattttgagatatgttccttcaatgcctagtttattgagagttttaaacaatgaaggcatgctcaattttattgaagatgttttttgcatctattgagataatcatgtggtttttgtgtttagttctgtttatgtgatgaatcacatttatttatttccatatgttgaaccaaccttgcattccagggatgacgccatcttgatcatggtggataagctttttgatgtgctgctggtttcattcagtttgccattattttattgaggatttttttgcatcaatgttcatcaaggatattggcctgaagttttctttttttgttgtatctctgccaggttttcatatcaggatgatgctggcctcatagaatgagttacggaggagtccttcctctgtaatttttggaatagtttcagtattcagctcctctttgtacctgtggtagaattcggctatgaatccatctggtcctgggctttttttggctggtaggctatttattactgcctcaatttcagaacatgttactagtctattcagagattcagttttttcctggttcagtcttggagggtgtgtttgtccaggaaattgtctgtttcttctggattttctagtttatatgcgcagaggtatttatattattctctgacggttgtttgcatttctgtggggtcagtggggatgtcccccttatttctgattttattttttatttgatttttattttatttgattcttctttcttttcttcattagcctagctagcggtctaactattttattaatttttttaagaaaccacttcctggattcgttgaatttcttttgttattttttttttcttaggggttttccatgtctctgtttgcttcagctcagctctgatcttagttgtttcttgtcttctgctagctttggggtttgattgctcttggttctctagttcttttagttgagatgtttggttgttaacgtgaaatctttctagttttgttttgtttgtttgtttgtttgtttgtttgttttgagacggagtctcactctgttgcccaggttggaatacaatggcacgatctcagctcactccaacctccgcctcctgggttcaagggattctcctgcctcagcctcccaggtagctgggattacaggtacctgccaccacgcctggctaattttttgtattttttagtagagatggggtttcaccatgttggccaggctggtctcgaactactgacctcaagtgatccacccgcctcagcctcccaaagtgcagggattacagacgtgagccactgtgcccagtctttctagctttttgatgtgggcattttagtgctataaatttctctcccagagattctgatgtgttttctctttgttcacattagtttcaaaaaatttcttgatttctaccttaatttcattatttacccaagagtcattaaggagcaggttgttcaatttccatgtagttctgtggttttgagtggatttcttattcttgagttctaatttgattgcgctgtggtctaagagactgttatgatttcagttcttttgcatttgctgaggagtattttcctattatgtgataaattttagagtatgtgttgtgtggcaatgagaagaacgtatattctgttgtttttgggtgaagagttctgtaaatatctatcaggtccacatgatgcagagctgagttcaggtcctgaatatcctcgttaattttctgtctcaatgatctaatattgtcagaggggtgttaaactctcccactattattgtatgggagtctaattctctttgtaggtctctaagaacttgctttatgaatctgctttagcatcatcgtgatgctagctggttattttgcagacttgtttgtgtggttgcttcatagtgtcactggactgtgtacttcagtgttttttttagtggctgataatggttttttctttccatatttagtgcttccttcaggacctcttgcaaggcaggcctgctagtgatgaatgccctcagcatttgcttgtctaaatgggatcttatttctcctttgcttatgaagcttggtttggctgtatatgaaattctgggctggaatttcttttatttaagaatgttgaatattggcccctaatctcttccggcttacaggttttccactaagaggtctgctgttagtctgatgggctttcttttgtgtaagtgacctggcctttctctctggctgccctcaacattttttctttcatttcgaccttggataatctgatgattatgtgtcttggggttgatcttctcgtggaatatcttactggggttctctgcatttcttgaatttgaaatttggcctgtcttgctaggttgtggaagttctcctcgatgatatcctaaagtatgttttccagcttggttccactctccctgtcagttttagggaccccagtcagtcgtaggtttggtctccttacataatcacataattctcagaggttcattccttttcattcttttttctctattcttgtctgcctgtcttatttcagaaagatagtcttccagctctaagattctttcctcaccttggtctcttctgctattgatagtttgcattgtgaagttctcatgttgtgtttttcagctccatcaggttggttatgttcctctctaaactggctattcttgctatcagctcctgtattgttttatcgtgattcttagcttctttgccttgggttaaaacatgcttttttttagcccagcgatatttgttattactcaccttctgaagcgtatttctgttatttcatccttctcagcctcagcccagttctgtgctcttgctggagaggtgttgcagtcatttggagaagaaaaggcactctggctttttgagttttcagcatttatgcattgattgtttctcatctttgtgggcttatctacctttgatccttgaggttgctaacctttgaatgggttttttttcggggcctttttttgttgttgttgacattgctgctgttgttttctgtttgtttgtttttcttttaacaatcacgccaccctactgtagggctcctgtggttagctgggggtttgctccagaccctagtttcctcggcttctccagcacttgcaggaggcggctggcaacctgcactggaagatctcacccagtcaggagggatgggatcagggacccacccaatgaagcagtctggttgcttcttggtagagcaggtgtgttgcactggggtggacccttttcttcctctgtaccacctgtattctccataaccagcaagctgaaatggctgatttaacggaagcacagagatggccgctggccctcccctggggagctccctcccatggagagatcagatctctgtctgcaggagtgggtcgggacctgtcaaagaagcagtctggctacaatctggcaaggcagctgcgctgtgccttgtgcggggaaggagggggtgctccttgtctgggtggtctgcactctccacaacggggaggctggaacaactgagtccccagaaaccacagagatatcagccgccccccacccccccaccacccccagctccctcccagcgagagatcagatctctgaccctgcatgggaagtcctgctcagtttggagtgggtccgtctggttgaagaagcagtctggcccccttatctggcaaggccactgcactgcgctgtgggcggcccctcctcctctgggccgtgtccactcttcacagctggcaggctgtattggctatttcccctgaattgcagagatggcgaccgcccctcccgctggaacttggtcttgtctcaggcggacttcagccctctgctgttggctagctgagattccaagccagtgggtcttagcctgtgaggtgcgatggaaatggggcctgccgagccatgctgcttggctccctgtattcagaccccttcctagggatgtatatggatggattttatgccttggcggggatcccggggcaggagcatgcagaactcccagatctctgtgtgcgcctgagctgctgttttgctgagactccacacagctctgtgtatcagacccaaggtcctggtggaatgggttcacaacaggatctcctgctccgcatgttgcaaagatccatgggagaagcgtggtggcttcctgagcgggttgcacaatcactcactgcctcccctggctgggggtgggggttccttttgctccacgtggctcctggatgggccgtagcccttctccttgctctccatgctttttgcctattcagtcccaatgtgagaacctggatatttcatttgaaggtattggattcattcaccccttttcatgcctctctgtgagtgccacagaccacagctgcttctcatcagccatcttgccctttgtccagttccatttttatgcaaaggtgtgtgtgtgtcaatgtgtggaggaataaaataaaaaatggtactggtagttatttcctggttttgtaattggatgttagtattgtttgcatttctttgttttgttcggttctttgaaaagaggattatagtagccaggatggaggtaatgttttaggcaaaaaatctgaaactttttaagatagaaaacaaacaaattcacatgtacttttcctgtgacttacattggcatttcagttgactgtaagtcaaaaggaaagttattgcatcattagaggctgaaccttcaccataacctgaccttagacagtcatgtctgacttgataggataggttttaaatctggaattagtggggtgaatacgttaaaggggtttagaaatggcgtttctcaaaataagtgtctcctgaagatgaaaatggtaaaatagtgcgtggtattattttcaggcatagtataagcctgaactggcctttcacaagtttgtcttgagacttgtcattgtttcagtttttatgttttcttttattaaattaacatgcttgttttaaaaagttcaaaaagtacaaaagtacttttaggttcagtggctcatgcctgaaatcccagcactttgggaagccgaggcaggtggatcacttgaggtcaggagttcgagaccagcctggccagcttggtgaaactccatctctactaaaaatacagaaattagccatgcgtggtagcgagtacctgtagttccagctactcaggaggctgaggcaggagaatcgctggaacctgggaggtggaggttgcagtgagcactgtattccagcctgggcaatagtgagactctgtctctaaataaataaataaaagttaaaaagtgctaaaagtaagaaaatagacataagttccccctcccctggaatctttcattgaattacctttttttttctaagggaatagttctgggaagtagaggaactgtatctcaataaaacagacattctttgtggtgtgatagaatcatcactgcataggagccaggaaatttagtttccagtcccaggtagtccttagctgtataatcggaaaaagttactttgcctctttgggcctcaatttctactaattctatgatgacacagttggacttagaaattttaggatgctaaggactgacttaataaagctttcctggtatctcagacattttttaaaaggctgtatatgagtttgtgtatatgtgtatgtgcacatgcatttctggaaaggcttcccctccaaccattaaatatataattaatgttataaattgtgttgtttataattgagaaataaataccacacttgacaatgtctatttccaaagaattgggtatttttgtgcttttgtttattcctggtattttcatatcatcctgttacacacgtgagcagagaatgtgtgtatcatccatatttaatttacagtcatagctagactaagttattatccaatgttattgaaagaatcagtagcacagatagaaatgaattagttcctagtatacagttttcttggcctttctcttaaccagtttgctttcttagagaaatgaactgatctgactatgattaagatcatttattgctagacagaagtaaaattagagattatccatagaacattttaatcttgtaatttatttggtgtgttgtagaacacctgacttttctcattgtatttggtaaatgtgttaaaaatgttaagtcagtgttatctggttttattttatctcttgagtcatgtttggcatgtatgtgttgggggggtgggcataggagttacacatttaagaaagccctatcttttagtagaataaattaatgcagattggcctgtcttcctgcctgcctggtcagtaacagtggactttggagattgatctagtgatgataaacctattgtatgtggcataagccagagaagtcagcttcgatagcaagtttctacattggcgtgagagagaagcatttagttaacatttcaaagtaactaagcctgttagcatccatgtattctatcagtagactttattgagtcctgtcatttgtatggtcttttattgttttttgttttcaacaaaggaaatagcacacacatacatctcaaaatggattatacctgttgtaatctcagtattttgggagatcaaggtgggaggatcacttgaggccaggaatttgaaaccagcctgggaaacatactgagatcctatgtctacaaaatttttaaaattagccaggtacagtggtatgcacctgtagtcctagctactcgggaggctgaggcaggagaatcacttgagcccaggagttcaaggcagcagtgatctgtgatcaaaccactgcactccaacttgggtgacaacatgggaccctatcttaaaaaaaaaaaaaaaagaattataaagtctctattatggttgtatctattaagaatatcagttctgttaagaaaggaaataattgtttcaaatgtttattggggtagcaagataaaaagttgtttacaagatattaaatatcagaatatttggaattagtgtcagtatttgctattatatagaaaaaaaacctggggcctcatgatttgaatttttcatcttgagttatttaatgcacatttgagttcttaccactttttggaccctatactcaaggtgtgtaaaggcataattattttcaaatgtgggctttgtctatgcaaaaatttatgagtgcattaagcatcactaggtgcagattaaatttgaattcagtgtgctgtatgtatacctccactactttcatttgatcagaaatgcacaatttagaaagtgtgttctaggaaaacttgttaaaagctatggaaaatccttctgtaaagtgaattaatttgccttttatagatccaggttttcatatgtgatttcttaatgaacaacttgtgaatattttaaatttattaaaagtaacatatctgtaattcactttaaacccccaccccatctatctttgtgtctcactctcacagtcataattaaacagagcaggagtttagttgttcttactgagtatataaatgatcccaatttttaagcttttaattttttaatcttaaaagactggcttaagataccatgatttctttaaactatatatactatgataataaattgaaaaatgtatatcaatttaaatttgacccatgggtctttacagtgtaatttaacatttacattcctgcagttggaatataagggctatatgtttcagttaaactctcctataactgtttagattaatttagattagttttttgttaatatagtggttggcagttgaaatgattgtgaaaataaagttgtttatgatgtataaataggagtagccttgatttctagcacaggcatccaatatagtcactaatttaagcagacttatgttagcatttatcaactcagaattaagcacaaaataaaatgcatataaaaaatgttaagttggtggaaagaccttgaaatctgaaaagtggtaattaaaaaacaatggaatgcctaaaccatactgtataaacatgaaagtcttacataagaggctggtgttacatgttttgctgctgttttttaggtaatctgtcatatatatcagaaatatatatagcaatcaggttttagtttctagtacagttgaccatagaactatggagatattatactgtccagaggggaaaaataattgtctcttatttcaacccctctaaacaggataccatacttgcagagctccttcagatacataaagaacacattgtaggataccatgaacatgattctcttttggaccacaaagaagaagaagagttgactgaagaagaaagaaaagcagcttgggctgagtatgaagcagagaagaaggtagttgatgcaaaatgtgtttttgtttttgttatgttagtgatttgaaagagcaatgaagaagaaaagggtcacatttgaaacaggtaataataatatagtgggttttaggaacacattccccaattacaagaatctctttatgggttggtttcagctacctttagtggtagagtaggaggagaagacagaagaaaacagtttacacttaaagagtagtaatcccatttctgcctagtatttgttgaattgagaaatgagtgggaagccatatatttagcatcactaacctcccatcagtaccctctctgtagtaacaaacatacaggagcttagtgtttggaggttgtagtaaatgtagctttgcatgtataccatgaaatctaaattttggctgaatatcagaacacaaaaatatttcattattagacattaatgccatttgctccagcagcaactttatttaagatcattctatgtctgttttaaacatcaacccacttgagcaaaaatgtgcctgagcatgggaaaccttatcctaatacctgaatccttttcaaactcctaacttattgtaccaaacttctttaacattagtgtgatgttcagagtctcatcagaattctttgagttgcccccattctgtgggaattatcagaaaaaaaaagtacacctttaggggttaaagctttccttgtaataagatcttggtttcgggtgaaaagggtgttttgtttgtgtgtggaagagtgttaataatttcctggatctgagaatgtggattcttttctaaaccagtaggtgatgtagaatttcaagttttaaatcacaatgtgaaaagtgcataatttttttgtttttagggactgaccatgcgtttcaacataccaactgggaccaatttaccccctgtcagtttcaactctcaaactccttatattcctttcaatttgggagccctgtcagcaatgagtaatcaacagctggaggtgagttgtgaagtacaaaagtagtttgacatgaattaaaggcaatttcaagtgccttgttgttgagggttccctatgcagaaatatcacattctccaaaagattacccctgaatagacgaataaatttttgttttatttgttgaccgttttgaaccaacatgatgttgtaaaatgtggtttgttcagagcacaaaggaatcagtcggtgaattaatgtagtttgaattattttaattaagaaacaatagggctgctgactcgcttgggaaatagcaccttcttcagttataaaatagttataataaattgctatcttactgtttgaaagtaagataaatatactcattaacttctattctagtgcattatagatgcacaattaaatatataatgcccaatattatgaaataaatgatttaaagctagaatcaattgtaaattaaataggaaagactgggtttttattataccaataatgacttaattgaatctgaaacacattataaaatgtgcttatggattcttctgcattattaaattattggtgtgataaaactcaaacttttttaatcttcctaacaagactctttgagcattgatatggtttactccactttattgatactgaattttgctgttctcttcaattatttaaagagttttaaaaccgactgctctaagttggcaaatggaaggattccctatactttaacactatgctgtctttctgccttatataacttatttcttgcattcttctaggacctcattaatcaaggaagagaaaaagttgtagaagcaacaaacagtgtgacagcagtgaggattcaacctcttgaggatataatttcagctgtagtaagctaattggcaattgtcttattccaacctccaatttgtaccctccaccccctactgccatttttttaaatttttaattgttccttcttataaattgatttgcaatagtaaaatactggtaaaatggatggataatgccaaaccgtaacccagcaattttacatagatgttggcacaagagagaaatgggtaaaatgtaagaattgagaaatcaaacatggaaatgtatgcattgtttatataaacattttaattaccagttgtacaaattaaatctaaattattgtttcattccagagatagccagcccaggtacagcagtgaacaacttagtaccctgttttgcatcatgtttttcttcagaaaagaataaaggaaaaggggggtttgaaaccttgggaaatcccgaatatcttaaaataccttaattatttttcctcaattgtacagtaataaggagtaaatagaaaatttttcttttagtggaaggagaacatgaatctctcagaggcccaagtacaggcgttagcattaagtagacaagccagccaggagcttgatgttaaacgaagagaagcaatctacaatgatgtattgacaaaacaacagatggtaagaattctgacgtctgactatttctaggttatgtttaattttcttgactttataataagtttgtatgacatctacgtcagtaattattcctactatggagggatggatagtcattgataattctggaagaaatgtaaaaaacccaggaatgtcaagtaaaagtaatatattttgttacaaaaatgcaacagctacctaaatgggaatccttgaagtttacatatgatctagtccatataattttatttctcatatattctggacatctacgtaggaatttttgccagagttttaccacatttgccaattgtattttatttaacttttaatttttgtgagtatataataggtatatatatttatggggtacataaggtatattgatacaggtatacagtgcataataatcacatcagggtaaaggatatctatcacctcaagcatttatcctttctttgtgttacaaacaatccagttatactcttctagttatttttaaatgtgcaataaattatttttgactgtagtcaccctgttgtggtatcaaatactagatcttattcattctaactatacttttgtacctattaaccatcccccattaccccactccctgctacccttctcagcctctggtaactaccattctactctcttatcatcatgagttcaattgttttagtttttagcttccagaaataagtgagaacatatgaactttgtctttctatgcctggcttatttcacttaacataatgatctccaattctatgcatgctattgcaaatggcagtatctcgttcttttttatggctgaatagtactccattgtatatatgtaccacatattctttgtttattcatctgttggttgatacttaggttgcttccaaatcttaatgttgtgaacagtgctacaataaacatgagagtgcagctacctcttcaatatactgatttcctttcttttgggtataggcctagcagtgggactggtgaatcatatagtacctctgtttttagttttctgaggaacctccaaaccgttctccatagtgcttgtactaatacacgttactaacaacagtgtacacaagttcccttttctccacatcctcaccaatattagttattgcctgtcttttggataaaggccattttaactggggtaagatgatatttcattatcttttttgtttggttggttggttttgtagagacggggtctcactatatttcccaggctggtctcaaactctcgggcttaaacgatcctctgacctcagcctcccaaagtgttgggattacaggcgtgagtgaccatgcccagcctctcattgtagtgttgatttgcattatctaatgactgatgatgttgagtgccttttcctatgcctgtttgccatttgtatgtcttctttcgagaaatatctattcagatattttgcccatttttaaatctgattattagattttttttcctatgcagttgtttgagctccttatatattctggttattaatcccttgtcagttggatagcttgcaaatattttctcgcattctgtgggttgtctcttcgccttgttgattgtttcctttgctgtgcagaagctttttaacttagtggtatcctgtttgtccattttttatttggttgcctgtacttgtgagatattactcaagaaatctttgccagttcaatgtcctggacagtttgcccagtgtttttctgtagtagattcatagtttgaggtctcagatttaagtctttaatccattttgatttgaatgttgtatatggcaagagcttggggtcttctttcattgttctgcgtatggatatccagcttccacagcaccatttattaatgagactgtcctttcttcaatgcatgttcatggcacctgtgcaaaaaatgagtttactggtgtgtggatttgtttctgggttctcacttctgttctcttggtctgtgtgtctgtttttatgccagtaccatgctgttttggttactgtagctctgtagtatcatttgaagtcaggtaatgtgattcctccagttttgttctttttgctcactacagctttgcctattgtgggtcttctgtggttccatgaaaagttcagaattttttttttgtttctgtgaagaatgtcattggtattttgataaggatgcattgtatctatggattgctttgggtagtatgggcattttaacaatattaatttatccaatccatgaacatggaagatcttttcatttttttgtaccctcttccatttctttcatcagcattgtgtagttttcattgtagacatctttcacttctttggttaagtttattcctaggtatttaattttgactgtggctactgtaaatgggattactttctcaatttctttttcagattattcactgctggcatttagaaatgctgctgattttgtatgctgccactttactaagtttgtttatcagttctaaaatatttttggtggagtctttaggtttttccaaataccagatcataacatttgcaaacaggataatttgacttcttcttttccaactgggatgccctttatttctttctcttgtctgattgctctagctatgacttgcagaactatgttgaataacagtggtaaaagctggcatccttgttgtgttccaatttttagaagaaagtctttcagtttttccccattgagtacgatactggctgtgagtctgtcaatatatggcttttattgtgttgaggtatgttccttctataaccgtattttgaggatttatatcatgaaaggatcttgaatattatcagatgttttttcagcatcagttgaaattatcatacagtttttgtccttcattctgttatttgatgtatcacattgattgatttgcatagttaaatcatccttgaagcccttggataaatcccacttggtcatgttcaacaacacctttttaatgtggtgttgaattgtgtttgctattattttgttgagaatttttgcatgaatgttcatctcagatattgccctgtagttttctttttttgatgtgtttgtctggttttggtattaaggtgttactggccttatagaatgtgtttgaagtattccctcctcctctacttgtcacagcagtttgaggaagattggtattagttcttctttaaacgtttggtaaaattcagcagtgaagacattggtttccaggcttttctttgctggaagactttttattacagctttaatctcgttacttgttactgctctgttcagattttggatttcttaatgtttcaatcttggtagattgtatgagtcttggaatttatccatttcttctaggttttccaattttttgcatgtagtttgtcataggagcctctaatgatcctttgaatttctttggtaacagttttaatatctactttttgatctctgattttatttacttgaatcttctcctttttcttaatctggctaatggtttgtcagttttgtttatcttctcaaaaaaccaactttttatttatttctgtgctgatctttattatttattttactaatttggggttttattttcttttgtttttctagttctttaagatgcattggtaggtgtttgttttttttttcttttctgatgcacgcacttagagctgtaaactttcctcttagtaatgcttttgctgtatcccataggtttttgtatgttgtgtttcctttatcattcgttttaagaagtttttcagtttttttcttaatgttttctttgacccactggtcattcaggagcatattgttcaattttcatgtgtttatatagtttcaaaaattcctcttgttattgatttctagttttattccattgtggtcagagaagaaacttgatatgatttcatttgtttgaatgttttaagacttgttttgtggcctaatatatggtctttccttgagaatgatttatgtgccaaggaaaagaatgtatattctgtgaccattggatgaaatgtcctgtaaatatctatttggtctatagtgcagaataagtccgttggttttttttattgattttctgtctggatgatctgtccaatgtgtaaagttgaggtgtcgaagtctccagctattattattttggggtctgtctctctatttagctctaataatatttgctttttatatctggtgctccagtgttgggtgcacatatatttacaattgttgtatcttgttgctgaattgacccctttatcattatataatgaccatcgttgtctctttttatattttttgtcttgaaatctgttttggctgatgtaagtatagctagtcctgctcttttttggtttccattttcatgaaatatcttttttcatccctttattttcactgtatatgtgtctttataggtacaatgtatttcttacaggaaacagatggttgggtcttttttaaaaatccattcagacactatatgtcttgattggagagtttagtccatttatattcactgttattctgtttttaaactttcattttaagttcatggatacatgtgcaggtttgttatataggtaaatctgtgtcacgggtttgttgtacagattattttgtcacccaggtattaagcctagcacccataagttatttttcctgatcatctccctcctctcagcctccaacctctggtcagccccagtgtctgttattgccctctatgtgttcatgtgttctcatcatttagttcccactttttagtgaaaacatatggtatttggtttcctgttcctgcattagtttgctaaggataatggcctccagctccatccatgttcctgcaaaggacatgatcttgttcttattattaggtttatagaagatattaataaaattaaataaatagattgacaacagtcttgaaaatgtgtgctgagatctgggctcagctttacaagccgagaatgagaaagtagatttttgatctctgagatttctaatagttgagtcagctactgttggaatgagaaaagctctagttgtctataacatgttgaatttgtcagactctttgtgatgagctgcgttcaataaaccaaatgcagaggcattagtagcaggctatggctctgctagctgaggtttggaaatcacaggatgcaacgcctcaatttttgctgtggaacttgataatggggcattccgtaatgaatgccgtatgaggggacgtgagtatgagtaggcagagggcacatgtatctagagcttcagtcactgtaggtatcaggaagaaaggcacatttagaatacacctttacacacgtggatttttttttttcacccctcctgaactttttctttatttttattttttatttccacattttctttatccagtctaccattgataggcatttagctttattccatgtttttgcttttgtggatagtgctgcaatgaacatatacgtgtgtcattataatagaacaatgtatgttcctttgaatttatacccagtaataggattgcagggttgaatggtagttctgtttttagctctttgaggaactaccacactgctttccacaatggatgaactaatttacactcccaccagcagtgtataagcattcctttttctctacaacctcaccagcatcttttgactttttaataatggccattctgactggtgtaaggtatctcattgtggttttgatttgcctttctctaatgatcagtgatgttcagctttttttcatatgattgttggccacgtgtgtgttttcttttgcaaagtgtctgttcatgtcctttgcccactttttaatggggttgttattttcttctatatttctttaagttccttatagataatggatattagttgctagatggatagtttgcaaaacttttctgcaattctgtaggttgtctctctactctgttgatagtttcctttgctgtgcagaagctctgctgtgcagagtttagttggatctcatttgtccatttttgcttttgttgcaattgcttttggcatcttcatcatgaaatctttgcccattcctatatccagaattatattgcttaggttgtcttccagggtttttatagttttcgggtttacatttaagtattgaatgcatcttgagttgatatttgtatatggtgtgtaaggagggggtccagtttcaatcttctccctgtggctagccaattaccccagcactgtttattgagtagggagtccttttcccattacttgtttttgtcaactttgtcaaagatcagatggttgtaggtgtgtggccttatttctgagctgtctattcagttccattggtctgtgtgtctttttgtaccagtaccacactgttttggttactgtagctctgtagtatagtttgaagttgtatagcataatgcctccagctttgttcattttgcttacgattgccttggctattcaaccttttttttgttgttccatatgaattttaaaatagttttgtctagtttatgaagaatatcattagtagtttgataggaatagcattgaatgtataaattgctttgggcagtatgaccatttcaacaatattgattcttcctatccatgagcatggaatgtttttccatttgttttgacatctctaatttcttttagcagtcttttggagttctcattgtagagaccttttacctccctggttagctgtattcctaggtattttattctttattgtggcagttgtgaatgggattgcatgcctgatttgcctctttgcttgacttttgttggtgtataggaatgctactgatttttgtacattgattttgtaccctgagatattgctgaacttgtttatcagcttaagaagcattttgggccaagactagagttttctagatacagaatcatggcatctgcatactgtgatagtttgactttctctcttcctatttggataacctttatttatttctgtttcctgattgctctgcccaggacttctaatactatgttgaataggagtggtgatagagggcatccttgtcttgtgccagttttcaagatgaatacttccagcttttgcccattcagtataatgttggctgtgggtctcctcctggcggaattccagaggcccgaggcaagagccagttgcttcttgccacttcaactcactcattcccctggagttcttgtgggccaggaatgagtcctggtgtgcggtagccccattcagggttcccagcttcctcctccaaccaagcttctgtttcttccctccgcccactctcattgccttctctctgaagatctgttaggagtgtgccagtcatccttgtctttcggtggcagcttttccaccttgctgcatctagtcatccatcttgcccaaccccattattctttttttttttttttttttttttttgagacggagtctcgctctgtcgcccaggctggagtgcagtggcgcaatctcagctcactgcaagctccgcctcccgggttcaggccattctcctatcttagcctcctgagtagctgggactacaggtgcccgccaccacgcccagctaattttttgtatttttagtagagacggggtttcaccgtgttaaccaggatggtctcagtctcctgaccttgtgatcctcccgcctcggcctcccaaagtgctggggttacaggcgtgagccactgtgcccagcctccaaccccattattcttgataagttaggacttactcctgccattttgttatttgttttctggttgttttgtgatccctgtcttccttcttttcttcctatcatccttttagttaaagcaattttctgtggttgtatgttttaatttcttttattattatttttttgagacggagtttcactgtgttgcccaggctggagtgcagtggcatgatctcagcttactgcaatctctgccttcccgggtttgagcgattctcctgcctcagcctcctgagtagctggaattataagcacccgccaccatgcgcagctaattttcacatttttactagagacagggtttcaccatgttggccaggctggtctcgaactactgacctcaggtgatccatccaccttggcctcccaaagcgctgggatcacaggcctgagccaccgcgcccggcatgatttcttgcttatagttttttgtttatctgttgtatgtttgtttttttgaagttaccatgaggcttgcaaataatgtaatgcatcattttaagctgatgataacactgattgcataaacaagcaaacaaagtaacaaacaagcaaagagaaaactaatgttctattgccagtgagttttataccttcatgtaacttttcgttgtttgttaacatccttttctttcagattgagaaactccctttaatatttcttgtaggacaggtttgatattgaaattcctcagcttctgtttgtgtgggaaagtctttatttctccttcacatttgaagcatattttcaccagatatgatgttctagggtaaaagttttttgtttgtttgtttgtttgttccttcaccccttttaaatatctcatgtcactctctcctgggctgtaagttttctactgaaaagtctactgccagatgtattggagctcctttgtatgttatttgtttcctttctcttgctgcatttagtatactttctttatccttgacctttgagagtttgattattaaatggtaggaggtagtcttcattaggttaaatctgcttggtgttccataaccttctttttcttgaatattgatagttttctctaggcttggggaattctctgttgttgtccctttgaataaactttatacccctatctgtctctctgcctcctctttaaggccaataactcttagatttgcccatttgaggctattttctagatcttgtagatgtgcttcattgttttttgttcttttttcttttgtctcctctgatggtacattttcaaatagcctgtcttcaagcttactaattctttcttctccttgatcggttctgctattaagagactcttaatacattcttcagtatgtcaattgcattttttgactccagaatttctgcttgattcttttaaattatttcaatatctttgtgaaatttatctgatgtgattatcagtttcttctccatattatcttgaatttcattgaatttcctcaagacagctcttttgaattctctgtcacatatattcacatgtatctgtctctctaggattggtccctgaggccttatttagttcgtttggtgatgtcgtgtttcctggatggtcttgatggttgtggacattgattcgtgtctgggcattgaagagttaggtatttattataatctttgtagtctagccttgtttgtacccatccttcttgggaaggctttctaggtattcaaagggagttggatattgtgatctaatggtcactgcatctgtatctgcattagaaggcatcccaaaccgggtaatgctgtgactcttgtagtcttggagactcatagaggtaccgccttggtggtcttggataagatctggaagaattgtctggattaccaggcagagactcttgttctcttcccttactttctcccaaacagaatctctctctgtctgtgctaagctgtctggaaagctggtggagaggtgacacaagcacccctctggctcccttcacggggaccacactgggttagacctgaagcctgcatagcaatgggtctcacccaagatccacagtaactactggcctccgcctttgtttgctcaaggctctaaggctccacattcatcaggtggcaaagccagctcctcttgtgtccttcccttctgggctgcagatttcccccagccctaggccgatcccaagatgctatctaagatccagggcctggagtcagaatctttaggaatctgcctggagctctattctacttcggctgagctggcacccaagccataagacaaaatctttctacccttccctccgcttttcacaagcaaaggagtctctccctgtgaccactagcaccccaggcccacagcaggtattgcctggctactgctgatgttcactcagggcccaagggctcttcagtcagcttgtgttaaatgctaccaggactacgtctctcccttctgggcagtgggctcccctccagcccagggaaggtccacaaatgccatccaaaagccaaggcctggaattagggtccccgagggtctgcttggtaccctagcccactgtggctgagctggtacctaagctgtatgtcaaagttctctttactctttcgtcttcttttctcaagcaggagtctcttcccatagtgtccacagctgggaatgtgctatgtcacacctgaaggtagcatgtctctgagtctcactgaaggcccactgcaagtactgcctgggtaccactgctggttattcagggcccaagggctcttcagacaacagatgttgaatcctgtcaggattgagtcatttccttcaagagaatgagtttcctctggcccaggttatgtctggaaatgtcatccaggagctagggcctggaacaagggcctcaggactctgcctggtgccctgtcctactgtggctgacgtgatattcaagctgcaagacaaagtcttctttactcttccctctcctctcctcacctcaagcaaaaggaaagagtctctcctggagctgtgagctgtgctgcctggggtttgcgaaggtgtggcacaagcaatctcctggccaccctggctggtgtctcactaggtcatgtgccccccccccccgccccccgtccactggctttcagcccagcacagtacaggacttggactcttggtggcctagattgcctttcaggtttatttaggcccccagaactctttagtccacagtggcaaagcttgtcggaactcgggttctgcctgctgggataggtgatttccctctggctgtggctggtgtaaatgctccctctgtgggtgccagctgagttctgcctggtgtttcttttcactgtgacagggcagccctgagttccaatgcagagtcccataatcactgtactcttttcctgcaagcacatagattctctctccctgccacacggctgctgccaggggatgagtgaggggtggcattggcagttcaagactgtctttcctaccccctttagtgcctctttcagtgatatgaagttaaaatctggtacagtgattgctcacctgatttttggttctcatgaaggtgattttattgcagatagtttttcaatttgctgttccttcggggaggacgatcagtggaggcttctattcagccatcttgctctgcctccagtcacatttgccattgttaaacaacctcgaaatagtagtatacttatcagtgtgtttaatttgagaataaaaggtagagctatggatgatacatatcaaaggttcctactaagttatataattctttaaaagggtactgtattccaggatccttgatcatgtttcccaacacagtcgtttgccagccttctgccttatacttggaaatttctacgcttgacaccagggaatctatttctgtggcatatattttacttagaaagcactgcagggttatgtggttttacaatatattagtacatttgagatattcctggtcagaattattcctactgcaagtgcctttccctttggtgtttgtcactaaaatgtttgtctgtcatcatgtgaaatattcaaaagaatgacaaagaaaggagtcttaacaaaaagtgttgtaactaatacttgagactaatcacagtacagaacacattactatggcaactaagctaaatgctgcttgcaatataatagtcaagacattaagagaatttagccctaaatgatcttactaactggtttctacagtaatggtcctgtgaatgccatcacattagtaatggtgttaacaataatgtgttttccttttggtatggtacccccttaacaaattgattttaagtcaaaacttgatacctcttttgagacaggtcatgcacttgtaatgactcccattttttctctatagttaatcagctgtgttcagcgaatacttatgaacagaaggctccagcagcagtacaatcagcagcaacagcaacaaatgacttatcaacaagcaacactgggtcacctcatgatgccaaagcccccaaatttgatcatgaatccttctaactaccagcagattgatatgagaggaatgtatcagccagtggctggtggtatgcagccaccaccattacagcgtgcaccacccccaatgagaagcaaaaatccaggaccttcccaagggaaatcaatgtgattttgcactaaaagcttaatggattgttaaaatcatagaaagatcttttatttttttaggaatcaatgacttaacagaactcaactgtataaatagtttggtccccttaaatgccaatcttccatattagttttactttttttttttttaaatagggcataccatttcttcctgacatttgtcagtgatgttgcctagaatcttcttacacacgctgagtacagaagatatttcaaattgttttcagtgaaaacaagtccttccataatagtaacaactccacagatttcctctctaaatttttatgcctgcttttagcaaccataaaattgtcataaaattaataaatttaggaaagaataaagatttatatattcattctttacatataaaaacacacagctgagttcttagagttgattcctcaagttatgaaatacttttgtacttaatccatttcttgattaaagtgattgaaatggttttaatgttcttttgactgaagtctgaaactgggctcctgctttattgtctctgtgactgaaagttagaaactgagggttatctttgacacagaattgtgtgcaatattcttaaatactactgctctaaaagttggagaagtcttgcagttatcttagcattgtataaacagccttaagtatagcctaagaagagaattcctttttcttctttagtccttctgccattttttattttcagttatatgtgctgaaataattactggtaaaatttcagggttgtggattatcttccacacatgaattttctctctcctggcacgaatataaagcacatctcttaactgcatggtgccagtgctaatgcttcatcctgttgctggcagtgggatgtggacttagaaaatcaagttctagcattttagtaggttaacactgaagttgtggttgttaggttcacaccctgttttataaacaacatcaaaatggcagaaccattgctgactttaggttcacatgaggaatgtacttttaacaattcccagtactatcagtattgtgaaataattcctctgaaagataagaatcactggcttctatgcgcttcttttctctcatcatcatgttcttttaccccagtttccttacatttttttaaattgtttcagagtttgttttttttttagtttagattgtgaggcaattattaaatcaaaattaattcatccaatacccctttactagaagttttactagaaaatgtattacattttattttttcttaatccagttctgcaaaaatgacctataaatttattcatgtacaattttggttacttgaattgttaaagaaaacattgtttttgactatgggagtcaactcaacatggcagaaccatttttgagatgatgatacaacaggtagtgaaacagcttaagaattccaaaaaaaaaaaaaaaaaaa

SEQ ID NO: 15470 - DNA, 103904 bp, Homo sapiens
aacaaaatggcggcggcagcggtgtcgctttgtttccgcggctcctgcggcggtggcagtggtagcggcctttgagctgtggggaggttccagcagcagctacagtgacgactaagactccagtgcatttctatcgtaaccgggcgcgggggagcgcagatcggcgcccagcaatcacagaagccgacaaggcgttcaagcgaaaacatgaccgctgagcccatgaggtaaaacgcaaccccgtctcatgggccccagcggtctgggcccaggcaccgtctgagtcgggtgtttgggaaggcgttcgcttggtgggttaggcctgtgtgttgcttagccgaaagaggcatcgttttctctttaggtgagaagggtttcggggtatcggcgcaaggctccgacgggggtgggggtggggatggggtggggggaggtggggggggcgcggcctagggtatggggcgcttcttgcaatctcccctaaacggtgacgcttggtcgggctcctctgtttattctttggtgcctgtgggattgagacctcgaagtcggaggcggtctttggtatcccggtcatttttgctaatctttgggcctagaaactgcgtggggaagaagcggggggagggtgagaagagggggaggggtgggcgggcgcgaggatgtgagatcccaggacgacttagaggcgtttaggttgctggagatgggaagcacccgggccctgcgggattttttttctgcagccccaggagacaagcctttttttgattgggttgtggtgcagttccaggtatttaggtatcttttctactccatatcctgaaggatatccttgggtttatttctaggcgaggggggacttaacacagggttttgcttccagaggaccctagtatactactttttgtgatgtccagccttaatgggacctcaagtgtttccccactttctgggcaaatttcgaggagtaattaggccctatctttatttacttatttattccatgaaggatgaagggcaggttaacgtgggctgatgcgaagtaagatttattgcaagggaaaatgcctggcaggcctcctcttaaccaatcaagcacgtttattaggttgaagctgtttttctgtgtgcttctgatttgcctcttgacgggtctgaaaatttgggtagtcaatatgaaatgtatacacttttacccaggtggctggctggcgtttcagtttgacatttgaattttcatcccacaatgtgaattaagtaatttttttactcggagatgcatccttggcgtccagtggcaaaataaaattacaaggagcatgggtcagaattgcatttcaagttggcgaaatgtgcctttgagtaactcttagattggcatatgtttttagagcaatttagctagaatgtagaattgggcaatgagcctatgatacgtatgtctgtatttctgcatgaacaagcagtagattatattttctttaccttggggaaagatatgcttcagttcttagattgtagatctctagttgtgtacacgattgtggccttggtttctgaatttgtcagtaggctcaaatacaacaaatctttatctgtggggtattaggcacgtaagtggtacccagtataacttgttggcctgtaattaccaggcactcatgttcatatgcatggatggtgtaccttacagttaaattatgacctctagattttactaagtttcacaaagtctacatttgaaactatagtttgaagtcggatcttctcagtttctttagaatgaacaaattacgtatatagaatttctgaatagaataattaattttacacaagggtcagtttttcttactagtcttggatttttgtagatcttgatgataagagtaataatcataactaagttgagtgcttattgtcgttctttataatcttgatgaattctcaaacctgtgaggtaagtacttggttttgcccattttaccgatgaggaggaaagtgagacatagatcaagaacttgaccgaagttatacagcttgtaattggtggagctggaattgaaccccatcttgacttcacagcttatgttcttaaccacaaggcattaatgcccccttcagctgccaggtctaacctgattatgaccatttaaatttagcccaagtgttacaatgaaagaagttcatattacctactctgatttgttgcaggtctatgattttgtagctgtttataatgttacattttttgtgtccaggtgtactatgtagtgagataactgaaatatttaatgctaggagagtcttaagctacatgaaaaacctctagtaaagaactgcatatatgcatgtagggaattaattaaaaagtgtgacactccctgatgatttactatgaaagagctccaagtaggtgttcagaactgtctcaggctgaagtgtcatcgatctcctaaaccataatcatggttaaaggagaatctgacaggtaatgcttgagttgaacccacagtaccaaatccctcttgagtcttttctaatgtgaggcagaaataatataagcattattgttaatattattttacacagtagttccagattttctctttatcaaatattttgtcaagcacttaaaaagcaggaacaaagactagttctaatttttacttgtgtttataaaaaaaagtaatattctaggattctgtggtggaaaaatggccagaagacaagaggaaggaaaataaaccgatgacctggctaaaacatacactgactaatcagtggctcagtctttaaaggttttgttgtttttaaaggatttttttggttgtttgtgttgtttgaaataagattgacttgcttctggcattataaaagataaggtcttttataatcaccaagctctcaatgtagtacttgggtacctgggtgtcactgctgattattttttaatttttaaatttatttttttgagacagagtctcactttgttgcccaggctggagtgaaggggcgtgatcttggcttactgccgcctccgcctcccaggttcaagtgattctcatgcctcagcctcccaagtaactgggattaacaggtgtgtgccaccacgcctggctaatttttgtatttttagtagagagggagtttcaccatattggctaggctggtcctgaactcctggactcaagtgatctacctgccttggcctcccaaagtgctgggattacaggtgtgatccaccgcgcctggctctctgctggttattcagggcccaagggctcttcagttatcaggtgatgtatgctgctaggactgggaccttcccttcagggcagcagattcccttctggcccaggatgtgtctagaattgtcatcctggagctagggcctggaatggaggcttcatgactgatgaactttaatttgttttctttatttttattttttttgagatggagtctcactctgttgcccaggctggagtgcaatggcaccatcttggctcactacaacctttgcctcctgggttcaagcgattctcctgcctcagcctcccaagtagctgggattacaggcaagtgccaccacacctggccaatttttgtatttttagtagagacggggtttcaccatgttggccagccaggctggtctcaaactcctgacctcaggtgatctgcccgcctctgcctcccaaagtgctgggattacaggtgtgagccactgcgcttggccttaatttatttgcatataaagatttcagtattgggagatttggtgaaatttgtcattctaatccttatggcaattgattacttgaaaagctgacagctatattaccttgttattgatcttaaatataaaaaggcagaagttgtctaaattgagagattttgaatgtcttagaaagtatctgttaaggtggtagtttacaagcagttacattgtaacctaattgttgaaaaatgttatctgtgaaatacttgcatttccactatgaaaagcatgaaaccaggcccttggagggggaggagatgcaaattttataaaggtttttaaaaagcatttaaatatcaatggcttggttatgtaatgggttggggtgaaaagaaagacatttgtgaccttaatttttatcaggcccagttttattattggccacccttggcatagttggccttgagctttcagttatgtattgtatttctagagataagataaatgtagtacttaaaataatatttaagtattgatgtaggtgtgtgaaataattgtttcataagtaattgtatgtgtctttttcacttttggggtctgaataaacttatgggttgggtaataggatacgggcaattcttgaatttacatgaagtgctttcccccagaccgtgaatgttcttttggatatcagaaactatttaaatagttgaagccagtgaaaactgatgcatagatcttcctttagaaatgttgaatataacagggcagtgaaaggagggtctaagcagtctgtctctaattttatcctaatgcttgtcttatgatcagcttggaagctgacatgcaagatgtttaacttctatttttccatctgtaaaatgggaataagctcaaatgggagtaaatatcaatatttatcaataatagatattgataaagtctaaaggtattctgaaggaggtaacatgtttgtaacaatggttcttaaaagagaaactaaagctctggggtcctagttttttttttttttttttttttttgagacagagtctcactatgttgcccaggctggagtacagtggcacgatctcaggtcactgcaaactccgccctccgggttcacgccattctcctgcctcagcctcccgagtagccgggactacaggcacctgccaccatgtgcggctaattgtttgtatttttagtacagacagggtttcaccgtgttggccaggatggtctcgatctcctgacctcgtgatttccacccgcttcggcctccaaagtgctaggattacaggtgtgagccaccgcgcccggctgttaatttttaagagtgaaaagaggtgctgcgactaaatggtttgagaactgcttgtatagaggaatgaacactgaactgtgagccaagccttggtttttcagttatagctctgttgcttgattgtatgactgtggacaaatcatttatctgttccaggcttctgctttgtcatttgcagaacgaacaagactagatggtctgtagcattaatttttttttgggacaaggtctcactgtcacccaagctgtagtgcagtgacactgaacatggctcactgtagccttgacctcctggctcaagcaatcctcctgcttcagcctcccatgtagctgggaccacaggtgtgtcatcatgccccgctaattttttgatttttttgtagaaacagtggtctcactttgttgcccagtctggtcttgaactcctggacttaagcgatcctcctgccttggcctcccaaagtgctgggattacaggtgtaaaccaccataccctgcctaaagttagtttttaaaaaattctgcttacaggccacgtgcagtggctcacgcctgtaatcccagcactttgggaggccgaggcaggtggatcatgaggtcaggagttcaagaccagcctggccaagatggtgaaaccccatctctactaaaaatacaaaaaaaaatcatctcggtgtggtggtgggcacctgtaatctcagctactagggaggctgagacagagaattgcttgaacccaggaggcggaggttgcagtgagctgagattgcgccactgcagcctgggcgacagggtgagagtctgtctcaaaaacaaaaacaaaaacaaataagcaaaaaattctgcttatatgagtgtttatcattttctcttatctgccttttgtgggttagggagaagggtagtggtgagataaagtttctttattcagtgtatttatatctttttgccttaaaacttacatggttaggttacaggtgttttgttgctgatacttgtcatagtatcatgtatacctggttgtataaacatttattggaaaggaaaaaacatttttgttggaaagtttggtaattattgtggcttaggatatgttctattttgaaagattgctatatccagtatatttctgcccttttatgattgaagatgtacgtctgaaaatacctatgttagttctagccggttgttctttttgcgctgggaagtctttgaattttgcactgtagctgctattttcagatcctgtctctgaaactttgtctctcagttttagcttgaagtagccatttcctgtatctgtagtccagcactcttgttaactgtcccatacaatatttgttaagaaattattgttctggcagtagtattcacatgtatatatcctgcactccatattttgggggaatgctttattagttgatcaaatacttaagtatcaatttggggccaggcatggcactgtgttagggttatgccaaaggtaataaaattcctgccatcttaaggcattcttagtcaagtgagggagattggtaagtaaatgagcaattagaaagcagtgctaaaatatggaaatatattgattgcgctagggatcagaaatgaaagaaagcctaatttgggggatgtctaggaaagttttgcaaaggagatgttaactgtattgagtcttgaatgagttagcagttaagggttgactgtgagagggcagtccagacagctattagtatggttaaagattagtcttattttccatatatcagaggaaataagacatgtacacgattagttttggtgcaagatataaagtgataaatgctgcatgaagtaaaagtaagttgttgtgtgagttcaaagtagaaagacatttctggtggggaccaaggaaagctttatagagagatagcatttgagccgggcgccgtggctcacacctgtaatcctagcactttgggaggctgaggcgggtggatcacgaggtcaggagatcgagaccatcctggctaacatggtgaaaacccgtctctactaaaaatacaaaaaaaaaaaaaaaaaaaaaaaaatccgggcatggtggcgggcgcctgtagtgccagctgctcgggaagttgaggcaggagaacttcgtgaacctgggaggcggagcttgcagtgggccgagatcgcgccactgcactctagtctgggcaacagagcgagactccgtttcaaaaaaaagaaaaaagagagatagcatttgaatctagtccttggaatataggtacagttttgacaaaggagactgtgggagaattccagatgtgaggagtagcagcttgagcaaaggaatgttgtgtatattagcattttctatttggaagaaggtcaacatcgaattttaaacttaatttctggacaaatactgtataactattgtgcctttttttttttttttgagacgtagtctcgctctgtcacccaggctggagtgcagtggcatgatcttggctcactgcaacctccgcttcccgggttcaagcgattctcctgcctcagcttcccgagtagcttggactacaggcgtgtgccaccatgcctagctaatttttgtatttttagtagagatgggatttcaccgtgttggccaggatggtcttgatctcctgacctcatgatccgcccgccttggcctcccaaagtgctgggattacaggcgtgagccaccgcgccctgcctattgtgcttttttttttttttttaagagacagggacttcctctgtcacccagcctggagtgcagtggggtgatcatagctcatagcttactgcatcctagaactcccgggctcaagtgatcctcccacctgagcctcctgagtagctgggaccacaggcatgtgccactatgcccagctactattgtgcattttgtatggtagcttttgtggcttgatgatcttgtaaaaggtacatgtgcctttgtgaatgggcctgataattttagttcagaattgtcaaaagtattatctacttttttttttttttttgagacagagtctcactctgtcacccgggctcagtggcaccatctcagcttactgcaacctccacctcctgggttcaagcgattcttctgcctcagcctccgagtagctgggactacaggtgtgagccaccatgcctggctagtttttgtatttttagtagagacggggtgtcaccatattggccaggctggtctcgaactcctagacctcgtgatctgcccacctcggcctcccaaagtgctgggattacaggcatgagccaccgcgcctggccagtattacctacttttaaataagattgtgtaggatttaatgcacagattttgaatcactgtgataaaaatgcatccttagttgtcttcattttgctcatttgaagtgctcagttgacttttgggtgggtaacatttgacttatagaatctaagataaaaaattatttctgagtaatactggatttgttattttgcttatttggattatattagttattttttggtttatttgatagcattccagatttagttttgctataatgcttgttttgaaaatgtggattttttccaaaagggttgatatttcagggaacaatttgaagcatacgacaaaatttgcatttgcttatgggggattttgtctgcagggtcagggatcagcatactgtggcctaccaaccagtggcctgttttttgtaaataaagttctttttttttgtttttgatctttgttttgttttgttttgttttgttgagacggagtcttgctctgtcgcccaggctggagtgcggtggtgtgatgtccgctcactgcaacctccgcctcttgggttcaagcgattctcatgcctcagcctcacgagtaggtgggatttcaggcatttgccaccacgcctggctgatttttgtattttttttttttttttttttttttttttttttagtagagacagggttttaccacattggcctggctggtcttgaactcctgacctcaggtgatccgcctgccttggcctcccaaagtgcagggattatagatgtgagccatgtaaataaagttctattggaatacacctatgtccatttatttacattgtctgtggctgcttttgcactgtagttgcagagttgaatagctgcagcagagacctagtagcccacaaagcctaaaatgtttactgtctggccctgtattgaaagagtttgctgattattgtgctagatgaatgcaggatactacacccctctaaaaagagctgcatagaaatacatgcatatagatgcacacacgtctgacatctaccagctacctcatttcaccacttgggttataaaccacacatatttacatctgttgtacaattttcaatccgatttcagataaccttccttctaccacttcacaataattcatgagctgcaacccttttgatgcccacttcacaagcaaacttcaggtctttttcaaagtaaagtgccacatttattgttatatttgagcatttattatttaacatgtcaaactgtgctaccatttttctttggtttctttgttttaaaaaaagtcactgatgaaatttttgaatgttgtgcttctaacctcatttttcctatgagttctatggtgttaattgcacaattttacatagtttggtggtttttaggaacccatatgttacattattgaggaactgactaattatcatcctgtaaaaagtactaattcattcaccaaacatttctggggtgatgtaaatattaagtgagttaaatgggcataaagcacttatgtctttattgttactcaaatattagttattactgattactattaccatgtgtcaggaactgtaataagtagtgcattgatgaacaagacagataagggacctgtctccatgaagcttacattgtatttttaaaaatctattaatatacattttggctagtaaccgagcccttgccccacagaaaagttgtgctgttacacaaaataatattttaagatccatccacaagtcaaagacatttcacttaaaacagctttctcagcagtgtctccttgatagggtataatattttattgaattattgtttttggctgggtgcagtggctcatgcctgtaatcccaccactttgggtggccaaggcaggtggttctcctgaggtcaggagttcaagaccagcctggccaacatggtgaaaccccgtctctactaaaaatacaaaaattagccgggcgtggtggcgcatgcctgtaatcccagctactcaggaggctgaggcaaaattgcttgaagccgggaggcagaggttggagtgagccgagatatcaccaccgcactccggcctgggcgacagaatgagattccgtttcaaaaataaataaataaataaataaataaataaataaagaattattgtttttaatttttgtttttttctgagataggctgttactctgtcactcaggctggagtgcattggtgcagtcatggctcactgcagcctccgcctccctggttgcaggtgatactcccacctcagcctcccgaatatctgggactataggtgcatgccaccatgctgagttaatttttgtatttttttgtggagatgagtttttgccatgttgcccaggctggtatcgaactcctggactcaagctatctgccctctttggcctcccaaagtgctgggattataggcatgagccaccaaacctggccatgtgattgtttttttgtaactgtaacctcaggagatgaatccgatctatctttagggagataaagagtaatcatcccttcctttttttactgtataaaaggttacaaaatataatttcagacttgtagaaaatttgtaaaaatagcacaaagattctcagatgtgcttcatccagatgcagcaaggggtaacattttaccatgtttactttatcatcctctattattatttttctgaattgtttcagagtaaattgcagacatgatgtccctttactcccaaatactttaatacatatttctcgaaactaggaatagtctgttacatgatcccagtatagttagcaaaattaaaaattagcattaaggctgagtgcggcctcccacacctgttatcccagcactttgggaggctgaggtgggaggattgtttgaggccaggaattcaagaccagtcttctcaacatagaccctgtctctacaaaacaaacaaacaaacaaacaaacaaacaaacaaaagtactaaattagccggtgtggagcatgcctggagtcccagctactcagaaagctagagtcaggaggatcacttgagcctagaagttccaggctgccatgaactatgatcatgccactgcagtctagtgtgaatgacagagtgagacccccatctcttaaaataaaagagagattagcattgatacaataccatttttttttttttgagacagagtctcacactgtcgcccaggctggagtgcggtggcgcgatcttggctcactgcaagctccgcctgctgggttcacgccattctcctgcctcagcctcccgagtagctgggtctacaggttcccgccatcacgcccagctaattttttgtatttttagtcgagacgggttttcaccgtgttagccaggatggtctcgatctcctgacctcatgatccgcctgcctcggcctcccaaagtgctgggattacaggcgtgagccactgcacccggccgatacaataccatttttaatctacagaccttattcacattttaccaattgcttcatgacatccttcatgatgaaagacaaaaagttcttgttttctgatctaccatctaattctagaacactcattatatttcattgtcatctggaacagctcaccttgccatttttttttttttgagacagttttgctcttgttgcccaggctggagtgcaatggcatagtcttggctcactgcaacctccatctcccaggttcaagtgattctcctacctcagccacccgagtaactgggactacagacatgccccaccacgcacggctaattttgtatttttagtagagatggggttgcaccatattggtcaggctggtcttgaactcctgacctcaggtggtctgcccgcctcggactcccaaagtgctgggattacagatgtgagccactgcgcccggcctcttctccatttttaaaagaacacaggccagttgatttgaatttgtctgatgtttccctttgattatatattttggtaggaacactatgaagtgatgttttgtccttcacagcacattttatcaggaggtgtataatgcctttgcttttactatgttttagaatgattttgctttgtttttttttttctgagacagagtcttgctctgtcgcccaggctggtgtgcagacgtgcgatctcggctcactgcagcctccgcctcctgggtccaggcgattctcctgcctcagcctcctgagtagctgggactacaggcgtgcaccaccatgcccagctaatttttatatttttagtagagacggggtttcactgtgttgatcaggatggtctcgatatcctgacttcgtgatccgcccgccttggcctttcaaagtgctgggattacaggcgtgagccatcgtgcctggccgattttgcttctcatgctaaaattattaatcagctcattctctgccattttatttagaggtttgaagtttggcttgattaatttctacagaattggggagagttttcccacctcccatttttcttgctttttccatttcctccttcctcagatacccccaaagttcaaaaccaaccaccccgattatgaattttcattttgtattctgaacatatagctaaaagcagagaattaagggtgaatgtttcatgttaaagtgattggacctgttgttaagcatatgaaataatatatttccttcaaaggctgactatactatagtgcatccaacatagcttgttgaatatctcagttcttttttttttttttttttttttttagctgaaatttgccacagggaaatatctctccagcctgggcaacatagtgagactctgtctcaaaaaaaaaaaaaaaattagccaggtgtggtggtgcacaactgtagtcctaaatacttgggaggctgaggagggaggatcctttgagcacaggagtctgaggctgcagtgagctatgattataccactgtactctagcctgggagacagagcaagaccccgtctctcaaaaaaaaaaaaaaattggtggtgaaatacacataccacaagatttagcattttaaccattaaaaaagtttgtttttggctgggtgtggtgactcacgcctttgggagtgatcccagcactttgggaggccgaggcggatggatcacgaggtcaagagatggagaccatcctgtccaaaatggtgaaaccctgtctctactaaaaatacaaaaaaaaaaactagctgggcatggtggtgtatgcctgaagtcccagctactcgggaggctgaggcaggagaattgcttgaacccagggggcagaggttgcagtgagccgagatggcgccactgcccgccagcctggagacagaacgagactctgtctcaaaaaaaagcttttttttttttttttttgagagaagggatctcgctatgtttcccaggctggtctcaaacttctggcctcaagcaatccttctgcttcggcctcccaaagtactgggattacaagagtgagccactgtacctggcctcatttttctattttgataaacacttttttttttttttttgagacggattcttgctgtgttgcccaggctggagtgcagtggcatgatcttggctcactgcacctctgcctcccgggttctctgcctcccgggttcaagcaattctgcctcagcctcctgagtagccgggactacaggcgtatgccaccgtgcccagctaattttttttgtagttttagtagagacgggttttccccatgttggtcaggatggtctcgaactcctgacctcaggtgatccgcccgcctcggcctcccacagtgctgggattacaggcgtgagccaccatgcctggctgataaacacttttaaggcttaacatgagctaagtattattttagaacagattgtctcaaccttggcactatagacattttgtccagaaaattttttgttagaggctgtcctgtgaatgcattttatccctgacctctacccactagataccagtaacacccctaccctgagttgtgacaagcaaaaatatttccagaaattgccagatgttccctgtgggcggtatgggtttgagaaccacttttctagataataggcatttgtagataatgaatactgagctaagtggaggagtaaatggttgaaatagactatgtggttaagtacagttacagagatataaaccaagagatgtggaagaatagcaaaaaatttccttagagagttgatagcaagtattttcccaagagagacagcaattctgagttgggtcattggggatggtggggggaaatgtgctgaggagggggaaatattctaggtggtggaacgggttatgtctagagatacggtagaggagcccttgggtgccttgagaaaaatgagataataagtatgattggagagaatatgggaggtagaattggaaagaaggatgctagttggggtcaggtttgagaaaggcttttttttttttttgagacggagtcttgccctgtcacccaggctggagtgcagtgcctcactcggctcactgcaacctccgccttctgggtttaagtgattcttctgcctcagcctcttgagtagctggcattacaggtgcgtgccaccacttccggctaattttgtatttttagtagagaccgggtttcaccatgttggccagactagtctcagaactcctgaccttgtgatccgccagcctcggcctcccaaagtgctgggattacaggcatgaaccaccacgcccggccgagaaaggctttttatgctatgctaaaatgtttcattttccccctttcattatagaaaatcaacaaatacttttaaagtctgtagagttatatgatcagctttttaaaagaatagtgatacagtgaaatggtaaaaatggtcaatggtgaatattaaactcaagaagataactctagcctgtaaagtaggaaaataggaagggatggagatttatataaaactaaaactagatgtcatatgttgcccttaaatcacatcaccctgtgtgtagacttcttcatcctcatttgtcaaaattctgacatattgtcaatactgatgaagattcttgatattcaaagcaggagtgaagtgggcaaaaatctgtattctaattttcattaccctaataatgtccttttaatttggagcagttctgtggcctctctttgtctgtcctgatcttgacatttttgaagagtatagaacaattattttttagaatgtatctctatttgggtttgtgtgatgcttctttatgattagatgaagggtatgcatttttggaagaaataacagaagtgatggtatgttgttttcagtgcctctgtaacaggagatgcatgacattggttggtcccattactgatgatggtaattttaatcacttgggtggtttccagtagatttttctatgtaaagtttatcatttttggccgggcatggtggctcacgcctgtaatgccagcactttgggaggctgaggcaagcagattacttgaggtcaggagtttgagaccagtctgaccaatgtggtgaaaccccatctctaaaaaaatacataaattagccaggcatggtggcatgcgtctgtaatcccagctgctcaggaggctgaggcaggagaatcacttgaaccctggaggtggaggttgcagtgagccgagattgtgccactgcacttcagcctgggtgacagagtgagactccgtgtcaaaaaaaaaaaaaagtttatcatttcccatttttattttgaaacagtcttgctctgttgcctaggctggagtgcattggcacaatctcagctcactgcagcctcaacctcctgggctcaagtgatcctcccacctcagtctcctcagtagcgtgttccaccacacccggctgctttttgtattttttggtagaggtggagtttcaccatgttgctcaggctggtctggaacccctgagctcaagggcactgatcacctcagcctcccaaagtgttgggattacaggtgtgagccaccacgcctggccctgaaaaatatttttaacggttacattatcatggagaattggatggtataaaacaatagcagttctcatatttgaaaataaattgatgtaatgaaacaaatgagaggatcaaataatattgtaaaaagaataaaaacccacatatggacaggtctgtggaaattgtattaaagcctacctctcccagattgtttccgtttgttgcaatccatttaagaacagtttttgggctgggcacggtggctcacgcctgtcatcccagcactttgggaggcccaggcaggtgtatcatgaggtcagatttcaagaccagcctggccaacatggtgaaaccctgtctctactaaaaatataaaaattagctgggcatggtggcatgcacttgtaatcccaggtactcgggaggctgaggcaggagaattgcttgaaccaggactcgggaggtggaggttgcagtgagccaagatagcaccactgcactccagcctggcctgggctacagggtgagactcagtctcaaaaaaaaaaaaaacaaacaaaaaacagtttgtgggaaaaaacaatccttgtgtatgacataatttgctgcttttcccatttagaaaatttaaaaaatacttatttgagatggggtctcactatgttgtccaggctagggtgcagtggctattcacaggtgtgaacatagtacactacagcctcgtactcctggccttagcatcttgagtagctgggactgcaggtgcacatcacagtgcctcgcttactttttccatttttgtctgttgatcctctctctcttcctttggggtaaaaattgtggcttgtgatggtggtttgtggggaaagaaaaagttggtaagctacaagctctgagcctttaatgtgtttttgttaaccatgcagacagacattagatacatagatacaacatagatgagttaaatttgaaagaaggcaccaaactttgttactttaaagcaggatttctcaaagggacactgttgacattgatttcagaagtgagattttcatggtttttaatgttattattataatggtatggatagtgttttgccctctaagaagtagctaggagtgtttccatagatgcatttagtttatatcacttatgtattctgtctctattttgtaagaaaattgcctatgaacagaattttttctgtatgtggatttaatgtcttcttctaaaggaaacatgggtgtggttcacatttccttagttttgagtagcatggcttaagttgtgatccaattttaaaaaatcagttgaataaataaatagaaaataaaaggataatttctgtactaaaaaagtcagctggacagttaaaacatctccttttattcgtaagtttttcaataaaaattgttaaaagcagtattcatttgtgtaatgatataatctttgttattgttttatgtgcttttctaaaatgcaggaaacataaggtaaggagaagtctttccttaccctgggaccagatgtctatgaggactgttgacttttctgctataaacaggatgataaattaacagtggtgtgataggtaaagtagatttgttatgacatatcttccattaagcgataataacttgatttttacttagttgatgaaataaaataactttgaaaccttgggtaacatgaaattgaatcaaaatattttcaagttatggaacatagtgttattaatagaatggagtgttgaaaaagcactggattatgctttctgtaacttttagttctgggtcttatgataactgtgaccctgagcctcagtgttttccttttaatctgtagtgatattttttagttcagtctctcattttaaactgcttttagctctaaaattttatctcagtgacctgttgagttatataacaatcgtatcaggtaacctagataagaagaggaaggcagtaacatttcagaaatacagtttggggttgggaatccttaagtgatccagacttctcctttggtccgaagatagtgtgaataaaacagctgagggatgtgggcatcaatatattgcagaggaaaaggttatttccaggagtggatttgcagctactcttaaatctattatgttggggctgggcactggggctcatggctgtaatcccagcactttgggaggctgaggcgggcggatcacctgaggtcaggagttcaagaccagcctggccaacgtggtgaaaccctgtctctacaaaaatacaaaattttgccgagcatgatggcgggtgcctataattccagctacttgggaggctgaggtgagagaattgcttgaacccaggagtcggaggttgcagtgagctgagattgtgccattgcactcctgcctgggtgacagagcgagactctgtctcaaaaagaaaaaaaaaatctattatgttggatagatggtcttttccagaagcaaattttatagatggaaagcattttaattaatctagtaaaattctctcattttacaaatgaggctccctctacctctctccccctctccccctctccctctctccctctctccctctctccctctccccacggtctccctctccctctctttccacggtctccctctgatgccgagccgaagctggactgtactgctgccatctcggctcactgcaacctccctgcctgattctcctgcctcagcctgccgagtgcctgcgattgcaggcgcgcgccaccacacctgactggttttcgtatttttttggtggagatggggtttcgctgtgttggccgggctggtctccagctcctaaccgcgagtgatccgccagcctcggcctcccgaggtgccgggattgcagacggagtctcgttcactcagtgctcaatggtgcccaggctggagtgcagtggcgtgatctcggctcgctacaacctcacctcccagccacctgccttggcctcccaaagtgccgagattgcagcctctgcccggccgccaccccgtctgggaagtgaggagcgtctctgcctggccgcccatcgtctgggatgtgaggagcccctctgcctggctgcccagtctggaaagtgaggagcgtctctgcccggccgccatcccatctaggaagtgaggagcgccttttcccggccgccatcccatctaggaagtgaggagcgtctctgcccggccgctcatcgtctgagatgtggggagcgcctctgccccgccgccccgtctgggatgtgaggagcgcctctgcccggctgcgaccccgtctgggaggtgaggagcgtctctgcctggccgccccgtctgagaagtgaggagaccctctgcgtggcaaccgcctcgtctgagaattgaggagcccctccgcctggcagccgccccgtctgagaagtgaggagcccctctgccccgctgccaccccgtctgggaagtgaggagcgtctccgcccggcagccaccccgtccaggagggaggtgggggggtcagccccccgcccggccagccgccccgtcggggaggtgaggggcgcctctgcccggccgcccctgctgggaagtgaggagcccctctgcccggccaccaccccgtctgggaggtgtgcccagcggctcattgagaacgggccatgatgacagtggcggttttgtggaatagaaaggggggaaaggtggggaaaagattgagaaatcggatggttgccgtgtctgtgtagaaagaggtagacatgggagacttcattttgttctgtactaagaaaaattcttctgccttgggatcctgttgatctgtgaccttacccccaaccctgtgctctctgaaacatgtgctgtgtccactcagggttaaatggattaagggcggtgcaagatgtgctttgttaaacagatgcttgaaggcagcatgctcgttaagaatcatcaccactccctaatctcaagtacccagggacacaaacactgtggaaggccgcagggtcctctgcctaggaaaaccagagacctttgttcacttgtttatctgctgaccttccctccactattgtcctatgaccctgccaaatccccctctgcgagaaacacccaagaatgatcaataaaaaaaataaaaataaaaataaaaaaaattaaaaaaaaatgagaaaattgagctctcctgaggttgcagtttgcttaacagcatagatctaattagtaattaggactagaaccaaggttatctgactcccagttcaaggttcttggtacagtaccgtgtttttaactagtccattaggttgttttctgtgtattttataacacttctgtaagaaagtggaatatttttctctaaggtatgttaaaactcttgttcgagaaaatacagtaaaggatacctgttgtatcttaaagtgatttttatgtttttctgtcaatgccacaatctgaagaaagtaaattagctacacttctattgctgtgacaatagattatttagaatcttcttgattacttgtattattgttcccgtgcttcagagctgtttccttgctatttaaaatcattatggtatagcccagaggctaagggggttttctaagagtatgcaatttgtcattgacatagtttttttgtttgtttttgtttgttttgtttgtttttgagacagagtttttgctctgttgcccaggctggagtgcaatggtgtgatctcggctcactgcaacctccacctcctgggttaaagcaattctcctgcctcagcctcccgagtagctgggattacaggcacccaccaccacacctgactaatttttgtagaggcagggtttcaccatgtcggcgaggctggtcttgaactcttgacctcatgtgatccacctgcctcggcctgtgaggattacaggcatgagccaccgcaccctgccaacacagttgtttttgattggaaaagtttattttcctaatctcaaagtagcttgtatctgttctttattgtgaaatgcagtttctacattgaatttgtgtagtctgtagttttgactgttttaagttcaataactagcttagtagtatacttgttagaggtcagagtaggttaactactagaaagaacagtccttctgcttactgtactaggaggaagtctgtggtggagggaaaaaaggagtaaaacaattccagtcttctgtaaaatttgagtaatttctttctctactccttctacatgaaaaatacatcttatttgatttttgcatcacatgccttctatatgtgttggaatctggatcaccatttcttcattacttgtgggtttttgttgtgaaaaatgtggagtaagttagaagttgactgtagaataggtaacattctcttaaattctttgatcagagtgagcagagtccagaagcttggctcagacttagggaactcatgacacttctcttaatatcctaagttcatgacatgtctcttaataccctaagtgtacaatacaatagtagatcaaggaaggcagaggtatctggcagacttagaagtaactgttcataaaaacaaggatcagtatgtttctacaagataatgatttaaagttgagccaggattagttatacctttaatataaaaaattgaaatagcttatttaatctgttctaggctatagtatacggagctaggtattaaaacattctctatatatttaactcttttttttgagacagggtctcactctgtctcccaggctagagtacagtggcatgatcttggatcactgcagcctagacctcctgggcacaagtgattctcccaccttagcctccacagtagctgggactacaggcctttgccaccacacctggctcatttttgtattttttgttgagacggggtttcaccttgttgcccaggctggtcttaaacccctaagctcaagtgatccgcttgcctcagcctcccaaagtgctgggattacaggtgtgcaccactgcgcccaggctatttgacttttttattctgtaaaattgcaagcatattcagaaataagaaaatagtataacggggccgggtgtggtggctcacgcctgtaatcccagcactttgggaggctgaggcaggtagatcacgaggtcaggagttcgagaccagcctggccaacatggtgaaaccccgtctctactaaaaatacaaaaattagccaggcgtggtggtgggcgcctgtaatcctagctactcgggaggccgaggcaggagaatttcttgaaccagggaggcggaggttgcagtgagccgagatcgtgccactgcactccagcctgggtgacagagcaagactcattttttttttttttttttttaaaaaaaagaaaaaagaaaatagtataatgggttgggcccggtggctcacgcctgtaatccagcactttgggaggccaaggtgggcggatcacctgaggtcaggagttcaagaccagcctggccaacatggtgaactcttgtttctactaaaaacacaaaaattagctgggcatggtggcaggcacctgtaatcccagctacttgggaggctgagttaggagactcacttgaacctgggaggtggaggtttcagtgagccaagattgtgccattgcagtccagcctgggcaacaagagcgagactccatcccaaaaaaaacaaaaaacaaaagacaactatatatatatatataaaataacgaaaccccctaagtacctgtcacccagcttcaacaattatcatcttgcagttagttgaatttggttaacacttacccttcagtggattattctagactaaatttccaaacataatcatattgtattgaagtgttttttgaacaaactatactatggggtatttacctaaaatgaactatttgcaaaaagataagttgattttttttcttctggtgccagtacacatcataattgtagttaaaagctattatcctcacattaaagtttaatttttaacacattatgaaaatttaaaacttacagcaaagctttaaaaattttacactgaacaccaatattattaacatctagattctacctttaacattttactcttcttttttttttactcttcttgttttatcacatattgatccatctgtccaactctccattgatgtaacatttcattttattttcttattcatttcaaagtaaattacagatattagtatagttgaggttcagtttttaaagtcatattttcaactaattgtttttcctgttttgaaagactgttatatctgaagttccacattatgacaactcatagtctctatggttccagtgcttcccattttgaacttttctttcatgttctacgaacctttattaaaatatttagagctatgtacaagtaatatatacagtatttagctaaaactaagtagaatgaatgagggttttgcttgtgtgtttattgcagtctttaaaaaaaatctcttctagtgagtcaatgtgtatcttttttttttttttttttttttttgagacagagtcttgctctgtcgcccaggctggagtgcagtggcgtgatctctgctcactgcaaagctccacctcccggattcatgccattctcctgcctcagcctcccgagtagctgcgactacaggcgcctgccaccacgcctggctaattttttttgtattttttgtagagatggggtttcattatgttagccaggatggtcttgatctcctgacctcgtgatctgcccgcctcggcctcccaaaatgctgggattacaggcatgagccaccgcgcctggccaagtcattgcgtatcttaagatggtacactaaactaatatgcttgccattggtgacaacatagatgaacctggaggacattatggcaagtgaagttagccagacgtggaaaaaataatacttcatgacttcaacctatatgtggaatctaagaatgccaagtctgcaaaagaagagagtagaaaagtagttaaatgggtaggaaggtgggagaaatggggagatattggttaaaggttaccaagttggaatcacgtaggatgactaggtctagagatctaatgtacagcatgaacactatagttaataatactgtatcatgtactggaaagttgttaaaagagtagatttcaggtgttttcagcacacacagaaaaagataactatatgtggagatgggacattttgcttgaccatagtaatcatttcactatgtatatgtatatcaaaacattcatgttgtacactttattgattgattgattgagacagggtctctcgctgttgcctcagctggagtgcagaggcatgatcacagttcactgcctgcttgacctcccaggctcaagcgatcatcccacctcagccccccaagtagctgggactacaggtgtatgctaccatgcctggctaatttttatagtttttgtagagatgggttttgccgtgttgcccaggctggtattgaactcctgagctcaagcaatctgcccgcctctgcctcccaaagtgctaggattacagatatgagccactgcgcctggccataccctttaaatatatacataaaaagaagaatgcctttaaaaattttccatttaacaattactctcagggccaaaactcactgtttaagtattttgctcttttactttgatcttggtgttctatgtagtgctaaaatatactttcatctccatatgactgcttgtaacaaaaagctgttcaccacattatgaactccctgaatacacacaataatcatatagtaaatgcttgttgaataaacaagacaaaattcatcagtttttatccttacttaattttttgaacttttccttgaacttctgttatcaaacttaatacatgaacaacagaaagatgctacggatctatgtagtacaaagtaaaatatgaaatttacacactaaatatttctgtagcatattttcagaagtaagtaattgaatataaacagaagcaagcatattctatttttttattatttaagtgggaaatattttaaaatcttatgtcatatttgctttagatttcttttaaagaattaaaacattacagatagagttgaagcctcatgggttattttaatgttttctacataaacatgtttccatatacataaaccttatttagaattttttcagtttatttatttatttttattattatactttaagttttagggtacatgtgcacattgtgcaggttacatacgtatacatgtgccatgctggtgtgctgcacccactaacttgtcatctagcattaggtatatctcccaatgctatccctcccccctcccccctccccccaccccacaacagtccccagagtgtgatgttccccttcctgtgtccatgtgatctcattgttcagttcccacctatgaatgagaatatgtggtgtttggttttttgttcttgcgatagtttactgagaatgaaattttttcagttttatacgtttatgtaagtggcaccatacagtacatattattttgcaacttgccttttttttttttgtttgtttgctcaatgttgtttttaggattttgatgtaactccagatctgcactgtccaatacaatagccactaactatctgtggctattgagtactggaaatgtagctagtccacattgagatgtgctagaaatatatttgtacatggaatttcaaatatttagtattaaaaacatgtaaaatatctcactaaaagtttagtatccctaagaatctgaaatagaaaatgctccaaaacccaaaattttttgattactgacatgactctcaaaggaaatgctcaaaggtttaatgcaaatattccaaaatctgaaaaaatctgatatattgaccacatatggaactgataatagtttggatgtattggattaaataaaatgtaaaaattttaccagtggtttccttttttaaaatatggctactagaaaatttaaatatatatttgaaatgccttacattatatgtctgttgggcagcactgatctatattgcccacttttcattcctgtttatttattattattttatttttatttttattttttgagacagagtctcgctgggtcgcccaggctggagtgcagtggtgctatctttgctcactgcagctgctgcctcccaggtccaagcaattctcttgccttggcctcccaagcagctgcgattacagctgtgcaccaccacacttggctaatttttgtatttttagtagagacggggtttctctgtgttggccaggctggtctcgaactcctgacctcaagtgatccacctgccttggcctcccaaagtgctgggattacaggtgtgagtcactgctcccagccttcactcctgtttagtattaagttatatagataatagtttgctactggtggatagttgttgttttttttttttacgaatttggtgctactaaagactgttctcatgagcattcttaaacatgtctcctttgcacatatgctagagtttctttctccctaatggttcttctgatttatacttccactggcagtttgagaatgttcttgttctgcagttcttcatcctggtcgatgtttttgtgtagataactgtaatttaatacttaaagtcaaaagcataaggaagcattggtaattatttaagtgaatataaaatgtcagcttatttttctcagtgaatcttttgtaatagtcaactcacattgcctattttttattgtagtgcttctgatctgaataaataaatttaaaatttaacagccatgttatgtatcttattagtaggcagctgcagttatgcaaccaaagaatgtcccatctttaagttccattagcttgaaaaagaaatggcagctttacgtcatggaatactgtgctgccactaaaaatgatgttttagaagaatatttaatgatgcagaaaaatattcacagtatcttaatggaaagaaaagattataaagcagtaaccatttcgttttgttaaaatcaggtctatgttagctttttttttttgagatggaatctcgctctgtcacccaggctaaagtgcagtggcgtgatctcggctcactgcaacctccgcctcctgggttcaagtgatgctcctgcctcagcctccctagtagctgggattacaggagcatgccaccacacccggctaatttttttgtatttttagtagagatggggtttcaccatgttggccaggctggtcttgaactcctgacctcaagtgatccacccgccttggcctcccaaagtgctgggattacaggtgtgagccaccgtgcccggcgagcatttccttacatgcttatctctggatggtcagattgtaggtaacttctattttgcacttcacactttttttttttttcttgagatggagtttcgctcttgttgcccaggctagagtgcaatggcgtcatcttggcccactgcaaactccgtgtcccgggttcaagcgattctcctgcctcagcttccagagtagctgggattacaggcgcccgccaccacacctgcctaatttttagtatttttagtagagacagaggttcaccatgttggccaggctggtctcgaactcctgacctcaagtgatccactcgcctcggcctcccaaagtgctgggattacaggcgtgagccaccgtgcccagcctgtacttcacacttttaatatttcattttctgtagtggatttactattaccagggaaggggaatgcaaggaggagggaagagttcttaacctaaaattttcatagttggaatattattataggaaagaagagattgaatgaggtgtcactgttcccatgtttaaagataagtcaattgggaggccgaggcaggtgaatcacgaggtcaggagttcaagaccagcctggccaatatggagaaaccccatctctactaaaaatacaaaaattagctgagcgtggtggcaggggcctgtaatcccagctactcgggaggctgagggaggagaatggcttgaacccagagggtggaggttgcagtgagctgagatcgtgccactgcactccagcctgggcgacagagtgagactttgtctccaaaaaaaaaaaaaaagataatactttccttctattcaatttcaggcttttcttaagttacaaatggaaccagccaaactatgttattgcttacccattgtttttccagcgttagaggagtttttcaaagaatattttttgatttagagattattttatttattatctatttagagattattcatcatttagagattgccatttaatttcagtaagagttccatttgcatctgatattttttagtttcggagaaaggaaatggtggagaaatggattcatctccaatcctttggaataaaattcagacagtttaagctctagtctcaacttgatttaatttggaattgcatgatgtggtgtcagatttgggttcacatccagttctcttgctgtgtaaccttgggaaatttacccagcatctgagttgtttcttcatgtgtgcagtggagacaataccaagatgaagatttcatgagatgtctagtgtagacatctatttttcagagtggatgcatttaacagttggatgctgaatttataagagtatggatttcataaaaagagcataaatttcatgatatgatgtatatatcaaaagatataggtcgggtgcagtggttcatgcctgtagtcccagcactttgggaagttgaagcggatggatcacttgatgccaggagttcgagaccagcctggccaacatggtgaaacttcgtctctactaaaaatacaaaaattagccaggcgtggtggtgtgtgcctgtaatcccagctacttgggaggctgaggcaggagaattgcttgaacccaggaggcagtggttgcagtgagccgattttgtgccactgcactccagcctgagtgacagattgagactccatcttaaaaaaaaaaaaatgatggctgaataggaacagctctggtctgcagctcccagtgagaccaaaatgtagaaggcgggggatttcttcatttccaactgaggtacccagttcatctcattgggactggttaggcagtgggtgcagcccatggagggtagcagaagcagggtggggcgtcgcctctcccggaagtgcaaggagcgagagatctcccttccccaagccaaaggaacccgtgagtctatgctatccggcacagatactacacttttcccatgatttttgcagtccgcagacccggagattccttagtgtgccaactccaccagccctgggtttcaagcacaaaactgggcatctgggcagacagtgagctagctgcaggagttttttttttttccccctcttcataccccagtggtgcctggaaccccagtgagatagacccattcactcccctggaaagggggctgaagccagggagctaggtggtcttgcttagcgggtcccactcccacagaacccagcaagctaagaaccactggcttgaaattctcattgccaacacagcagtctgaagctgacctgtgaagattgagcttggtgaggggaggggcgtctgccattactgaggcttgagtaggcagttttcccctgacagcactaaggaggctgggaagttcagactgggcagaactcaccacagcgtggcaaagtggctatggccagactgcgtctctagattcttcctctctgggcagggcatctctgaaagaaaggcagcagccccagtcaggggcttatagataaaactcacatcttcctgggacagataacctgtgggaaggtgcagctgtgggcgcagcttcagcagacttaaatgttcctgcctgctaggtctgaagaaagcagtggatcctgacaaggaggattctcctagcacagcacttgagctctgctaggggacagactgcctcctcaagcgggtccctgaccccagtgcctcctgactgggagagacctcccagcaggggttgacagacacgtcacacaggagagctcccgtgggcatcaggctggtgcccttctgggacgaagctcccagaggaaggagcaggcagcaatatttgctgttctccagcctccgctggtgatacccaggcaaacagggtcaggagtggacctttagcaaattgcagcagacctgcataagaggggcctgttagatgaaaaactaacaaatagaaagcaataatatcaacatcaacaaaaaggacccccacacaaaaaccccatcaaaaggtcatcagcctcaaagatcaaaggtagataaatccacgaagatgaggaaaacccagtgcaaaaatgctggaaattccaaaaacccgaatgcctcttctccttcaaatgaacacagctcctctctagcaaggccgcaaaactggacggagaatgagtttgacgaattgacagaactaggcttcagaaggtgggtaataacaaactcctctgagctaaaggagcatgttctaatccaatggaaggaagccaaggaacttgataaaaggttacaagaactgctaactagaataaccagtttagaggacataaatgacctgatggagctgaaaaacacagcacaagaacttcgtgaagcatacacatgtatcaatagtcaaatcgctgaagcggaaaaaaggatatcagatattgaagatgaacttactgaaataaggcatgaagacaagattagagaaaaaaggttgaaaaggaacaaacaaagcctctgaaaaaatatgggactatgtgaaaagaccaaacctatgattgattggggtccctgaaagtgatggggagaatggacccaagttggaaaacacacttcagggtattatccaggagaacttccacagcctaccaagacaggccaacgttcaaatcaggaaatacagagaacaccacaaagatactccttgagaagaccaaccccaagacacataatcgtcagattctccaaggttgaaatgaaggaaaaaatgttaagggcagccagagagaaaggtcgggttacccacaaagggaagctcccagaggaaggatatctgggcagaaaccctacaagccagaagagagtgggggccaatagtcaacattcttaaagaaaaaacttttcaacccagaatttcacatccagccaaactaagcttcgtaagcgaaggaggaataaaatcctttacggacaatcaaatgctaagagattttgtcaccactagacctgccttataagagctcccgaaggaagcactaaatacagaaaggaaaaactggtactagccactgcaaaaacattccaaattgtaaagaccatcgacactataaagaaactgcatcaactaacggtcagaataaccagctagcatcataatgacaggatcaaattcacacataataatatgaaccttaaatgtaaaagggctaaatgccccaattaaaaggcacagactggcaaattggataaagagtcaagacccattggtgtgctgtattcagaagacccatctgatgtgcaaagacacacataggctcaaaataaagggttggaggaatattaaccaagcaaatggaaaaaacaaaaaaaaaaggggtgttgtaatcctagtctctgataaaacagactttaaaccaacaaagttcaaaaaaggacaaagaagggcattacataatggttaagggatcgatgcaacaagaagagctattttaaatgtatatgcttccaatacaggagcacccagattcataaagcaagttcttagagacctacaaagagacttagattcccacacaataatagtgggagactttaacaccacactgtcaatattagacagatcactgagacagaaaattaacaaaaatattcaggacgtgaactcagctctggaccaagcagacctaatagtaacctacagaactctctaccacagatcaacagaatatacgttcttctcagcacatcacacttattcactcaaaaccccacaactacatggaaactgaacaacctgctcctgaatgactgctggtaaataacgaaattaaggcagaaataaagaagttctttgaaaccaatgagaacaaagagacaacgtaccagaaatctctgggacacagataaagcagtgtttagaggggaatttatatcactaaatgcccccatcagaaagcaggaaagatctaaaatgaacaccctgatatcacaattaaaagaactagagaaaaagagcaaacaaattcaaaagccagcagaagacaagaaataactaagttcagagcagaactgaaggagatagagacatgaaaacctctccaaaaatcaatgaatcaaggagctggttttttgaaaagattaacaaaatagaccatgagccagactaataaagaagaaaagagagaagaattaaatagacacaataaagaatgataaaggggatatcaccactgatcccacagaaatacagactaccatcagataatattataaacacctctacgcaaataaactagaaaatctagaagaaatggataaattcctggaaacatataccctcccaaggctaaaccaggaagaagttgactccctgaatagaccaataacaagttctgaaattgaggcagtaattaatagcctaccaaccaaaaaaagcccaggagcagatggattcacagccgaatgataccagaggtacaaagaggagctggtaccattccctctgaaactattccaagcaatagaaaaagaaggattccttcctaactcattttatgaggcaagcatcatcctgataccaaaacctgtcagagacacaaccaaaaaaggaaatttcaggccaatatccctgatgaccatcgatgtgaaaatcctcaataaaatactggcaaacagaatccagcagcacatcaaaaagcttatccaccattatcaagtctgcttcatctctgtgatgcaaggctggttcaacatacgcaaatcaataaaagtaatcaatcacataaacggaaccagtgacaagaaccacatgattatctcaatggatgccgaaaaggccttcgataaaattcaacaccccttcatgctagaaactctcaataaattacgtattgatggaacatatttcaaaataataagagctatttatgacaacccatagccagtatcatactgaatgggcaaaagttggaagcattccttttgaaaaccagcacaagacaaggatgccctctctcaccactcctattcaacatagtgttggaagttctggctaggcaagagaaagaaataaaggttattcaaatagcaagacaggaaatcaaattttctctgtttgcagatgacatgattgtatatttagaaaaccccatcatctcaacccaaaaactccttgagctgataagcaacttcagcaaagtctcaggatacaaaatcagtgtgcaaaaatcataagcattcctatgtaccaataatagacaaacagccaaattatgaaggaactccctttcacaattactacaaagagaataaaatacctaggaatgcaacttacaaggggtgtgaagggcctcttcaaggagaactacaaaccactgcttgaggaaataaggacgcaaacaaatggaaaaacattccatgctcatggatgggaagaatcaatatcgtgaaaatggccatactgcccaaagtaatttacagagtcaatgctattcctatcaagctaccattgactttcttcacagaactaggaaaaactacgtagagccaaaacaatcctaagcaaaaagaacaaagctggaggcatcctgctacctgacctcaaactatactacaaggctccagtaaccaaaacagcatggtactggtaccaaaacagatatatagaacaatggaacagaaccgaggcctcagaaataacaccacacatctacaaccatctgatcttcaacaaatctgacaaagacaagcaatggggaaaggattccctgttttataaatggtgctgggaaaactggctagccatatgcagaaaacagaaactggaccccttctttagagcttatacaaaaattaactcaagatcgattaaagacttaaatgtaaaacctaaaaccataaaaaccctagaagaaaacctaggcaataccgttcaggacataggcatgggcaaagacttccatgactaaaacaccaaaagcaatggcaacaaaagccaaaattgacaaatgagatctaattaaagagcttccacacagcaaaaaaactatcattggagtgaacaggcagcctacagaatgtgagaaaatttttgcaatctatgcatctgacaaagggctaatatccagaatctacaaggaacttaaattacaagaagaaaacaactccatcaaaaagtgggtaaaggatatgaacagacatttctcaaaagaagacatttatgtggccaacaaatgtgaaaaaaagctcatcatcactggtcattagagaaatgcaaattaaaaccacaatgagataccatctcacgccagttagaatggcgattattaaaaaggcaggaaacaacagatgctggagaggatgtggagaaataggaacacttttacacttttggtggaagggtaaattagttcaaccattgtggaagacagtgtggctattcctcaaggatctagaaaccagaaatacaatttgacccagcaatcccattactgggtatatacccaaaggattataaatcattctactataaagacacatgtacctgtatgtttattgcagcactatttacaatagcaaagacttggaaccaactcaaatgcccatcaatgacagactggataaggaaaatggggcacatatacaccatgaaatactatgcagccataaaaaagattgagttcgtgtcttttgcaggtacatggatgaagctgtaagccatcattgtcagcagagtaacacagtaacagaaaaccaaacactgcacgttctcactcataagtgggagtcgaacagtgagaacacatgggcacagggaggggaacgttacacattggggcctgtcaggggttggggggcaaggggagggagtgcattaggacaaatataatgcatgtggggcttaaaacctagatgatgggttgataggtgcagcaaaccaccatggcacatctatacctgtgtaacaaacctgcatgttctgcacatgtatttcagatcgtaaagtaaaaaaaaaaagatatggaagttactatgcgcgttaataaaatatgtttatacctcctcccttaggtgtctattatgtagaacaagtttattacattctaatgataaagtaaacactctgttttcaaaggtggtgttatacgtttgtgtatcttttgccccgggcatgatgatttcatcgtttgtgtaataaatttaatactaccatagtctccccttattcacacgggataagttccaagaccccaatggatgcctgaaactgtggatagtactgaatcctatatacacttatgtttttttcctgtacactcatatttatgataaagtttaacttataaattgtgcacagtgagagactgacaataactataataaaatagaacaattataacaatatactgtaataaaatttatgtgaatttggtttcaaaatatcttattgtactgtactcacccttatgatgatgatgttagatgataaaatgcttatgtgatgtgatgaaggtaggtgaattatgttaggcattgtaatgcagcatgaagctactattgaccttctggtgttacatcagaaggaggatcatctgcttgggtggtcctgaatcatcacgtcctgatgatgtctgttgctggttgtcaggagcagacagtgtccatgactaatgggcaggcagcgtatatagcatgtatacactggacaaagggatgtctcatgtccacggctggacagagcaggagagtgcaagattttgtcacactactcagaatcgtgcagtttaaaacttaccaattgtttatttctggaattttccgtttaatatttttggactgcagttgaccacaggtaactgaattcatggaaagcaaaacaaccatggacaaagtgggattactgtattatttcagattttaattagcatttttcaaaactctgtctagctagtgcttgcattgtagaatttgtctgatttcatttttattgattagggaaataagctttatttttatctggagtgatttgtttctttgtgcttcctcaaaattgagtagtggctactgagtatatatcgaaaaggaaataaattattatgtcaaaaagatacctacatttgtatgttgattgtagcactgttcacaagattaaagatatggaatcaacctaagtgatgaagaaaattggtgtgtgtgtgtgtttgtgtgtatacatacacactgtggaataatactattcagccacaaaaaagaaaaaaaaatcatgtcttttgcagcaacatggatgggactggaggccattatcctaactgaaataactcagaaagtcaaatactacatgttctcacttacaggtgggaacttaaatggttacacatagaatagagtagaataatagacattggagactccaaaaggtgagagggtggcaggggggtgagggttgaaaaattacctattgagtactttgttcagtatttgggtgatgggtacactaaaatcccactttaccaccatgcaatatatgcatgtacgaaatctgcacttgtaccccctaaatatatacaaataaaagttttttaaaacacttagtaaatagcctgtcatagggaataattgaaaccatttcgtatctcactttaaaacctttaggctgggtgctgttgcttatgcctataatcctagcactctgggaggccgaggtgggtggatcacctgaggtcaggagttcgagaccagcctggccaacatggcgaaatcccatctctactaaaaatataaaaattagccagtcatggtggcacacgcctgtaatgccagctccttgggaggctgaggcgggaaaatcacttgaacccaggaggcggaggttacagtgagccgagatcacaccactgcactccagtctgggcaacagagcgagactccatctccaaaaaaaaaaataaaaataaaaataaaaaacctttttagttctgtttcaatgttatcttctttttatttaattatttttggaataagaaataatatttatatggtttgaacaccaaaaggtataaaagatatttttaaaggtataaagtataaaagttagaaatttcccccacttccctgttctctgttcccacagctgccagcagcttaccaccccccagcccaatcactgctactgatgcctaacctatctttccagagttctttgtgtgttcagtagcagttaaccacagatctttaatcattcccctttataccataaaaggtggcatgttatgtacacttgcctcccctttgctttttccacttaatgtgtcttgagaagctttccatatatcagtacatggaaaactttcttatattgttttattttaaatttatatacaataaatgcatggatcagaaaaataattgaatagtgggccccaaattaaatgattactctaatgatttgtagatgggtttagttaaagcactgggatatttagctacaggtataggaatgcatgattattttctgtcaggaaacctagattttgttcttctccccttctttatcaaaggtgaaatcagactcttatttaaaccaggattaagtattctttgcataataatatatatttgctttcccaagttattcttcaggaaagtcttgactctctagcaaactttgtttcttaaaatggaggttagcaggtgttggaaataaggtgagagttttaacacttaaaggaaactatataaagattagatatagtcagaaatttagaaaacattaggaaattcacagagagatggatcccccttttctaccctagattacccctgggctgcttaatggcttgtctttactattagattgtgagctccttgaggtcaggttttatctgttttttatttcaataccaagtgccaagaatatattcagcatttggtgtaaatattataaaatgagtaaatgaatgtgctcttgaatagaagttaactctgattttgggttaagtcccccgccccctttttttgagacagtctcactctatagctcaggctggagtgcagtagcgcagtctcagctcactgcaacccccttctccggggttcaagcaattcttatgcctcagcctcccaagtagctgggattacaggtgtgtgccaccacacccggctgatttttgtatttttagtagagatggggtttcaccatgttggccaggctggtcctgatctcctgaccttaggtgatctgcctgccttggcctctcaaagtgctgggattacaagtatgatctactgcgtctggctgattttgtgttaaaatcctttatgtcagttccagaagaggttaaatggaagttttcgaggcaagagatacttgtgaatttgacatgagtggcctttgttttgaaattttaatgctacacagatgctgtaaaaggattttttcaggccgggcgcggtggctcacgcctgtaatcccagcactttgggaggccgaagcgggtggatcacgaggttaggagatcgagaccatcctggccaacatggtgaaacctcatctctactaaaaatacaaaaattagccgggcgtggtggtgtgcgcctgtagtctcagctactcaggaggctgaggcaggagaattgcttgaacccgggaggtggaggttgcagtagagccgagatcgcgccactgcaactccagcctgggccacagagcaagactccatctcaaaaaaagggtttttcaaaaaatcatgtacaattagaaaattgtgtctcttaaatctatttgcttatgttattaatcccagattatgactgttctttcccctaaggcattagcctgttgaaagaaacagacctataggacttttgttgatgttaaagccagaccagaaatttagaaaatcaggatatttgccattttgataagaaaaccatttaatagttgaatataggaatttgcattttgagagtgtgtactaatttagattctccaggaatagaaccatcatctgaaaataaataagtttaaccagacggacaaggagtgatatgtagttttaggtggtaagactgtgatattgttaggttacatgtatctagggcaagatgctcaaatacaataagtatatacagactaggaactctagttgtctttttttaattaatgaaaagagggttttatgcttcatttctaaacattctcaaaggaatttatgttttgttgatgatctttttttatttatataaatttacgggggtacttgtgcactttttttttaaacatggatagattacagagccgtcaagtcaagcctttagagtttccatcacccaaataacacacattgtattcattaagtaatttctcatgatctcccacctcctgctctctcacctttccaagtctgttatctatcattccatgctctacgtccatgtgtacacatttttcagcatccacatgtgaatgagaacatgtgttattcccaccaacagtgtatgagtgttcccttttctctgcaacctcaccaacttgtgttattttttgtctttttagtaatagtcattctaactggggctggatgatacctcattgtgggtatttttaaaataaaaaaaaatttgtgtgtacataggtatatttatttatggggtacatgagataatattgatacagacatacaatgttcaataactacatcagggttgtatccatcaccaagcatttatcctttcttggtgttagaaacaatctagtttctaatctctaatagtttctaatctctagtagttatattaaaatgcataatgaattattattgactgtagtcaccccattgtgctatcaaatgctaggtcttattcattctatctaactatatttttatacatattagccatccccactgtgccaccatccccattagtgccctggcccccactacccgtcctagcctctggtaaccatcattctactctctatctctatgagttcaattgttttgatttttagataccacaaataagtgagaacatgtgaagtttgtttttctatgtctagattatttcacttaatataatgacctacagttccatccatgttgttgcaatgacaggatctcatacttttttaagggctgaataggactccattgtgtatgtgtaacacattttctttattcgtccgtctgttgatggacactcaggttacttccaaatcttggttattgtgaatagtgctgcagtaatcatgggagtgcagataactctttgatatactgatttcctttctttggggtacatatttagcagtggaattgctggattatatggtagctctctagtttttttttttttttttttttttcatttttgagacagggtctcactctgttgcccaggctggaatgcagtggcggaggttcacttcagcctcaacctcgcaggcttaggggatccacccacttcagtcttccaagtagctgggactataggcgcataccaccatgcccagctaggtttttgttgttgttgttgttgttgttgaggcagagtctcactctgtcacccaggctggagtgcagtggtgcgatctcggctcactgcaacctctgcctcctcggttcaagccattctcctgccttagcctcccaagcagctgggattacaggcgcccaccaccatgcctggctaacccagctagtttttaattgttcgtagagatggggtttcaccatgttgtctagactggtctcgaactcctcgactcaagtgatcctcctgcgttggtgtctcaaagtgctgggattgcaggcacaaggcaccgtgcctggtcagaatttttttttaagggtttctcctttgtaaatttcttattcatatcttgaattgattttctgagtttcttgtattggttttcagacttttcttgcatctcagtgacccttaaaatcaatattttgaatattttatctgggattttgtggatttcattttggttaagatctgttgctgcagaatcgtgttcctttgacagtgtcatattaccttggtttctgatgtttcctttgtcttttcattgatttctgtgcatgtgctgtaacagtcacttcttatctttgaatttactttcatggtgaggggagatttcttcctgaagatgtgactataatgttggttgggccttgcttctgggtgcgtgcagtagtgaagtctctgtatgatttattttgagacagctctgttgcccaggctggagtgcagtggcacattcatagcttgcttcagcctcaaagtcctgggcataagtgatccttctgcctcagcctcctgagtacctaggactacaggcgtgtgccaccatgcctggctaattttcaattttcttttagagatgggggtctcattatattgcccaggctggtcttgaactcctggtctcaagcaatcctctctccttggcctcccaaaatgttaggattacaggcatgaaccaccgtgcccagcctctgtatgatttctttggctataaatagcattaatggtgtctgtggtttccttgatgtcttagcttgagtttatttgtggaggctgaagttgcgctggggattggaatgcctaataggcctgtctttaggtttcaatggtagtgatggtgggctaagcatgtctatccatgtgccctggggcagtgtgtgctggtaactgtgttggcagttccaggcaggctgattcttgggcttctgagtgactttctcagatgcctgttgtaatggtgtaccaggtgggtgagctggctcttgagctcctgggcaactggcatggcatagtttatggtggtagtagttttgttgagatactcttgtgggtcccaagcactttgcatttgtgttagcagtggttacaatgagatccaggccagtaaggtggtacttgcaggcatgaggcagctgaggcggtactggtagggtgttatccctgacctctgtcccctgggagaagtactctggtgtttcagagtgtttcaggtagtgggtttggttgtggaatcccctggtaacctggatcctgcactgtttctcagccaggtcaaagcctggtagagctggactgggaaagcttgcactcaggcccccacagtggtgtaatgtcatgataggcggggtggaatgatcttcaggctgctggcaaaatgcttgggtgagggatgagtgccactgctgagatcctgccatggggaagttgggcctggtcccaggagtgagttgtgttcctttcatgccccagtccaggcggagttccttcctcttgtccctgctgttcagtcagaactctgcagttcttgcctagtccctaaatcatcccagggtcgggtcatataagccccatccagctcaagacttaagcctccagggcaattaatcgtgctcaaatcctgggggtggtgtttgcttctagcactggtggtggctgcatcccacaccaggcagagccaccccatccccgcccctactcacactctgcctctccaaacagcagcccaagtttccctaatggctaggactggccctgttgcttccccgtactgctcacagttatgagctgagatcctgcatcgtgtcttgttacagctgcttaggtttcaaaaatggcatgggacacagaatgtgttccctccctgaaacagttctttctcacagtcttccagtcattccctaaattaattagattcagggcttaagagggtcagggtgctctactgaggactggattgtatggtagtggaccacagaaaaatactcaccctctcccatattggggaatcacttctggttccctgtgggtcccagccacacaggctctctgttttccttttgcttcctagattttggtttttgctgtcgcttttctgttgaactcctgtgttccctctgggataatatatccaaagtgtcattgtctacacaattttagctcttgtacctggatgaggcacgcttgaaattcttgcagtcatccatcttttcctgatcttgtttcttctgccccattccccaggttcctccagggtctcacagttcccctgtatgtgggaaaggcagttttctttctgcccaatcctgcttctcctttgtccacccagatgaggtttccgctagaattgctacttaaagtggttctgtggaacattttgtagcagagaaaatcagggctgagggagcaccataaaggttagaaaagattagaacattaggttagaaaatctgaactactctacctgtcttgattaggaggattagagttgatgttggatgggtttgttggtttattttccacttatctatcagaatgaagaacttactgccttttcttcttagttggtctaatatttatcactttaattatttttaagtgtacaattcagtggcattaaatatatttataatgtatcatgatcattactacctatgcccaaaactttttcatcatccccaacaaaactctatatccaaaaaaaaataaaaccctctatatgtacatggaacaattaagttgggcccctatcttgcaccatataaaacagttaaatgcatcaaagatcttaacgttaacagctaaaattataaaactcttagcagaaaacatttgggctgattttcatgacctgggatttggcaatgatttcataaacataatgtagaaagcacaggcagcaaaagaataagtaagttggacttcattaaaaatttaaaaatttttttacatcagaggtcactatcggctggatgtggtggctcacacctgtaatcccagcactttgagaggctgaggcgggtggatcacttgaggtcaggagttcgagaccagcctgaccaacatggtgaaaccctgtctctactaaaaatacaaaaattagctgggcatggtggcgcgcacctgtagtcccagctacttgagaggctgtggcaggagaatcacttgagcatgggaggtggaggttgtagtgagctgagatcgtgccactgcactagaacctgggcgagagcgcaagactccatctcaaaacaaacaaacaaacaaaatgaagcaatcccccccccaaaaaaaaggtcactatcaagagaataaaaagaaagacaactcagaatgggagaaaatatttgcaaatcatatgactgatgagggtttaatatccagaatgtgtaaagaacttttactgagcagcgaaaagaaaacccaatgaagaaatgaacaaaggccttcaagaaatgaacaaaggccttcaatagccatgactttacttttttaaatttaaatttaaattttttgagacaaagtcttactctcttgcttgggctggagtgcagtggtgtgactgtggctcactgcagccttgatctcccagactcaagtgattctcctacctcagtctctggagtagctaggatgacagactcacactaccacatgtgactttgtgtgtgtgtgtgtgtgtgtgtgtgtagagacagggtctcactatgttgctcaggctggtcttgacctcctgggctcaagtgagcctctcacttttatttttatttgtagtagagatgagatcttgctaatgttccccaagctggtctcgaactcctgagctcaagcaatcctaccttcctcggcctcccaaagggctgggattataggcgtgattcactgtgcctggcctagtttctttgttttaatttttttcctccccatttgtcttttgagtttccctgagaatctgtcttgctgctgtctcagttgtcattcactgttattacactggaaccctattgatgtagtggtaaggaattagggaggggaagtgttttgtaatctcatgattaaatgtcatttcttttttttttaattggtcctgagtccctgaattgtgactctcagaagtgtttcttagcccttgccctcccacttagatgagacaggaaggctataagcctcgggggttttctaattgtctttcctcttggtagataatggtgtgagcatatttgaatatagtttctttcctctcctcctgctcaaggcacaaggaaattttcctcaaatatttgcagtgaaaacatactaaaacccttgtaggattcctggaggtaaaacctaggaaagtgtaggggcccctctaagactgggatgtcaggatttttaaactctcaaactaatccatatttggcctccagaagttgtcagtttctacttgagtgtttctgttctaggaaagctgtgatattctgtatctgtctttctagttttttttggtggtggtttgccttgtgacctcagtttttggattgatctaagataaattactgattttcagttttctcagcgttttttcttgtcaggatagaagtgaggacctccaaaatccttacatattatagctgcctggtgagttttgtttgtttctttttttaaaaattttttttttttttttttttttttgggatggagttttgcgcttcttccccaggctggagtgcagtggcgcaatctcggctcactaaaacctctgcctcccaggttcaagcaattctcctgcctcagcctcccaagtagctgaaattacaggtgcccgccactatatctggctaattttttttatatttttgatagagatggggtttcgtcatgttggccaggctggtcttgaaatcctgacctcaggtgatctacccacctcggcctcccaaagtgctgggattacaagtatgagccaccttgcctggcccgttttttcttacttttagtaaaaataacctcacgtaaactgtcataggtgtctgtgggcttatttttgatgttctcctttgttggaaattcttgtgaaataccttccaggtcttagtctttgtgaggatcaggttctgctttcaattggatgttttaagaattagttttaaaataatttgtttttcttattattagcaccctatgtttagttgctgtacttatttggatagtgtggtaagcacagtggcttaggcatgagaaatataactagagatctcataattttatgtgtttataaagtgttttatttaaaaattaaataattgcaaatgagtggataaagaaactgatatatatatatctgattatatatatatatatctgattatgtatatatatctgattatatatatatgatggaatactacccggctataagaatgaatgaattaatggcatttgcagtaacctggatgggattggagactattattctaagtgaagtaactcaggaatggaaaaccaaacatcgttatgttctcgctcataagtaggagctaagctataaggatgcaaaggcataagaatgacacagtggcttttggggactcagagggaaagggtaggaaggagatgagggataaaagactacaaattgggttcatgtgtactgcttgggagatgggtgcaacaaaatctcagaaattaccactaaagaatttactcgtgtaaccaaataccacgtattccccagaagcctgtggaaataaaaaattaaaaaaattgcaaatgtaaataagacagtaacaaagatggcaaagaacaaagatgaaaaagtatgctgtattacctgaaagtgcttttatggatatcttagcttatccttcgtccatttaaatattgttagttttagccgggaacatgcctgtaatcccagcaccttgggaagctgaggcgggcagaccacttgagaccaggagtttgagaccagccaggccaacatggtgaaacccgtctctactgaaaatataaaaattagccgggcgttggggcgcatacctgtaatcccagctatttaggaggctgaggcaggacaatcacttgaacctgggaggcggaggttgcagtgagacgagattgtgccactgaactccagcatgggtgacagagtaagaccctgtctccaaaaaaaaaaaaaaaaaaaaaagacacaaaagagaaacaaaaaaaacatattgttagttttgatgattatctactagggtaagtacttttctactcattaaattccattagtgactgtgccttgatttccctgaaaggatgcagtatagagtaggcttttgattggagatagacttcctgattttccacttagtatttaggagtgaaaattattattattattatttattgttttttttttttttggagacagggtgtcactgtatcgcctaggctggagtgcagtggcttgatcctgactcactgtagccttgacttcctagggtcaagcaatcttcccacctcagcctcctgagtagctgggactacaggcacgtgccaccacagccggctaatttaaaaaaattctgtagagatgggatctcactatgttgttcaggcttgtctcaaactcttgggctcaaatcatcttcccacctcagcctccctaagtgctgggattataggtgtgagccactgcacccagccggaagtgcaaattatttaactcctttattttattcagcaaataaatgtctttctgagcctcagtttcctgtaataaggttcttataagttttaaatgaggtcagtgtgcattaaatgtacatgttagaatttggtaaggttagtaagaaaaccaaagacatgtggaccctttacaaaaaattccagcatttaccctaagagatgctttttaagtggttgaaatttggtggcatggaggaaatgtatatgggctcgtatcacatttgggagtaaaattaaggcatgaaatttaaacaaaaaataaaattgtgggtacatagtaggtgtatatatttatgggatttatgagattctgagacaggcatgaaatgtgtactaatcacatcatgtaaaatgggctgtccatcccctcaagcatgtatcctttgagttgaaaaacaatccaattttattctttcaggtattaaaaaatgtacaattaatttaatacagtaaataatacattaatttgatctcaaactcctgacctcaaatgattaattagattaattaatgtattatctattatttattatatacaccctgttgtgccatcaaatactaggccccccccccccttttttttttttggagacagagtcttgccctgtcgcctaagctggagtgcaatggtgcgatcttggctcactgtaacctccgcctcctgggttcaaatgattctgctgcctcagcctcccgagtagctgggattacaggcgcccaccaccaagcccagctaatttttgtatttttagtagagacggggtttcaccatgttggccaggctgctatcgaactcctgaccgcgtggttcgcccgccgcggcctcctaaagtgctgggagtacaggtgtgagccactgcgcctggccaaatactaggtcttattcatgctttccaactgtttttttttttgtacccattaaacgtcaccacatcttgccccccctcgcacttctcttttctttctactctgtgtctccatgagtttgttttgatttttagattccacaaataagtgagaatatgcaatgttggtctttctgtgcctggcttatttcacttagcataataacctctagttccatccatgttgttgcaaatgacgggatctcattcttttttatggctgaatagtagtccattttgtgtaactaccacattttctttatccattcatctcttttgatggatacttaggttgcatccaaacctggctattgggaacagtgctgtaataaacatgggaatgcaggtatccctttgatatgctgatttgctttatttctggtgtatacccaagcagctggattgctggatcatatggtagctcaatttttagttttataaggaacctccaaactgttcttcgtagtggttgtcctatttcacgttgttgccaactgtgtatgaggattttcttttctttacatcattgccaacatttgttattgcctgtcttttggatataagccatttcaactcaggcaagatggtatctcatggtagctttgatttgcatttctctgatgatcagtgatgtagaatgctttttcatatgcctatttgcaatttgtatgtcttcttttgagaaatgtgtatccacattttttgcccatttttgattggattattagatttttattctgtagagttgtttgagctacttacatattctggttattaatcgcttgttagatggatagtttgcaaatactttctcccattctttgggttgtttgttcactttgttgattgtttcttttgttatgcaaaagctttttaacttgatgtgatcccatttgtcaagttttgtttggttacctgtgcttgtggggtattgttcaagaaaattttgcccagactaatggcctagagagtttccccaatgttttcttgtagaggattcataaattgaagttttagataaaattctttaatccattttgattttatttatgtatagagcaagagataggagtctagtttctttttctttttttttttttgaggtggagtttcggctcttgttgcccatactggagtgcaatggcacggtctcagctcactgcaacctccgtctcccaggttcaagcgattctcctgcctcagcctcccgagtagctgggattacaagagcccaccaccatgcccgtctgatttttgtatttatttatttttatttatttatttatttatttatttagttttttgagacggagtcttgctctgtcacccaggctggagtgcagtggcacgatctcggctcactgcaagctccgcctcccgggttcacgccattctccagcctcagcctcccgagtagctgggattacaagagcccaccaccatgcccgtctgatttttgtatttatttttatttatttatttatttatttatttatttatttatttagttttttgagacggagtcttgctctgtcacccaggctggagtgcagtggcacgatctcggctcactgcaagctccgcctcccgggttcacgccattctccagcctcagcctcccgagtagctgggactacaggcgtccgtcactgtgccggctaattttttgtatttttattagagacggggtttcaccgtagccagaatggtctcgatctcctgacctcgtgatccgcctgccttggcctcccaaagtgctgggattacaggcgtgagtcattgcgccaggctaatttttgtatttttaatagagaccggatttcaccatgttggccaggctggccttgaactcctgacctcaggtggtctggccgtctcggcctcccaaactgctgagattacaggtatgagccactgcacccggcctggagtctagtttcattcttctgtatatggatatccagttttcccggcaccatttatttatttatttttatttattttatttttttttgagacagagtctcattccatcacccaggctggagtgcagtggtgtgatgtgggctcactgcaacctctgcctcccggattcaagcagttctcctgcctcagcctcccgagtagctgggattacaagctaatttttatattttgagtagagatggggtttcaccatgttggccaggctgatctcgaactcttgacctcaaatgatccacctgcctcggccccccaaattactgggattacaggcgtgagccaccgtgccgggccagcaccatttatttttattttattttacttatttttttgagagtgagtctccctatgttgcccaggctggagtgcagtggtgctatctcatctcactgcatgcagcctctgcctcctgcgttcaagcgattctcctgcctcagcctcccaagtagctgggattacaggcacccaccatgatgcccagctaatttttgtatttttagtagagacggggtttcaccatgttggccaggctggtctcaaactcctgacctcaggtgatccttccgccttggcctcccaaagtgctgggattacaggcatgagccaccatgcccagcctggagtctagtttcattcttccgtatatggatatccagttttcccggcaccgtttacttatttatatttatttattttattttttttgagacagagtctcatttcatcacccaggctggcgtgcagtggtgtgatctaggctcactgcaacctcttcctcctgggttcaagcaattctcctgcctcagcctcctgagtagctgggatgacaggtgtgtactaccaccatgcccaactaatttttgtatgtatgtatgtatgtatgtatgtatgtatgtatgtatgtatgtatgtatttgagacagaatcttgctcttttgtcgaggctggagtgcactggcacgatctcggctcactgcaacctccgcctcccaggttcaagcgattctcctgcctcagcctcctgaggagctgggattacaggtgcatgccaccacgcctggctaatttttttttcgtatttttagtagagatggagtttcaccatgttgcccaggctggtctcgaactcctgaccttgtgatctgctcacctcagcttcccaaagtgttgggattacaggtgtgagccagcgtgcctggccccagcaccttttattttatttattttatttatttttctgagagtgagtctcactgtgttgcccaggctggagtgcagtggtgctatctcccctcactgcaacctctgcctcctgggttcaagtgattcttctgcctcagccttccaagtagctgggattacaggtgcctgccaccatggctggctaattttttttttttttttttttttttttttagcatagatggggtttcaccctgttggccaggctggtctcaaactcctgacctcaagtgatccgtctgctttagccttccaaagttctgggattacagatgtgagccactgtgcctggccccagcatcatgtattgagcctttttcttttccccagcatatgttctcggcacctttctagaaatagaaaatgagttcaccgtagatgtgtggatttgtttctgagttctgtattctgtccattggtttatgtgtctgcttttatgccagaatcatgctgttttggttactataactctgtggtataatttgaagtctgataatgtgattcttccagttttgttctttctgcttagtatagttttgggaattctggaacttttgtagttccgtgtaagttttaggattgttttttctatttctgtgaagagtgtcattggtattttgatagggattgcattgaatctatagattgctttggatagtatggacagtttaacaatattgattcttccagtccatgaacatgaaatatctttacattttttggtgtcctcttcaatttcattcagtttgcttttcagattggtcactgtcgatgtttagaaatgctgctgatttttgtatattgattttttatactgacagtttactgaatttgtttatccgttctaatagtttttttgtagagtctgtaggtttttctaaatataagatcatatcatctgcaaataagggtaatttgacttcttcctttcccttatttctttctcttgtctggttgctgtagctaggacttccagtagtaccatgttgagtaactgctggaagtgggcattcttgtcgtgatctggatcttagaggaaaggcgttcagtttttcccctcagtttgataccagttgtgggtgtgttgtatatggcttttattatgttgaggtatgttcctcctaaacccatttttttgagggtttttatcatgaaggaatgttgaatattatcaaatagtttttaagcatcaattgatataatatggtttttgttcttcattctgttgatatgatgtatcacattgatttgcatatattgatcccctcttgcatccaagggataaactccacctggttacgatgaatgatctttttaatgtgtctgatttgctagtattttgttgaggatgtttgcagcaatatttatcagagatattggcctgtcattttctttttttgatgtgtttttgtcaggttttggtaacagggtaatactggcctcacagaatgtgtttggaagtattgcttccttttattttttggaatagtttgagtaggaatagtattgatgcaggaattttctcggcccctttgttggacttgtgacaggggcgaatgtttactcagcctgccgtgctcaaccccttgttggagggtgcatgtgagtgagtgagtgcgggacctggccagctggtgggggcactgacacagcagcaagccctgtgcagggaccacggccagaccaggcacaagcgagtgagtgtgggacccagctgttctgagcaccagcaggagcaggcctgtgcacagcacccaggttgatggggaggggggtggtgtctgtgaccccgaggcccctgagggggtgttaacagtgctcctttagttctgctgtctgctgatggctgtgtgttaacaagttggcctcttgccttgtcatgtggggtggctgccctccactggtgagggcaaagggctggtgtgacagtcttttttgggtacctgcactcagtgggtcctgagctcttgtctggcatccaagaagaatgaggttgagtggacacttgaaggatggtgaaggtgaagaattttattgagcagtgggaatggctcagtggagaggggagctggagaggggatgggaagggctgatctccctgaagtccggccgtttcttccctaagtcatgctgtctcctttcccaaagtttggccatcttctctccgaaattaagctgtttctctcctctctaccaactgaatctggggtctttataagcataggatcctctttataagcacaggatgggggcggggcaggctgtagaagttttggaaaaggcaacattctattggtaaagagacattattcaaacagaaccaatcgggagagagcggacaaacaggaatagaagttttcactttgggctgtgggtttcaggctttttggcttgaacgtggggtttcaccagggactgcccttgtcttcctagaatttctctgcctcctgcctctatcagtattagatcttctttaaatgtttggtagaattcagcagtgaagccatcaggtcccaggcttttatttactgggagaatttttattatggtgtcaatctcgttatttgttatagctgtgttcaggttgcagatttgttcatggttcaatcttggtagattgtgtctaggaatttgtccatttcttctaggttttccagttcattagcatatagtttttcatagtagccatgaatgaacctttttatttctgcagtattggttatcattgtaatgtctccattctcatctctggtttatatatttggatcttcttttttttttctttttttttttttactctggccaaaggtttttaaattttcttttaacttttacaaaaaccaacattttgttttattgatattttgtattattttctttatttcagtttcgtttgcttcactctgatctttattatttcttctaattttggggttggtttactcttgcttttcttattctttaagatgtgttgttaggttgtttatttgaagtatttcttcttttttcatgtaggcactcacagctataaacttcccttttagtaatgcttttgctgtatcccataggttttggtatgttgtgtttcagtatcatttgtttcaatgaattttccaattttcttcttaatttttgcattgacttactgatcattcaagaacatattgtttaatttacatgtatttgtatacttttcaaaatttctcattattgatttctagttttattccgttatcagaggagatgcttgatattatttcaatatttttaatgtcttaagacttgttttgttacttaacatatgttctatccttgagaataatccatgggctgaggagaagaatgtgtattctgcagcccttggatgaatttttctgtaaatatctattaggtccatttggcctctaatgcacattaagtctgatgcttcattgttggttttctttggaaggtctgtccaatgctgaaagtgggatattgaagtctccaagttttatcatattggggcctgtctctcccttttgctctaataatacttgctttatatatgtgagtgctccagtgttgggtgcatttatgtttaaaatggttacatcctcttgctgaattgactgctttatcattatatagtgaccctctttggcttttcctatagtttttgtcttgaaatctattttgtcttatattagtatagccacttctgcacttttttggtttccattggctttggaaaagatttctcgtaattctgtttgataaggacacatgttaggaggttttcaacacttcagtgagtagtaaacttgtaagtaaagcaggtatgaacagaatctcttgaattagtgaaaagtcaaaatcgttaattactgtttaatttaaaactgaaattataggtattaacaaataactatatgccttatactgtactttatttatttatttttccgagacggtcttgctctgttgcccaggctggagtgcggtgacgtgatcttggctcactgcagcctctgcctcccgggttcaagcaattttcatgcctcagcctaccgagtagctgggactacaggcatgcactggcacacccagctaagttttttgtatttttagtagagatgggatttcaccatgttgcccaggctggtctccaattcctgacctcaagtgatccacccaccttggcctcccaaagtgctgggattacaggcatgagccatcatgcccggccatataatgtactttaaacatgatgattttgaaactggaaacacacgcacatgtgagtaatttcttaaatggaattgaattaccttgaagaatcttagaaaaatgatgtttttaattttaaattagttttgcgtcatacatgtctttatttctcaaattttaaagaaaagtctatgaattaaagaaaataaaacttttcctgcatgaaagcaatgagtgtattatgtaccaaaaaggtagaagaaaaatatcttctgtaatattagctagatattacttactaaagatatttttggggtatatttattagcaatattttaatgcaattttaaacataattgtcatcatacttcatagacagtttatagcctgctatttttggttagcattgtagtatgagctattttccatattatttgaacttttaaaatttaatggttggtatgatattgtatgacttgtatgcatccttgtttacctagtctttattatacactttaattgattacagttttttttttttttttttgcttttgtgagcatctggcagataactttcttgagtaaagttattatgtagaaatattttctttgggccaggtgcggtggctcatgcctataatcccagcactttgggaggctgaggcaggtggaacatgaagtcaggagttcaagaccagcctggccaatatggtgaaaccccgtctatactaaaaatacaaaaatcagctgggcatggtggtgcatgcctgtagtcccaggtactcaggaggttgaggcaggagaattgcttgaacccgggaggtggagaggttgcagtgagccgagatcgaaccactgcactccagcctgggcgacagagcaagactccaactcaaaaaaaaaaaaagaaaagaaaagaaaagaaatactttcttactttctttgtatagataaagggagatagaattactagatcaaagtctcttgatggtttttgccaatttgttttgtaaatgtatgtatcaccacaggctatctatgagagtgtctatttcatggaaacttagcctacaatgaatagtcattttacccctaaatatttgataagttaaaaaatgctatcacatttaacatttcataggctttaagaagttgcagttttatattcatttcttcatgcattttgtgtactatttcaaaagtttctataggggaatgagagcaaagtaatgtgtttttcattatttattttgctaaccaaacatatttaattactaaccaaaaggatgatcctaattaagccaacacttggaattattttcatgtaaaatgtctgtgatagagataattgaatttaataatgaaaaaagtattacagaaatttgctcattaaactgagcttgttttcagctaatccttctgcgaagtgataatgactttttttttttttttttaaataaagatgggggctcgctatgttgaccaggctggtcttgaactcctggcctcaagtgatcctcccatctccgcctctcaaattgctaggaatacaggcatgagccaccacacttggtttaatagtggaatttttattacacttttttatggattcgaggagaggtggcattgtacataacacattctaccgctaattttccatctttcacttttctcattgtgctttccttcccattccgttcctggtgttgaaccaatgcatcatttgtaaatttgtagacagtctgagtttttctgccataatctgttgtttcttcagacttcttctctggtttataagaaaactgttgttttaaaactctcagttttgtattttttatttcttattatactttaagttctgggatatgtgagcagaacgtgcaagttttttacataagtatacatgtgccatggtggtttgctgcacccatcaacctatcatctccattgggtatttcttctaatgctatccctccccttgcccccaaccccccaacaggccccagtgtgatgttcccctccttgtgcccatatgttctcattgttcaactcccacttatgagtgagaacatgcagtgtttggttttctgttcctgtgttagtttgctgagagtgatggtttccagcttcatccatgtccctgcaaaatatatgaactgatcctttttttatggctgcatagtattccgtggtgtataggtgccacattttctttatccagtgtaccattgataggtatttgggttggttccaagtctttgctactgtgaatagtgctgcagtaaacatatgtgtgcatgtgtctttacagtagaatgatttataatcctttgggtatatacccagtaatgggattgctgggtcaaatggtatttctaattctagatcattgtggaatcgtcacactgtcttccacaatggttgaacgaatttatcctcccaccaacagtgtaaaagtgttcctatttctccacatcctctccagcatctgttgtttcctgacttcttaatgatcggcattctaattggcatgagatggtatctcattgtggttttgatttgcatttctctaatgaccagtgatgctgagctgtttttcatgtttgttggccatgtaaatgtcttctttggagaagtgtctattcatatcctatgcccactttttgatagggttatttgtttttttcttataaatttaagttctttgtagattctggatattagccctttgtcagatggataaaaaaacactatttttttaaaaaattttccaattcctcatcggtaaaaaagcagtaaaacattcatggtaatgatcatggcctatagttttttttttttttaagtgacattaggatttaaaactggtatgaaacctaatcatttattttagttagctaatatcaggatttagatttatttttttgacccaattgcagataggcagatcagatctcatagactgccatctgcctcaagctccttttgtagttatgtgaatgtgagcctgaaggctgaacccacttttctctaatggagatttttttttattacactttaagttctagggtacatgtgcacaacgtgcaggtttgttacatatgcatacatgtgccatgttggtgtgctgcacccattaactcgtcatttacattaggtatatctactaatgctatccctcccccctccccccaccccatgacaggccccggtgtgtgatgttccccttcctgtgtccaagtgttttcattgttgaattcccacctatgagtgagaacatgcggtgtttggttttttgtccttgcgatagtttgctgagaatgatggtttccagcttcatccatgtccctatataggacatgaactcatccttttttatggctgcatagtattccatggtgtgtatgtgccacattttcttaatccagtctgtcattgatggacatttgggttggttccaggtctttgctattgtgaatagtgctgcaataaacatacatgtgtgtgagtctttatagcagcatgattgataatcctttgggtatatacccagtaatggggtggctgggtcaaatggtatttctagttctagatccttgaggagtcaccacactgtcttccacaatggttgaactagtttacagtcccaccaacaatgtaaaagtgttcctatttctccacatcctctccagcatgtgttgtttcctgactttttaatgatcgccattctaactggcatgagatggtatctcattgtggttttgatttgcatttgtctgatgaccagtgatgatgagcatttttacatgtgtctttggctgcataaatgtcttcttttgagaagtgtctgttcatatcctttgcctactttttgatggggttgtttgatttttttcttgtaaatttgtttaagttctttgtagattctggatattagccctttgtcagatgagtagattgcaaaaattttctcccattctgtagtttgcctgttcactctgatggtagtttcttttgctgtgcagaagctcttgagtttaattagatcccatttgtcaattttggcttttgttgccattgcttttggtgttttagacatgaagtccttgcccatgcctatgtcctgaatggtattgcctaggttttcttctagggtttttatggttttaggtctgacgcttaagtctttaatccatcttgaattaatttttgtgtaaggtgtaaggaagggatccagtttcagctttctccatatggctagccagttttcccagcaccatttgttaaatagggaattctttccccattttttgtttttgtcaggtttgtcaaagatcaggtggttgtagatgtgtggtattatttctgagggctctgttttgttccattgttctatatctctgttttggtaccagtaccatgctgttttggttactgtagccttgtagtatagtttgaagtcaggtagcgtgatgcctccagctttgttctttttgcttaggattgttgtggcaatgcggtttaaccactctgaaaagatgtatttaaggacttttatctagactctatggtgaggtataacatagtgctggttgagtcagcttcaagtttttgtagagggaggaagagagtaacaaccatgtctggatttaataaaaagtttagcataagtaaatgtgtgctcttttgccttaagaaaatatttttcaatatataaaaaggattaatgagtgctgcctttcagatacttggtttggtgtgtttgaaacatcatttccaaagataggacatacacatttccagggatcatctctatgatatgactctagaaatgatgtagatttttaaaatcaatgtcagaacttatagacacaaatgtatgctttccttctaagtagtcactttgggagcccatatacataacagtggtgtcattcctgatgatatgttgggaactctcattttgtaaccagtttagaagtcatgcaagtaaataaatcttcaggattacttcagatttgggcaaaaaattagttttacccaacttgatcattttgcatttttcaccatatttgactctaagtgaaaactggctatttccaaaaatcatacccatcctgaggatgtgaagatatttttgggctgggcacggtagctcactcctgtaatcccagcagtttgggaggctgaggcagtagggttgtttgaggccagaatttgaagaccagcttggtcaacatagtgagactccctctctccaaaggaaaaaaaaaagtgaagttttttttttctttttcaaatgagtaggcagcattgtttagttatctgtttttttttcttttttttccactgttggacttctgtccattctctttatttgtttatttatttatttgagatggagttttgctctgttgtctaggccggagtgcagtggcgcgatcttggctcactgcagtctctccctcccggctcaagtgattctcctgcctcagcctcccaagtagctgggattacaggcatgcaccaccaggcccggctaattttgtgtttctaggggagacggggtttcaccatgttggccaggctggtctggaactcctgacctcaagtgatctgcctgtctagctcccaaagtgccggggttacaggtgtgagctaccgtgcctggcctgctgatcatactctcttgattttatttttgtactgtggtactgcggttgatggactgcactgatgttatccatatttttaaccttggtcacccacagtgtgaactcattaaatagctgactttgcaatttgattgctatgatttgggaatgagtgtggcagtcataattgtgcaggtttgctatcgtttcatttctagagaacttttctatggtgatctattgatgagataagatatagtatgacattatttattcctctttttgacttttggttctcaggaattttgggtgctgtgagttgacatgtagcatcatttcctcaggtctcattttctatctgagcacgattaaggacacagtgacctgatgataaatttttttgtacatctgactcttatctgaaagaatggttattggccaaatatggaaaccatacccacttggtacctttattctagaggcaaagtttgtttcaaaattttgtaaaacaaccctctccaccaaaagaaaacaaatacccacacaagatctctagttacggtgtctgttatatctcatttcttttccttccctaaatatactgagctattcttaactaaatacaggaaaattgtgcagaggaacacttactaagtgttcagtaaatgttttcatttttcttatgtgtatatctagaagtagaattgttgggtcattgagtaactgtttctgcgtaaatatctatacacgtgccatggtggtttgctgcacccatcaacccgtcatctacattacgtatttctcctaatgctatccctcccccaacccctaacaggccccagtgtgtgatgttcccctccctgtgtccatgtgttctcattgttcaactcccacttatgagtgagaacatgcagtatttggttttctgttcttgtgttagtttgctgagaatgatggtttccagctccatccatgtccctgcaaaggacataaacgcatccttttttatggctgcatagtattccatggggtatatgtgccacattttctttatccagtctatcactgatgggcatttgggttagttccaagtctttgctattgtgaatagtgctgcagtaaacatgtgtgcatgtgtctttatagtagaatgatttataatcctttgggtatatacccagtaatgggatggctgggtcaaatggtatttctagttctagatccttgaggaatcgccacactgtctgccacgatggttgaactaatttaccctcccatcaacagtgtaaaattgttcctatttctccacatcctctccagcatgtgttgttccctgactttttaatgttcgccattctaaccggcgtgaggtggtatctcattgtggtttttatttgcatttctctaatgaccagtgatgatgagttttttttcatatgtttgttggccacataaatgtcttcttttgagaaatgtctgttcatatcctttgcccactttttgttagggttgtttgcttttttcttgtaaatttgtttaagttctttgtagattctggatattagccctttgtcagatggatagatcacaaaaaagttctcccattctgtaggttgcctgttcactctgatgagatatatatatatattttttttttgctgtgcagaaggtctttagtttagttagatcccatttgtcaattttggcttttgttgtcattgcttttggtgttttagtcatgaagtctttgcccatgcctatgtcctgaatggtggtttgcctaggttttcttctagggtttttatggttttaggtcttatgtttaagtctttaatccatcttgagttaatttttatataatgtgtaaggaaggagtccagcttcagttttctgcatatggctagccagttttccaaacaccatttattaaatagggagtcctttctccattgcttgtttttgtcaggtttgtcaaagatcagatggttgtagatatgtggtgttatttctgaggcctcggttctgttccattgttctatatctctgttttggtaccagtaccatgctgttttggttactgtagccttgtagtatagtttgaagtcaggtagcatgatgcctccagctttgttctgtttgcttaggattgtcgtggccctgtggggtattttttggttccatatgaaatttaaagtagcttttttttccaattctgtgaagaaagtcagtggtagcttgatggggatagcattgaatgtatacattactttgggcagtatggccattttcatgatattgattcttcctatccatgagcatggaatgtttttccatttatttgagtcctctcttatttccttgagcagtggtttgtagttctccttgaagaggtccttcacatcccttgtaagttgtattcctaggtattttattgtctttgtagcagttgttaataggaattcactcatgatttggctctctatctgttattgttgtataagaatgcttgtgatttttgcacattgattttgtatcctgagacttcgctgaagttgcttgtcagcttaaggagattttgggctgagatggtggggttttctaaatatgcaatcatttcatctgcagacagagaatttgacttcctcttttccggattgaataccctttatttctttctgttgcctaaatgccctggccagaacttacaatactgtgttgaataggagtggtgagagtgggcatccttgtcttgtaccgggtttcaaagggaatgcttccagtttttgcccattcagtatgatgttggctgtggttttgtcataaatagctcttattattttgagatacgtttcatcggtacccagtttattgagagtttttagcgtgaaggagtgttgaattttattgaagtccttttctgcatctattgagataatcatgtggtttttgtcattggttctgtttatgtgatggattatgtttattgatttgcgtatgttgaaccagctgtgtatcacagggatgaagccgacttgatcgtggtggataagctttttgatgtgctgctggattcggcttgccagtattttattgaggatttttgcatcgatgttcatcagggatattggcctgaaattttctttatttgttgtgtctctgccaggttttggtatcaggatgatgctggcctcataaaatgagttagggaggattccctcgttttctattttttggaatagtttcagaaggaatggtaccagctcctctttgtacctctggtagaattcagctttgaatctgtctggtcctggacttattttgatcggtaggctattagttactgcctcaacttcagaactttttattggtttattcagggattcgacttcttccttgtttagtcttcggagggtgtatgtgtccaggcatttatccatttcctctagattttctagtttgtttgcatagaggtgcttatagtattctctgatggtagtttgtatttttgtgggatcagtggtgatatcccctttatcattttttattgcatctatttgattcttctctcttttgttctttattagtccggatagtggtctgttttgttgatcttctcaaaaaaacacctcctgaattcactgatagtttgaagggtttttcctgtctctatctctttgagttcttctctgatcttagttatttcttgtcttctcctagcttttgaagttgtttgctcttccttctctagttgttttaattatgatgttagggtgttgactttagatatttcctgctttctcttgtgggcatttagtgctataaatttccctgtacacactgctttaaatttgtcccagaaattctggtatgttgtctctttgttctcattggtttcaaagaacttctttatttctgccttaatttctttgtttacctagtagtcattcaggggcaggttgttcagtttccatgtagttgtgcggttttgaatgagtttcttaatcctgagttctaatttgattgcattatagtctgagagactgttatgatttccgttctttttcatttgcttaggagtgttttacttctaattatatggtcagttttagaataagcacgatgaggtgctgagaagaatgtatattctgttgctttggggtcaagagttctgtagatgtctgttaggtctgcttggtccagagctgagttcaagtgttgtatatccttgttaattttccgtcttgtcggtctgtctaatattgacagtgggttattaaaatctcccactattattgtgtgagagtctaagtctctttgtaggtctctaagaacttgctttatgttctgggtgctcccgtattgggtacatatatatttaggatagttagctcttctcgttgctttgatccctttaccattatgtaacacccttctttgtctgttttgatctttgttggtttaaagtctgttttatcagagactaggattgcagcccctggttttttttgctttccatttgcttggtaaatgtttctccatccctttattttgaacctatgtatgtctttaatttgtttttaaaattattatatccatcctacttagtataaattggtttcttgttgtggttttgatttgcatttccctgatatgactaatgatcttgagcattttttcatgtgcttattggccattggtatatattcttttgagaagtgtatatctaagtcttttccccatttaaaaaatagggttgtctttttgttgtttaattgtaagaagtctttatgtattctggttaccagaccctcatgagatacaggatttgaaaatcgttttctctcattgtgtttgctgtgttttcactttcttgatggtgccctttgacatgcaaaagttttgacttttattaaaaatggggctgggcatggtggctcacacttgtcatcccagtgctttgggaggctgaggtggaggatttcttgaggccaggagtttcagaccatcctgggcaacataactggaccccatctctacaaaaaattaaagaaaaaatttagctaagagtatagttgtgtgctgcacttcctcaactaagaacataggtgtgtgccacaggtactcaagatgctgaggcgggaggattgctttagcccaagagttttgagacctcagtgagtcaaggtcacgccactgtgctcaagcctgtgtgacagagcaagaggctaactctaaggaaaaaaaatggggtaaacttatactttccttatttaaagttttaactccttaaaaccctgttgaattacagatacatctattatataacttaagagttgatgctataggctgggcacagtggctcacgcctgtaatcccagcactttgggaggccgagatgggtggatcacgaggtcaggagatagagaccatcctggctaacacggtgaaacctcgtctctgctaaaaatacaaaaaaattagccgggcgtggtggcgggcgcctgtagtcccagctacttgggaggctgaggccggagaatggtgtgaacccgggaggcagagcttgcagtgagccaagatcacgccactgcactccagcctgggtgacagagcaagactccgtcttttaaaaaaaaaaaaaaaaaaaaagagttgatgctataaaacttagttaatgaaatatttccctgggcgatggagctcttgcaagtcctgttgtattttttgttcatctttatgccagtcagttagacagttcttctatgtcaagcagaggatggaataataaaccaaaacactgcttagggctttcagagagtaagtgttcagtaaatatattcgataaattactgaattatttttttaaatgatggaaaggaaaatcttgccctctctttttctgggtgttggctagtataaatctttcttgaagtgataatctacatctatgttttgatttctaaggatttcccaaatataagctatatataagtgagaggaaataataacttaggtgcctaatgataatatgacaagataagtacaagggtcagctatttgttgtgaaatagcaatggatataatttaaatatgaatacctttttgctgtttaatcccccaaattttcttttgatttcttttaaaattcttttgtggtaggtaggtttattgtttcttaagaattaacttaagggtagtattttctgatacatttttaagtaacatgaagtttaacttctgtttaaacacatcatatagagtacattgaaagacctcagtattttcgaaatgtttagtaagtaatatcagcagtttccttaaatgatattttaatcctaggtaagtgtacaggtaggttgtgttactcatatttttatattcttagtgaaatagaattcttttttttttttttttttgagacagggtctgactgttgccttggctagagtgcagtggcatgatcttggctcactgcaacctctgcctcacaaggctcaagccatcctcccacctcagcctcctgagtagctgagaccacaggcatgagccacccatgctctattatgagccaccacacctggcctaaaattcgttttctttaatattttttctttctacacccacaactgtaacatttcccttagtttttactttgaatgtgcatactcttacacgacttacagtatggctatattttcagtttgctagagctttacaattaatttaaaacatgaaaggctaattaagggaattctttaaattttgttttaatagtgaaagcaagttgaatacattggtgcagaagcttcatgacttccttgcacactcatcagaagaatctgaagaaacaagttctcctccacgacttgcaatgaatcaaaacacaggtaaattgaaaaagaatgtgctataccttctagtcttttttctattttttttttacacttatggaggtaaccatttattttattcagagagcagcttttaaaagagatttcagtttgtggaaaatgacagattagcaagctttatagaagcccctattatgtatcttagctatatctgatacaggagattttaattttggtaagtatgactatagaaagcttagaaaaggaagcatttatggttttatatgtaatggaaatgtgttatagaatggctagtgaatgttgactgtgaaaaaatagtattagaagaggcaggagtagtataggaatgttttgtcctagcaatcattcatgtattaggagttaaatttttatttttatttttgtgatggagtctcgctctgtcacccagtctggagttcaatggcatgatcttggctcactgcaacttccgcctcttgggctcaagctattctgctgcctcagcctcctgagtagctgggatcacaggcgtctgccaccatgtttggctaattttggtatttttagtagagactgggtttcaccctgttggccaagctggtctggaactcaagtgatctgccctcgttggcctcccgaagtgctaggataacaggcatgagccatcacacccaacataagagttaaatttttatgttgtttgataatatccctgagtagatttggtgtatttattttttaaaataaaaccacttaacacctcctctctacctccctgtctctctcttttaaaaagatatatatatatatatatatatatatttttttttttttttttttttttaaagagacgaggtcttgctttgtcacccagactggagtgtagtggtgtaatcatagctcactgcagcctcagacttcttgggcttaagcaatcttctcacctcaccctcccggtagctgggattacaggtgtgtgccaccatgcctggttaatttcaaaaaaaaaaaaaaaaaaaaaaaaaaaaaaaaaaatttttagagacatggtcttgctatgttgtccagactggtcttggacttcctggcctcaaatgattctcctgcctcagcctcctgagtagctgaaattataagcatgagccattgtacctggttcccttttttaaaaaacattttgtatcatgtgacagttagcattttcaggttttcaagggtaactacaatacacatgcacacagacacacacaatatgtacaaaaaaagtataagagagttatagtgaaaagttcaaccatatgtgtaattagagttctagaaggaataaagagacttggttaaaagtcctatttggagagatacgggctgagcattttttaaaaagtgatgaaaaacatcagactagagattcaagaagttttgtgaaccctgaacaggataaatataaagaaaactacagctaggcatgtcataaccaaactcctaaagaacataaaccgagagaaaaatatcttaagtagccagaggaaaaaaatacattattttcaaaggaataacagtaacactggcagctcacttaacaacagaaatgatagaaggcagatgacaatgaaattatttctttaaaatgtcaaagaaaagtgcagtcatgcatcacttaactatgggataggtttttttgagaaagcattgttgggtgattttgtcattgtgcaaacattatggagtgtccttacataggctactacacacctaggctatatgttatagcctgttgctcataggctacaaacctgtgcagcgtgttcttgtactgaatacggtaggtaatcggaacacaatggtaaatatttgtgtgtctaaacacatggaaacatagaaaaggtacagtaaaaatacagtattataatcttatgggaccaccgatgtatatgtggtcagtcattgagtgaaatgtctttatgcagcatgtgattgtaattgccagcatagaactgtatattcagtgaaaacatccttcataaatgaagggtggaataaggccatatctgggcaaacaaaaagtgagaacttgatgtcaacagacctacactggagtgaataactacactagaggaaattacaagttttctgaaatgagaaagaaaataatttgaaatggcaacaccaaaatacaggaagtaatgaataagaatgggaaagctaaataggtaggtaaactaaataacataaagttatttaagccacagtccctattcttatttcatcaattaccccagtagtgttcacagataagtttttcccccttaaattcaggatccagttcaagatttagtagtcctgtttctttggttttttaaaaatctgaagcagtttgtctgccttttgggactatgactttttttgaaatgtacaggtgtgttactttgtgaaatggccctcaggattatctgtttagttatggttagattcaggttatacatttttggcaggaatactacataaagtggtgttctgttctccatgcatcctgttacatggcacatgatgtgatttgcccctttactggtgatgttaacttaggttgtttggttatggttgtgtttgctaggtaaacccagtctaaagttatgatttattccattgtaactaataactaatttaatggggggcactttgagattactaaggtattctttttattatcaaaacttaatatgttttcttttgcaaatgaccacaaagtttgcagcttaaaacaacccaaatttgttattttacagttctgtaggttcggagtccggtgggccttgctggacccttctcgggctatcacaaggtcaaagtcaagatgttagtaggactaggttcctttctggagactgtagaaaaatccattcctaagctcattcaggttgttggcagaattcagttctttatgataatcggttagaggtccttctttctcactcactattggccaagaccccctcctagttcttttcaggtgtcttcatttcttctcacgtgatgccctccatcttcaaatccagcaacagcacatcaagtctctctcaagctttgaagctctctgacctagctttttgcttgctaattctgctgccacctgctaccagctggagacatttttctgtttttaaggattcatgtgattagattaggtccctctccctctcatctcctcctgattatctcttgagtttaagatcaactgtgccatattacataacacagttatgggagtgatatgtcatcacattgataatttctggggatttgcggtgtagaatcttgtgggccattcctagaaggtctgtttatcacagcatacatttgtgattcttagctgaataatttattcctatgatgggttcaaaatggtgatgttctaacttgtctttccttctatgtttattagttgatattttattgtaagggaggggttcatgttctaacctattcaattatttgtatcagtatatacttacaattttttccatgaatattctctgtcattatttattttgatcctgaaattgtatcagttttggctagtaggagcctcacctggatggctcctgctgacctttttacaaatccgcatcatttcttgaacactttctttctgtcccttcaaagtattcaaggcttgctttccattctctgttccccagccctacaatcagttattttttgcaagagttctgattccttttagtgggatatagtgtttagaaatcaagatcagggtgtgtgatgtgctcattgccaccaagatgtctttgtttccaagctctttcacagagaaagccaataatatgttttatattttcatgagttgatactgatacttttaattcaattccagtcttctttctagacttccccttttcatgtttttaacttctttctccaacagaaagaaacctggttcctattatccccaatttatttatttttatttatttattctttttgagatggagtctcactctgttgccaggctggagttcagtggcgtgatctcagatcactgcaacctttgcctcccaggttcaagcgattctcctgcctcagcctaccaagtagctgagactacagtcatgcgccaccatacccagctaatttttgtatttttagtagagacagggtttcaccatgttggccaggatggtcttgatctcttgacttcatgatccgcctgcctcgacctcccaaagtgctgggattacaagtgtgagccactgtgcccagcctatccccagtttatttatttatttttatttttatttttttgagatggagtctcgctgtgtcacacaggctggagtgcagtggcgccatctcagctcactgcaacctccgcctcctgggttcaagcgattctcctgtctcagcctcttaagtagctggaactacaggtgcacaccaccgtgcccagctaatttttgtatttttagtggagacggcgttttgccatctctggatggcaggctggtctggaactcctgaccttaggtgatccacctgcctcagcctcccaaagtgctctgattacaggcgtgagccaccaagcccggcctttccccagtttatttgtattcatttttctagtcctcattgtacccacagtttcagagttgttaaccatatcatcgcattaaagaaacgtaactatagttcagtatttctttaaagttctttttgtctttagaatgatgttacgttgtcggagtcctgtgttcactagttgaggaactccttcagtagtggtatctccagttggacaaacagatgtcactcacaaataccaattgtaaattctgggcagcatactgaaggctagatatcaacaaagtagataaactggaggggagtcaacacatggaagaagaagtggcaatggctgaattccccattgttaatcctttttgcttcagccaaggatcctcttagctccatctgtggcctttaagacttggataaaaatctacagtcttattggatgtgaaatcaaggaaaaaatttagggagaccacagcagctgtaacatgagtagagagatcccatctagaaaagagccacagaatgggaaaaccagattgcacgaaaactctcccaatagctctggtcctgttgcctaagtgcactccagattccaaccagcctggttaggactaaaagaacagaacaaaagctttgagttgtttggtactacagggtggaaagggtttggagtttcatttcaagtaagttaactatctgtttgtttggttggttggttttttttgagacaggttctttttctgttgcctaggctggtgtgcagtgatgccatctcagctcacagcaacttccacctcccgggttcaagtgattcttgtgcctcagctttctgaatagctgggattacaggcacctgccaccacgcccagctaatttttgtatttttagtagaggcagtgtttcaccatgttggccaggctggtcttgaactcatgacttcaggttatctgcctgcctcggcttcccaaagtgctgggattacaggcgtgagccaccacacccagcccagttgactttttatgttggccttgtatcctgtgaacttgcttaacgtacttattagttctaaatagtatttttccccctcttgtagattctttgggattttctacttagacagttatatcacctgcaaatagggatagttttattttttcctttccatctgtataccttttaatttcttttcttgcttcattatattagctaggattttctgtattttccagtattacattgaagaatgatgatgatagcagacatcctcttagtgttaccaattttagtgggaaaacattcagtctttcacagtgaaggatgtttgctttataggtttcttgtaaatgccctttatcaagttgaggaagttcccctctattcctagtttgctgagaatttttttaagcttaaatttctatttgatttctatttgtaattataaattcacatgcagttgtaataactaatatagagagagctcttatgcactttggcagtttccctcaatggtaacatataaaactagaatacaatatcacaaccaggaaattgacattgataaaatctattaatcaagattttgtcagttttactttgtgtgtgtgtgtgtgtgtgtgtgtgtgtgttaaagttctatacattttttttttacctgggttgattcatgcatctaccaccacagttgagatacagaatagttcatcaacacaggattcctcatcttggcattttataatcacacccacttccctccgcctacctctgcctatgcttaacacctggcaaccactaatctgtcttccattttgaaaattttgtcatttcaaatatgttaaataaatggagtttatagtaaataatcttttggggttggagtgttttcacttggcataattctgtggagattcattgaggttgttgtatgtatcaacaatcctttccttttaattgcagggtaatattccatggtatggatgtacagattgagtatccttaaccccagaatcagaaatctgaaatgttccaagatcggaaacttttgagtgctgacatgacactcaaaggaaatgctcattggaacatttgggattttcagattagggatgctgaatccctaatgtgaataaaccagaatagtgcaaatatgctagaatctgaaaaaatccaaaatttgaaacacttctggtcccatgcattttggataaggaatacgcaacctgtaccacagttgtatttgtattgttttttttttttttttattgaaatggagtcttgttttgtcacccaggctagagggcagtggcatgatcttgactcactgcaacctccgcctcccaggttcaagtgattctcctgcttcagcctccggagtagctgggattacaggcaagcgccaccacacccggctaatttttgtatttatagtagagacgaggtttcaccatgttggccaggctggtctcgaactcctgacctcaggtgatccacccacctcggcctcccaaagtgctgggattacaggtgtgagccaccgcgcctggcctgtaccacagtttgtttaaccatttatttgttaaagcaaatctgggccgattcctgatttcagttgttacaattaaagctggtggtgaatatttatatatacgtttttatatgaatttatgttttcatttctttgcaataaatgccaggagtgcattttgcagttcatatgatggttacacatttatttttattaaattaattaaactacatttacattttattttattttgggtagagacagagcctcactgtgttggccaggcttgttatgaactcctgacctcaggtaatcctcctgccttgtcctctggaggcccttggattacagacatgaatcactgcacctggtttgcattttttttttttttttactccattggactctatcagtgcttttatttatttattggtatttatttatttatttattttaacttttaggttcagtggtacctgtgaaggtttgtcacataggtaaggtagcatcactggggtttattgtttagattatttcatcacttaggtattaagcccagtacctaatagttatcttgtctactcttacatgttcatttttttaaaagaaactcctgaactgttatccagagtggttgtactgttttatattcccacagcaatgtatgagtgatccagtttctccacatccttgccaacactgggtgttaatactatttttaaattttagccatttgatatttatggtatctcattgtggttttaatttgcatttacttaatgagtaataaattctttttaaatagaaacaggatattgctctgttgcccaggctggagtgcagtggtgcaattatagctcactgcagcctcaaactcctaggctcaagtgatcctcctgcctcagcctctcgagtagctgagactgcctcagcctgtcgagtagccaagactacaggcacatgccaccatacccagctaattttttaatgttctgtagagacggggtctggctctgttgcccatgctggtctcagactcctggcctcaagcgatcttcccaccatggcctcccaaagtatttagattacaggcatcagccactgcatctggctggtaataaaacattaaacatctttattgaaatataatttacatgccatacaattaacccatttaaagtataaaattcagtggtttttagtatattgaatatttacacatatgtacaaccatcaccaccatcaattttaaaatatttttatcacctcaaaaagaaactccataccctttagctatcaccccctagctctaagaaatcactaatctagtttcttgttttgagttttttatttttatttttatttttattttttttttgagacagagtctcgttctgttgcccaggctggagtgcagtggctattttggcttactgcaacctctgcctcccaggttcaaatgatttttgtgccttggcctcccaagtagctgggattataggcgtgcgccaccacacctggctaatttttgtattttttagtagagacagggttttgccatgttggccgggctggtctcaaactcctggcctcaagtcatctgcccacctcaggttcccaaagtcctgggattgcaggcgtgagccactgcgcctggcctatttccctattttggactttcatatgaatggcatcatataatacgtgtttttgtggctgatttctttcatttagcgtaatgtattcaagatatctgttgtaacatgtcttagtactccattcctttttatggccacataatattccattatatgtgtataccatatttgtttatccatttatccattgatggacatttgtcttgttcccatgttttggctgttaggaataatgcggctgtaaatattggtgtacagttttttgtgtgtagccatatatttttgtttatcttgtgtatatacctaggaatctaattgctggatttatatggtaactatgttaaattgtttgaggaaatgtcaaactgttttccaaagtagagatactattttacttttccaccaggagtatataaagattgtgagttcttcacgtccatgccaaccattgttaataacagactttttgattctagccattctagtgcatgtgaagtagtatctcattgtgattttagttttcaactgcctgaagggtaatgatgttgaacatcatttcatgtgcttatttgtagtttgtatatattccttggagaaacttctattcaaaccctctgtccagtctttttctttttgacagggtcctgctctgtttcccaggctggagtgcagtggcatgatctcagctcacagcaccctcaacctccctggctcaaatgatcttcccacctcagcctcccgagtagctaagactatgggtgtgtgccacagtgcccagctaatttttgtttattttttatagagatggggtcttaatttgttgaccaagctggtcttgaactcttgtgcttaagcaattcacccgcctcggcctcccaaagtgctgggattacaggcgtgagccaccgtgcccagcccctttgcccatttttaaaatgggtatttatgctttcattgttgatttgtaagaattctttatatattctaaattttttattgtaaaatatgcataacataaaaattgccattttaactaattttaaatgtacagtcctgtaacgttaagtaaaattgttgtgcattcaccaccaccatccatgtctagtactttttcatcttccccaagtgaaactctgtacccatcacatactaactccccaatcttccctctccttagccttgcaaacaccattctacattctcttcctaggaatttgactactctaggaacttcatatacgtataatcctacaatatttgtccttctgacatattttacttagcacaatgtgttgaaggttatccatgttgtagtatatctcaaaatttcatttcttttgaagtctgaataccattccattgtatgtatataccacattttgtttatctattcatatttcaatggacacttggataagatatataatttggaaatattttcccctattctttgagttgtctttatttatttttagagacagggttttgctctgttgctcaggctggggtgcagtggcaagatcatagttcactgcagccttgaactcctgggtacaagcaatccttccatctcagcctcccaagtagatgagactatagttgtgtgccaccatgtctggctagtatttttttttttttattttttagagatgaggtcttaccatgtagcccaggctgagcttgaactcctggcctcaggcgatccaccttggcctcacaagtagctgggattacaggcgtgagacactgcacccagttgggttgtctttaattgaagcacaagttactaattttgatgaacttttatttatctgtttttccttttgttgctcattcttttggtgtctttaagaatccattaccaaattgaaggtaatgaagatttacccccatgttttcttctaaaagttttatagatttagttcttaaatttaggtctttgatctactttgagttaatgttttgtatatgttgcgaagtaggggtccagcttcattttttgtaggtttctaaccagttgtctcagcaccatttattgaaagacaattctttcttcattgaatggtcttgccacccttgtcagaaatcagtgggactgttgggcatggtggctcatgtctgtaatcccagcactttgggaggccgaggtgggaggggtactcgggcccaggagttccagaccagcctggacaacacagtgagactccatctctattaaaaaaaaaaaaagccaggcgtagtggtgtgtgcctgtagtcccagctacttaggaggctgaggcagaaggatcacttgagcccaggagactgaggctgcagtgagccatgattgtaccactgcaccctagcctgggtgacagagtgagatcctgtctccaaaaaaaaaattaaaaaaaaaatcagctggtcatagatatatgggtttatttctggactcttaattctgtttgtccttttaccagtactccacggtcttgattgcattgttttacagttttgtgcaaagttgcaccaaagttgttgtgtagttttgcaaaactggcaatcaagtctgtgcagtactggcaaaattaggaagtgtgagtcttcatacttttcatttttcaaaattatctgcctattctgaatgttttcaattccctatgaattttaactctttgttttttcttggtagagatgaggtttcactatgtttctgaggctgttcttaaacttctgtcctcaagtgatccttccaccttggcctcccaaagtgctgggattataggtctgagccaccatgcctggtccatatgaattttggaatgagcttgtcaatttttacaaagaagtcagctgggattctgacagagattgcagcgtgtctgtagattagtttgtggagtattggtgatggcagcggtgggccgtctggagtggctgctgccatcacactggctgcagcagggagacgtggccagggctgcacggtctatagagttggtgggagccaggggcaagcaggagccctgccccttccaagttggagctccctgggtcctgctgcagctgcctaagcatggctgtagacctgggcatccctgtgctcttgagtcttgggagcaggctggagccccaccctcccaggtgcaactgcagctggccaaaccgtggctgcagtcccaggcctctcattccatggagcaggcaggagacccaccctcccgggtgcagctgcagtctcccaaactgcggctacagaaccttgccttctgctccacgagcaggcaggagccctgggtgcagcaggagccccgggtgcagccgcagccacccaaaccatggctgcagatctggtcctcctgctttatggagcaggctggagtcccaccctcctgggcacagctatagctgcccaaattgtgggtatagacctgggcctcctgctttatggggcaggcaggagccctgccccactgggtgcagctgcagccacccaaatcatgggggggctgcagacccaggtgtctctgcactcttggggcctgggaaggccccccttgctctcataggcttgggagtgcctgctcctgctgcctggcttcaccctgctattggcacctgctctgatcttgtggcaaagttggggccgagcctgggtgctgtcgtagcctggccaggtatccacatgcttggggaactgctgacatgccagccttctgctgccttgaccccctctggactttgggtactgacaaacatagggaagctgaggcagggctgagggcagttcagcactggcctgcaggtgcccccttgcatctacagcctgggcaccatgaatggcagcaggaggtagacaggttcctcagtggaaggtggcaggtccctggtgaggacccaccttcaggccagggaaagcctgaaggctggaggttgggctgccagttgcatggatcagagtgggaacttgtggtgccttttctgggcctgcctgtggaccaattggcatgcacatcctcccctctgaggcccataaaaaccccaggctcagccagagctgaacagatgtcaggatgaccagctgcagagaggagcaacccactctagggcctcctctctgctgtgagctgcagaggtgacaagatgaccttcctgcaaagaggtgccacacattctagggcctcctctttgctgagagctgcagagacgatgggtcgactttcctgcagagaggtactactcatactagggcctcctctctactgagagctgcagagacgaaggagagatgatggggagatgatgggatgacctgcctgcaaagagaagccacccactctcaggcctcctctctcctgagagctgtgcagatgacgggataatcagctgctgagaggagctaccctctctgctgatagctgaacacttgtagtaacgacttgcctagcagagaagaaccaccctctctgctaggagctgaacacttgtagtaatgacttgcctagcagagaagaaccaccctctctgctaggagctgaacacttgttgggataccttgactgtggaaaggagctgccccctttgggtttcctctgagctgttctattgctcaataaagcccctctttatcttgcttactctccacttttctatgcacctcattcttcttgggtgcaggacaagaacttgggacctgccagatgaggctaaaatagctgtaacacaaacagggctgagacatgccccttgctcaccttgttgcaggtgaagagaaggaaagaagagctgcagccctctggggagcccagacctgggagctccccaagccagggctgtgactccctctttggggccctgcctgcggttcctggtgtctccaaacttctgggtgccaccgtgttccctggtgccagctgtggatgctgcttgtggtgttcatggtccagctgcagcctcacagagaaagagctgatgcccatgctggcacctggagctgcgtgccctgctgcagctgccaggatgtctgattgcgcagtgaccggaccccacacttgctcacataccccttgctgcttcatccagtcttccttggctatcataggacacaggccagtagcatgagccgagtgtagccggccaggccaaataggcgggacaagcccagcaggcctgagcaaaactctggcacaggtgccaccagccgcagatgtttctggccagaaaagtgacaccccaaagattctgtaacactggcatcataagaatgataaatcttatggcttggcctggtggctgaaggaattgtgtactttaaatgggtaaattatatggtgtgtaaattgtatctcaaggatgtttaatgttttatcactggcgaggtgcggtgacttatgcctgtaattccagcactttgggaggctgaggtgggaggattacttgaggacaggaatttgagaccagcctgggaaacatagccagaacccatctctacaaaacatttaaaaatcagccaggcatggtggcatgtgcctgtagtgccagctaatcaggatactgaggcaggaggatcacttgagcccaggaatttgaggcggcagtgagctataattgcaccactgcactccagcctgggcaatagggtgagactctgtccctagtaaaaaaaaaatgttatcttctaattcatgaacatgaagtgtttttccattgatttaggtctttaatttctttcaatagcgttttataattttcagagtatgttttgtacttctttttttttcaaattatttccttctaattctgttataaatggaattcttttcttaatttcattttgagattattcattgcaagtgtatagacataacattgatttttgtttattgtccttgtacccatcaatcttcctgaactaattttattcccatagttcttttattattattattattattttttgagatagtcttgctctgttccccaggctggggtgcagtggtgcgatcttggctcactgcaacctctgcctcccaggttcaagcaattctcttgcctcggcttaccgagtagctgggattacaggcacctgccaccacgcccagctaatttttgtatttttagtagagacagggttttgccatgttggccaggctggtcttgaactcctgacctctggtgatccgcctgcctcggcctcccaaagttttgggattacaggcgtgagccactgcgcccagcctattccaataattctttagtggattccttaggatcttctatgtatgagataatgtcacattctaataaggatagttttattttttatttttttttgagacagagtctcgctttgttgaccagggtggagtgcagtggcatgacctcagctcactgcaacctctaccccctgggttcaagtgactttcctacctcagcatccctaggagctgggattacagggatgcgccaccacacccggcaaatttctgtacttttagtagagatggggttttgccatgttggctaggctggtcttgaactccggacctcgggtgatccacccgcctcagcctcccaaagtgctgggattacaggcatcagccaccgcgcctggccctctaataggaatagtttcataccttcattttaaatactgatgactttcaatttttttttttaacatgcatgctctgagtagaatccgtagtgcaaagttgaatagaaatggtgagagcagatttccttgccttgttcctgatcttaagggtttcggaaagcattcagtctgtcgccattaagtatgatattacctacctgtgggtttttgtagattttaaaatttcctttcttccttaatttattagaaaaaagatttttttttttttttgagacggagttttgctcttgttgcccaggctggagtgcaatggcacaatctcggctcactgcagcctccacctcctggattcaagtgattttcctgtctcagcctcccgagtagctaggattgcaggtgcatgccaccacgcccagctaatttttgtatttttagtagcaacagggtttcatcatattggtcaagctggtctcgaactcctgacctcaggtgatctgcccacctcagcctcccaaagtgctaggattacaggtgtgagccaccacacctggccagaaaaaaaagatatttttaaagagctgttttaggttcatagcaaaattgagcaaaaagtacagtgagttcccatatgtccctgcttccacacatgcacagcatctcccactatcagcattccgtaagagagttgtacatttgttatataacgttgatgaacctacattgacatgtcattattaccccaaatgcatagtttatgttaaggttcactcttggtgttatacattttaaagatttttgacaaatatataatgacctgcattcaccattgtggtatcatacagaatagtttcactgccctaaaaagattcctgtgctgtgcctgtttcttcatccctttctcccctgtgagcactggcagccactgatctttttactttctccatagttttgcctttttcagattgtcatagttgtaatcatatgtatgtaacctttccagactggcttctttcacatagtaatctgcatttgtttcctccatgtctctttgtagcttgatagctaatttatttctagtgctgaataatattccattgtctggatgtactacagtttgtttatccattcatcttctaaaggacatcttggttgcttctaagttttggcagttatgaataaagctgcttataaagatatttatataagtaaatgaagatgtttacataaaataaagacatttataaatatctccatgcaggttattttgtggatgtatgttttcagcttctttggataaataccaaggagtgtgattgctgctttatatatggtatgcttagttttgtaagaaattgctgaactgttttcctgagtggctgtatcattttgcattcccaccagcaataaatgatagtttcttttgctccatatgcttctcagcagttttgatgtagtcagtgttctggattttggctattctaataggcatgcaggggtatattgttttaatttgcaattccctaatgacatgttgagcattttttcatgtgcttatttgcgtctgtatatcttttttggtgaggtgtctgttcacatatttctttttttttccttgctttaaaatcatgttgtttgttttattgttgagttttaagcattctttgtatagtttggataattgtcttttatcagatgtgtactttgtgaagattttctcccagtctctagcctgtcttctgatttgaagttttctaatatttttgtggacttttgcatctatattcataagtgatacttgcctgtagttttctctatttgtgatatattttttatatcagggcaatactgttttcataaaatgagttgggaaatgttgcctccttttctgttttttagaagagtttgtgaaggattggtattagtccttttttaaatgtttgttataattaagtggtgagaacatttgggccttttctttatgggtagctttttttattgctaatttaatctcatcaattgttacaggtctgttcacacctgtttcttcttgagtcagttttagtagtttgtgttttggaatttgttcatttcatgtaagttatttagttttttggcacacagttgttcatagtattcctttataatccgtttatttcagtaagattagtagtaatgtcctctttttcatttctgattctagtaacttgagtcttgtttcttttttttcttggtcagtctaccctaaagtttgttcatcttttcttcccccacaggtaagttgttacacaatccctagcagattccaactttcatggccaaggtcctctttgatcatctttttaaaaaattagtttttggccaggtgcctgtggctcacgcctgcaatctcagcactttgggaggccaaggtgggcagaccacttgaacccaggagttagagaccaggctgggcaacatgacaaaaccccatctccacaaaaaattagccaggtgtggtggtgcgcgcctgtagtcccagctacctgggaggcttagaggggaggatcacctgaacccgggaggttgaggctaaagtgaaccatgatagcacctctgcactccagtatggacaatggagtgagaccctatctctaaaaaaaaaggaggaaaaggaaaagaactactctttggttttattgattttttttttctattgcttttctatttcctatttcattagtttcatgaatttctgccataatctttattatttccttctccttgattttggtttagtttgctcttattttcccagtattttatggtaaaatgaaatatactttattggtagtatgttttttatttttagtgtaatagtttaaattttcttctgctgggaaatgtcttgcaatatttataaactacaacaggaaatgtttttataccaaagtaatctttacagagatttcatgctttataaggaggggttagtatgcaaaaggagagtgattctagtgaaagaacacttctaggaatattttaatgtgagtagtatgttaacaatactgccagacttcatagtgtgagaatgggtttgtggagttataggtattgatgttctgtttgataatgcatcgaagagataaataatgttctttatttcttcttttttagataaaatcagtggttctggaagtaactctgatatgatggaaaacagcaaggaagaggtaaggataattatttagagatatttgttagttacgattaaccaagtagagcatatgtctttagattgcttctggacacatgtatgtgtcgaaggctactgatacccagttgtcattatacttcagtttcgttgttttccagtttgagaacaggtgttcattgtttctgttattgttgtggttcacttcagtggtttacctaaagtcagacaactgaagacttccaacagatagatattaaactgtctttatattgccccaaaggtgtttgaggtggatgttaagggcatgaactccatggttgtgaaatctctcaaaacttggtatctagagtctgctaagcattattatagcaactcataacaaggtcctttgcctgatacacaggtccacaactgtggttttgggaattttttgacctactgtaaaaaaaaactgaatccagtaaaatatattgattatactggcaaaatgagggtaagtttagtatctcaaagcaagttgtagaagttacttcatgccatatgttagcttagagaagaatgaaacatatttagatccttgaaactccctacttctcttgagatctgattacttctgcatctttgttttgtctttgttgactggggccatgatcattttgcagcagtgtattccccgcagcatgccacagcaaccatgtaaaaaacgagaaatttaatcttcagccaaggaaacctggcagtaaatgagaattagttttaatttttatttttttgcatctgtgttccttatgtggtagagaattagtttttgaagttccttttagaaaaatattctaggcacataaatagcatctcattatatcactgtattgaagttgctatagggaaatagctaattgtagggatgccgtttcgagaattttattcacttttatatttatgtctcacatctagggaactagctcttcagaaaaatccaagtcttcaggatcgtcacgatcaaagaggttggttgatgttgaagggacaaaaagttattttctttttcaggttattttctgtttctaaaaccatgtttttttctgaactcatgtcaaccactattctgagttaactattctatacaaatatacatatttgaaaatgattagcataatataatgaatccctttgtatctatcacctgatttcaacaattattattcattctaactttgaattctaaagggtttttaaggatttattatatattagtggcccttgcaatatgtagtttatttcattagacaatatatgtccttgaaaaaggacaaaataattgttgaatgcctatgaggcagtgggttttttgggttatatgaaattgtctaggatgggaagttagtcatcatagttgtaagttataaggagaaaaaagagtggtaaaaaacacttttttctgctaaattgtcaactcaagtcatacataaaaactgaaacttttctaacataatgtagtacccaatatactatgcagtataattgttattagaagtttgccgcttagtctattggactttcattgtttctaaccagtgggaatgtctcttaaaaaccaagcttgtttgatattaatttattctctgaagtagtgattcttaaagaagagtgtcctccagggtctccctggtagctttttcagaatgcgtatgccttggtcctgctccagacctactgaatcataatcttcagtgatatggtatagacatacatgcttccctaggtgattctgatgtgcttccttgttgagacccactgctcaatctcaacatgttatttatgttctttgggtattgttccagttgtcagaaacattcataattctatgaacttaattctttcataggaaaccttcaattgtaacaaagtatgtagaatcagatgatgaaaaacctttggatgatgaaactgtaaatgaagatgcgtctaatgaaaattcagaaaatgatattactatgcagagcttgccaaaaggtaatgtgtgttaatttttcatgaagttaaagttgaaatgaatttttaaacatcatttttataaaattggaacttgattactgttaactatgtacaaacgaccaaacatggcattttcctagtggttgtctagaaatatatttgtatgccaatgataatatgtgttattgaagttaaaaatttggaatattcagttggttttgtaaagaatgaaatctatttttttctttcctttgagttttagacaaggggctttagtttccaaattatacttcagtgtgtaagcaggtttaaaaatttaatatattaggttttggttcagtcaatgttaatgtgcttgctttatacaaaaatgtaatgactgttcctgaaaacttaaaaatcatgtacagtctagtttagtcttattgcattcttaaattccctaaggctaaaagctgaagttaactatcatagatagatttagttgtatttcttgctgttatcttttttaaaaaactttgtcacatacctctcaactgttgaagttctaaccataaaaccttgttaataagaatagggaacaatagccaaatgaatatcttggactcttcatagctcaagtctgagagcaatataattggatgatgagaatgacagggaacttggttcaaagagtcaaattttagattttttttctttgttaaataatatgttgtagtctcttggcacatttttcaaattcattctcatagatcttttacagcagtgcttattaaaccttgttccctgtctatgtttttatgacatattttcaaattatggaagtttaaaaaatacagtaggtaggagggatgggactttccttgactaggataaattagaagttacaaaaggtgataaatgaaatgaggaaaggaaattaatgaaagaagagagataggggcctaccgcttacttagttttgcaaatcatttatgacaattttatgtaatggttttggtggccaagggcagaaacaactaacatgggagtctaagtcccataggtggtgacttactttggatttttacattctcagtggttgtcactgggagtgtttatgatgtaagaaataggaattcaaacttttgttttaattgtactgtggaagaaagtcagcatatgatgttactaacctgaactatgcctaattctgtcagaccaaaacaaaaacagacccgtttcataaggttaaatttgggtgtttatattattgttgtaatatttattgagtatgtataagtaccaggctcttacagaattaactcctttaatcctcaaaacaacactgtaaggtagttattattttgcttgtagagataaaggaacaaattcagaacccaaggaactttttcagctttaaattgagaagctaagatttcaacccaggtctgcttgaatccaaagcctagtgagtgctcttttcactctgctgctttgcttccaattctccctagaagaaatctagggagaattcagtttttttttttttttgtcgttgttgttaatttaaaatctttagttcttttcaaatgctggggcttctctgagtgtctacatgcaatgattgctgtgaataacttttttttggtggggattatttaattttactacaatctgtaaaatctcaatcatctgtgtcctccccccccccaccctttcagagactcagaaactcatttaacaactagatgctataacttgtcaaaatttgcttgttgaataacatagagccatatttcagagaaagcccctggtgactacctgcttttttttccttaattgttgccaatgatagccagttactaagcccagcaatgtaggtaaacattgaaacctaaaccctttttactatgcctgtcttatttgctcttgagagaactaatgaaaacttaaattgacagcctctctcttcaattcacatgttttatagttaaggaaggacattctttctaaaatattaacatagggatcaacaaatgatctcattctacaatttattgttagggtacttcagctaaagtatcttaatctgttaaaactctttaaggactttacagagtagtgaaactttgacataccagttgggaaatgctgcagtatagatacaggagtaatagaatgaacttcatttcccccaccaatacccctcccttgcaatataaaactacccttaaaaatctttctgagtttatgatttggattatgaaaataggatgtctttaaaaattttttccctctgaaccacacatattttatgaattctttatggaacttagcatagatgttcatattcataacagcttttgtgataggcactataaaaattcagaactgggttgaggctttctgtttgattcacacatttgttttgtaatcactccataatacctccctttcctgtttttatgaactatatttcaacaaataaactgttgacacctggcccttttactatttccctgttttatttacttttgtgaggtccttacaccaatatctaaagcttgaaagaaacaaactatgtaccagcaatgttggctttatctgaactgaagtcttgtacttcacttgcacatttaatatgtgtaatggttttttaaatgaaatcattctaggtacagtgattgtacagccagagccagtgctgaatgaagacaaagatgattttaaagggcctgaatttagaagcagaagtaaaatgaaaactgaaaatctcaaaaaacgcggaggtaaatacaagtgaaaatgaaacatgaatttaaattgctgtttatgaccatattggaaaatcggatgtgcttactaaaaatacctccacttttctgccttttgtttattaaaagcactacttaaatataacttctgtttctctctgagctctgaagcagaaaaggttaagcaccatttatcgaaacacctttgccttcagtggctattaagttatctcaagaagcgtagcatttccttcttccacatgttctataatacatatatgccataatactatgttttccccccaaccctaaaataattttagattcatgcaaaatcttgtctgtggcctacaggtaactttatatatatttagagttggatagagtgacgtacatctgcattagtattagttggggtattataaatgcaagtcccttgactccactcctcacaaattagaatttctgttgatgaggtcaagaatgtactccagtttgttcttgtgtacactgaagtttcaaatccactaatctaagaatggcaacatggacataagtaggaaggagtagggagctagagctgataaccctccctctgtcttccagaggcacctctccctttgtctgtctatcttcccttaaacacacaaacggtggggagtggtggctcacacctgtaataccagcactttaggaagccaaggcaggagaattacttgagtcctggagttcgagaccagcttgggcaatatggtgagaccccatatctacaaaaaataaaaatatcagctggacatagcggcgcatgcctgtagtcctagctattctggaggctgaggtgggaggatcacttgagcccaggtgatcgaggctgcagtgagccgtgattgcaccactgcactgcagcctggatgacagagtgagaccctgtctcaaaaaaattaaaacacacacacacacacacacacacacacacacacacacacacacactctaatattggctaaccatctataaaaagtttgcatcagaaggattcatttagaaataatagtggactatgtgtcccacttgtttgtgtgtgattcttaaatggtgcctatatatattttggggcagcttaataaagccagaattcataactataaaaggaatgaatctccaaatgatagaacatgacactaaatttctaagtagaagtgtagtgaaagcatatccatttaatattgatcagattatataattgtgaaattatagtgaagttcttatattggtgaaattttgtgtggatttttattttaatgctatgattatcttgctggaaccagtaaaatatatctatttttataacatattttatatattcattttccgattaaataatttgtaaggttgttggcaaaaataaaggaaatattatatagtcttttgtccacaaaggggtagtcaactccttttgagcataaggaatctttctgagaatctagttcatggtagggaaactgccattgcagcaacagagctcattaaagctaaggtagtagtcttaaaatttaagagaatcctcaattataaagtgatggtaaagatcagtagtaagagtttctttcctctgatcataggttctctagagaagacaaataactaagtgttctgcattgtgtacacttagtgtacagagtgtctaaatggtgttatttttgggaagggaccctgtagcagtcagtgtctgaaatgtggataagggctgaaagaataaaagaaccactgttgttgacgagggtattcctagtgccactttggtatgctgctgacatttggtctcagctgataagtttcaggaacattttattgaatgatctgtgtaggaatgttttggtatcacgcttaagggaatacatgcatttatagccatcagtagcacttaaatctttcacatctattttcatcttaatgatttgttacatttttaagctgtcagaaatcacacaggaaatttaacactaggtttactttatatacacatatatagataaattggtgatctgaaatactgaattggtgtagttaatatttaaactttttaagaaagctggttccaaattgaagcctaacttaggaaactgtcaagaatgtaaactttcttgtattacaagaaatgtaagacattacaagaatgtaagacaatatataaagtcttatattgatttggaataatattataacacaaagatacggttaaagttaacatttcaggagctgattttttaaaaaattttcagtatcataccctattttgacattctcttcccagtttaattgttagaaagtatattttacacctaacttttttacatgacacaataattttgttctatttaaaaccattaaaatctattgagctcagaaatgaaaatgcctcttttccatttataccctgtgttacaattttaaatatatttcataattaaaaataaaaaatttaaacatgtatacagcaacaagtacataaagtaacatttcaacattttaccatatttgcttcagatctcacttaagtaaaatattggttcagtcctactctcatccatttccccttcttcccaccccacaggtaatgattatattgaagttttatgcatgtgcatgtgtgtgcatgtttttctatgttttttatatatgtattcataaaacatttttcatttaaaagtataacaaaataatatgctgtatatatcatttgggaacgtttttcatttaacattgtttttgaattgtattcatgtcagtaaatgtacatctagtttgtttatttttcactgctctatagaattatgttatatcaataagccactattcatttcccacataggaagttattcccaatttttcattttctaattttctaattagtgctgtggtgaatatccttatatttgattccttgtgcacatgtgggagaaaatctccaaagaattacctagttttgtttaattcttgagcgatgtatgcaccaaagcacatagaagatacttagtaagtattacttaacactggatgaacattcagattctacattttatttatcttgttagtttatctgaatgaaatcattgtttgaaatgaaaaagtatggtgtggtgtatttgtttctgttaaaacaaatacagaatatatgaatacccaagatcaaactggtgtttgtaaataatgtgattataatacattaggcttgtaatgcctgctattaggtaggttgagataggaggattgcttgaactcaggcgtttgaggctacagtgatttataattgtgccattgtactccagtctgggtgatggattgagaccccatctttaaaattaaaaaaataaataaataaaaatattagcaacataaatagtaaaccttcaagtttacttttctaaaaaagtatgatggtgttcttatacattaacgtttttagcttctggctaggtgtggtggctcacacctgtaatcccagcattttgggaggctgatgccagaagattgcttgagcccaggagttggagaccagcctgggcaacacagtgagacccagtctttaaaaagaattagctgggtgtagtggtgtatgcctatagtcccagctactcaggaggctgaggtaggaggattgcttgagcctgggaggtagaggctgcagtgagctgaatttgcaccattgcattccagcctaggtgacagagtgagactctagctcttaaaaatttttttaaagtttctacaaataaaaatattcatgataatatttgggtccatggcgctttggaccttaaacctaacagaaacccaaaagagaaaattaaaagggtgaaaaatatatgtgatgttttgttttttatttaaggatggagccaatttgttttttagttgtctcctttttatttgtgaatgtaagcattttgagtgacttctgaattataatctaccatcttattttgatcaaggtcttggttgcacatcaggatcatctttgaaactttaagaaaatgcctgagagattttaattcagtggtttaggggtgggaatggctgtttttaaaaagattcttcagatgactctaatgtttagctcagggtgtgaaacactgccttagcagaactagggacaagagggaggctggagaggtttctgtaggttttcttcagtctgtttatcaggagacagtacagaatgggactctgcctttttcccccagtcgttctgatgttttgctgccaaaatagatatacctgcaatgtcttgtttgtctttatttggaaatagtagacagtattgatatggagtggatagtggagtacacatagaaaaaaggcagtttaatgacaatttatgtatagtgttgaagtaaatattagcaaggaaattggtaatatcataaaattaccaagtttttacataccatattgataggatctgtgcagacaattccaatgagaataaaaacctttatggcatacttaagtgtaggattgcaaaagaatctgttccgtatatgttacttacttccccattctttaaggactgatactgaatttatttgcaaagcaataacaaaataagagctcttggcccctagttttagaactttttatgggttctcttaatgttatttcaagttgtaaaaaatggcatttgcatctgtaaaaggaaacaattaggatttgtaacttggaatttgccaaggttgtcatgtgcttagtaagtcgataaaatattaaccttttttacttgtgtccaatatgccatttttctaaggattatgaggtatttcatgtctaatacaaaagttacaaaatgctgactaaagtaagtatctttttctgtgtataaatgtgtgaataatagccactcctttctcctagaagatgggcttcatgggattgtgagctgcactgcttgtggacaacaggtcaatcattttcaaaaagattccatttatagacacccttcattgcaagttcttatttgtaaggtatgtaatgatctgttgatatttcataccgtaaatatttgaatgcttaccatataccaggcctttgagggcacagtcttgaagaaagatgaaaatggtatctgcccttggaagacttctactatagtggggaaaatagacgtacaaagcctaagtgtcatgataggggagatactgtgattatgggagcacaccggaagcctgtgtaaataggatttggatggctttctagtggaaagctgtatgtgaaatatgaataagaatcagcctggtaagtgagattggttcatcatgttctgggaagaggcaacatagtattcagatactggtagttgagggagagcttggtgtgtttgaaaatctcaagagtggatgtgtgtaatgtttgtgttttataatctttccccttatatatcctacttccccaaatgtaaactatctatgtggagcagggttttgacataacttggagatgatagaattaaaaatgttttttatgtgttgattataattttaacagtctgtgccacttttttgttagtaataccttggagttaattttaaatatctataaatgtgggcctggcatggtggctcatgcttgtaatcctagcactttgggatgctgaggcaggtggatctcctgaggtcaggagttcgagaccagcctggctaacatggtgaaaccccgtgtctactaaaaatacaaaaaattagccgggcatggtggcgggtccctgtaatcccagctacttgggagactgaggcaggagaatcgcttgaacccgggaggtggaggttgcagcgagtcgagatcgcgccattgtactccagcctggacaacaagagggaaatttcgtctcagtaactacctacctacctataaatgtcaaggttatggttttcttaactcatattcctgctaagattaatcctatgttagtttgtttcccaataaaaagctgcctttgaaatgcagtggcaggccatgttttccttggaattctagctctagatcttttcttgcatgaatttttgatagattcagacatgcttaaatgaactgtactttgttctttagcaatttgtatccctcctttccttgaattcagttcagccaggggcctatctagggtatgtattagagagtttcattttaaattgtgacagtagaatctaatattgctggatttgtgacatgtatttgcctttctgttttcttatctatgtgattgtcttttttcaagaaccagtctgttgagcctaggccatttcactaatcggtagtttgtatcagtgagcaccttttccctttctgcagtcccactggaaagactttgaagtcagtcaaacttggatttgaataacagctttgcctcttactagttgtatgactttagatttatttacatattaatgaaagttagccttttctctcataatatgtcctaccttgcatggtaggtatttggtatttaaagataatatagattaattgtttagctgtatacatagtagctgtttgtatatggtggctattaaaattgttaagtacccaaatctaatacatttttatgtagagctttagtagctagatgtatgagaccagaaattagctttactaaaatcttttgtaaacttttttttttttttttttttttttttgagacggagtcttgctctgtcgcccaggctggagtacagtggcgcgatcttggctcacgacaacgtccacctcctgggtcaagtgattctcctgcctcagcctctcgagtagctgggattacaggtgtccactaccacacctggctaatttttgtatttttagtagagacggggttttaccctgttggccaggctggtcttgaactcctgacctcaagtgatccacccatctcagcctcccaaagtgctgggattacaggcatgagccaccaaacacccagccaaaaatcttttatacacttttaaataaggaatagtggtacttgagtgtatggaaatctgtttcaaggcattaattcttgagatagttagatgtctggaaaatacagacattgggtagtgggtagcagtgtttattttatttatttatttatttttgaggcggagtgtcactctgttgcccaggctggagtgcaatggcgtgatcttggctcactgcaacctccgcctcagggttcaagtgagtctcctgcctcaacctttagaatagctgggattacaggcgcttgccaccacgcccggctaatttttgtatttttagtagagactgggtttcgccatgttggccaggctggtcttgaactcctgacctcaggtgatccaccctcctcgtcctcccagagtgctgggattataggcatgagccactgtacccggctgcagtagtgcagtgtttttgctttgagtctctgaaacatgcacacatactcccttttttaaaaaaaaattgtttgtatttttaaaatttttgtgggttcatggtaggtgtatatatttatggcatacatgagatgttttaatactggcgtgcaatgtaaaataagcacattgtggaaaatggggtatccatcccctcaagcatttatcctttgagttacaagcaatctaattacattctttaagttatttaaaaatgtacaattaagttgctattgactgtagtcaccctattgtgctattaaatagtaggtcttattctttgtatttttttgtactcattaaccatccccacctcctccctatcccctcactacctttcccagcttcttgtaactgtccttcatgacatccttcattagttcatccatgagttcaattgttttgatttttagatcccacttataagtgacaacatgcagtgtttgtctttctgtgcctggcttatttcacttaacataatgatctccagttccttccatgttgttgcaaatgacaggatctcattcttttttatggctgaatagtactccattgtgtatatgtaccgcattttatttatttacttatctgttgatgggcacttaggttgcttccaaatctttgctattgtaaacagtggcccaacaatcataggagtgccagtatctctttgatatactcatttcctttcttttgtgtatatactcagcaggtggattgctggatcatacggtatctcaatttttagtttttttgaggaatctcccaactgttttctatagtgattgtactcatttacattcctaccaacagtatacaagggttcccttttctccacatccttgccagcatttgttattgcctgtcttttggatataagccattttaactggggtgagatgatatcttattatagttttgattaacatttctctgataatcaatgatggtgagcagcttttcatatgcctgtttgtcatttgtatgtcttctttggagaaatgtccagtctaatcttttgcccattttttgattggattatttgattttttcctatagaattgttggagctctttatatattgtggttattaatccattgtcagatgggcactttgcaaaatgttctcccattctgtgggttgtcttttcattttgttgattgtatcctttgctgtgcagaagctttttaacttgatgtgatctcatttgccaatttttgctttggttgcctgagcttgtgtaatatgctcaataaatctttgcccacaccagtgtcctggagattttccccagtgtttttaattacttaaaaaaataaagtttttgtcctttatgaatgttatcaatttcgaattaaatttccccttcctcttttcttttaatagaattgctttaagtattacatgagtgatgatattagccgtgactcagatggaatggatgaacaatgtaggtaggtaatatagatgagctaacattcagtgtttcctacttttgggaggaattgttacataatcatttatgaggtttgtctttcatagtatcgtcattgatgtctttaatgaaaggttgttcttttccataaaaccctggatttatgtctagtttaagtttctaataaagagtaagcagatgacctaaattaccactaaaattactggcagtaaaatttaaattgcattataacaaagagattaaaatgagttttgttgggaataatgtttatttttatttttttacatatcttttcagtttcctgaaagaagggaataatgttttaatctttaaaacatttcaggtggtgtgcggaaggtggaaacttgatttgttgtgacttttgccataatgctttctgcaagaaatgcattctacgcaaccttggtcgaaaggagttgtccacaataatggatgaaaacaaccaatggtattgctacatttgtcacccagagcctttgttggacttggtcactgcatgtaacagcgtatttgagaatttagaacagttgttgcagcaaaataagaagaagataaaagttgacagtgaaaagagtaataaagtatatgaacatacatccagattttctccaaagaagactagttcaaattgtaatggagaagaaaagaaattagatgattcctgttctggctctgtaacctactcttattccgcactaattgtgcccaaagagatgattaagaaggcaaaaaaactgattgagaccacagccaacatgaactccagttatgttaaatttttaaagcaggcaacagataattcagaaatcagttctgctacaaaattacgtcagcttaaggcttttaagtctgtgttggctgatattaagaaggctcatcttgcattggaagaagacttaaattccgagtttcgagcgatggatgctgtaaacaaagagaaaaataccaaagagcataaagtcatagatgctaagtttgaaacaaaagcacgaaaaggagaaaaaccttgtgctttggaaaagaaggatatttcaaagtcagaagctaaactttcaagaaaacaggtagatagtgagcacatgcatcagaatgttccaacagaggaacaaagaacaaataaaagtaccggtggtgaacataagaaatctgatagaaaagaagaacctcaatatgaacctgccaacacttctgaagatttagacatggatattgtgtctgttccttcctcagttccagaagacatttttgagaatcttgagactgctatggaagttcagagttcagttgatcatcaaggggatggcagcagtggaactgaacaagaagtggagagttcatctgtaaaattaaatatttcttcaaaagacaacagaggaggtattaaatcaaaaactacagctaaagtaacaaaagaattatatgttaaactcactcctgtttccctttctaattccccaattaaaggtgctgattgtcaggaagttccacaagataaagatggctataaaagttgtggtctgaaccccaagttagagaaatgtggacttggacaggaaaacagtgataatgagcatttggttgaaaatgaagtttcattacttttagaggaatctgatcttcgaagatccccacgtgtaaagactacacccttgaggcgaccgacagaaactaaccctgtaacatctaattcagatgaagaatgtaatgaaacagttaaggagaaacaaaaactatcagttccagtgagaaaaaaggataagcgtaattcttctgacagtgctatagataatcctaagcctaataaattgccaaaatctaagcaatcagagactgtggatcaaaattcagattctgatgaaatgctagcaatcctcaaagaggtgagcaggatgagtcacagttcttcttcagatactgatattaatgaaattcatacaaaccataagactttgtatgatttaaagactcaggcggggaaagatgataaaggaaaaaggaaacgaaaaagttctacatctggctcagattttgatactaaaaagggcaaatcagctaagagctctataatttctaaaaagaaacgacaaacccagtctgagtcttctaattatgactcagaattagaaaaagagataaagagcatgagtaaaattggtgctgccagaaccaccaaaaaaagaattccaaatacaaaagattttgactcttctgaagatgagaaacacagcaaaaaaggaatggataatcaagggcacaaaaatttgaagacctcacaagaaggatcatctgatgatgctgaaagaaaacaagagagagagactttctcttcagcagaaggcacagttgataaagacacgaccatcatggaattaagagatcgacttcctaagaagcagcaagcaagtgcttccactgatggtgtcgataagctttctgggaaagaggagagttttacttctttggaagttagaaaagttgctgaaactaaagaaaagagcaagcatctcaaaaccaaaacatgtaaaaaagtacaggatggcttatctgatattgcagagaaattcctaaagaaagaccagagcgatgaaacttctgaagatgataaaaagca

SEQ ID NO: 15471 - DNA, 132063 bp, Homo sapiens
gagcctcggcccaacaaaatggcggcggcagcggtgtcgctttgtttccgcggctcctgcggcggtggcagtggtagcggcctttgagctgtggggaggttccagcagcagctacagtgacgactaagactccagtgcatttctatcgtaaccgggcgcgggggagcgcagatcggcgcccagcaatcacagaagccgacaaggcgttcaagcgaaaacatgaccgctgagcccatgaggtaaaacgcaaccccgtctcatgggccccagcggtctgggcccaggcaccgtctgagtcgggtgtttgggaaggcgttcgcttggtgggttaggcctgtgtgttgcttagccgaaagaggcatcgttttctctttaggtgagaagggtttcggggtatcggcgcaaggctccgacgggggtgggggtggggatggggtggggggaggtggggggggcgcggcctagggtatggggcgcttcttgcaatctcccctaaacggtgacgcttggtcgggctcctctgtttattctttggtgcctgtgggattgagacctcgaagtcggaggcggtctttggtatcccggtcatttttgctaatctttgggcctagaaactgcgtggggaagaagcggggggagggtgagaagagggggaggggtgggcgggcgcgaggatgtgagatcccaggacgacttagaggcgtttaggttgctggagatgggaagcacccgggccctgcgggattttttttctgcagccccaggagacaagcctttttttgattgggttgtggtgcagttccaggtatttaggtatcttttctactccatatcctgaaggatatccttgggtttatttctaggcgaggggggacttaacacagggttttgcttccagaggaccctagtatactactttttgtgatgtccagccttaatgggacctcaagtgtttccccactttctgggcaaatttcgaggagtaattaggccctatctttatttacttatttattccatgaaggatgaagggcaggttaacgtgggctgatgcgaagtaagatttattgcaagggaaaatgcctggcaggcctcctcttaaccaatcaagcacgtttattaggttgaagctgtttttctgtgtgcttctgatttgcctcttgacgggtctgaaaatttgggtagtcaatatgaaatgtatacacttttacccaggtggctggctggcgtttcagtttgacatttgaattttcatcccacaatgtgaattaagtaatttttttactcggagatgcatccttggcgtccagtggcaaaataaaattacaaggagcatgggtcagaattgcatttcaagttggcgaaatgtgcctttgagtaactcttagattggcatatgtttttagagcaatttagctagaatgtagaattgggcaatgagcctatgatacgtatgtctgtatttctgcatgaacaagcagtagattatattttctttaccttggggaaagatatgcttcagttcttagattgtagatctctagttgtgtacacgattgtggccttggtttctgaatttgtcagtaggctcaaatacaacaaatctttatctgtggggtattaggcacgtaagtggtacccagtataacttgttggcctgtaattaccaggcactcatgttcatatgcatggatggtgtaccttacagttaaattatgacctctagattttactaagtttcacaaagtctacatttgaaactatagtttgaagtcggatcttctcagtttctttagaatgaacaaattacgtatatagaatttctgaatagaataattaattttacacaagggtcagtttttcttactagtcttggatttttgtagatcttgatgataagagtaataatcataactaagttgagtgcttattgtcgttctttataatcttgatgaattctcaaacctgtgaggtaagtacttggttttgcccattttaccgatgaggaggaaagtgagacatagatcaagaacttgaccgaagttatacagcttgtaattggtggagctggaattgaaccccatcttgacttcacagcttatgttcttaaccacaaggcattaatgcccccttcagctgccaggtctaacctgattatgaccatttaaatttagcccaagtgttacaatgaaagaagttcatattacctactctgatttgttgcaggtctatgattttgtagctgtttataatgttacattttttgtgtccaggtgtactatgtagtgagataactgaaatatttaatgctaggagagtcttaagctacatgaaaaacctctagtaaagaactgcatatatgcatgtagggaattaattaaaaagtgtgacactccctgatgatttactatgaaagagctccaagtaggtgttcagaactgtctcaggctgaagtgtcatcgatctcctaaaccataatcatggttaaaggagaatctgacaggtaatgcttgagttgaacccacagtaccaaatccctcttgagtcttttctaatgtgaggcagaaataatataagcattattgttaatattattttacacagtagttccagattttctctttatcaaatattttgtcaagcacttaaaaagcaggaacaaagactagttctaatttttacttgtgtttataaaaaaaagtaatattctaggattctgtggtggaaaaatggccagaagacaagaggaaggaaaataaaccgatgacctggctaaaacatacactgactaatcagtggctcagtctttaaaggttttgttgtttttaaaggatttttttggttgtttgtgttgtttgaaataagattgacttgcttctggcattataaaagataaggtcttttataatcaccaagctctcaatgtagtacttgggtacctgggtgtcactgctgattattttttaatttttaaatttatttttttgagacagagtctcactttgttgcccaggctggagtgaaggggcgtgatcttggcttactgccgcctccgcctcccaggttcaagtgattctcatgcctcagcctcccaagtaactgggattaacaggtgtgtgccaccacgcctggctaatttttgtatttttagtagagagggagtttcaccatattggctaggctggtcctgaactcctggactcaagtgatctacctgccttggcctcccaaagtgctgggattacaggtgtgatccaccgcgcctggctctctgctggttattcagggcccaagggctcttcagttatcaggtgatgtatgctgctaggactgggaccttcccttcagggcagcagattcccttctggcccaggatgtgtctagaattgtcatcctggagctagggcctggaatggaggcttcatgactgatgaactttaatttgttttctttatttttattttttttgagatggagtctcactctgttgcccaggctggagtgcaatggcaccatcttggctcactacaacctttgcctcctgggttcaagcgattctcctgcctcagcctcccaagtagctgggattacaggcaagtgccaccacacctggccaatttttgtatttttagtagagacggggtttcaccatgttggccagccaggctggtctcaaactcctgacctcaggtgatctgcccgcctctgcctcccaaagtgctgggattacaggtgtgagccactgcgcttggccttaatttatttgcatataaagatttcagtattgggagatttggtgaaatttgtcattctaatccttatggcaattgattacttgaaaagctgacagctatattaccttgttattgatcttaaatataaaaaggcagaagttgtctaaattgagagattttgaatgtcttagaaagtatctgttaaggtggtagtttacaagcagttacattgtaacctaattgttgaaaaatgttatctgtgaaatacttgcatttccactatgaaaagcatgaaaccaggcccttggagggggaggagatgcaaattttataaaggtttttaaaaagcatttaaatatcaatggcttggttatgtaatgggttggggtgaaaagaaagacatttgtgaccttaatttttatcaggcccagttttattattggccacccttggcatagttggccttgagctttcagttatgtattgtatttctagagataagataaatgtagtacttaaaataatatttaagtattgatgtaggtgtgtgaaataattgtttcataagtaattgtatgtgtctttttcacttttggggtctgaataaacttatgggttgggtaataggatacgggcaattcttgaatttacatgaagtgctttcccccagaccgtgaatgttcttttggatatcagaaactatttaaatagttgaagccagtgaaaactgatgcatagatcttcctttagaaatgttgaatataacagggcagtgaaaggagggtctaagcagtctgtctctaattttatcctaatgcttgtcttatgatcagcttggaagctgacatgcaagatgtttaacttctatttttccatctgtaaaatgggaataagctcaaatgggagtaaatatcaatatttatcaataatagatattgataaagtctaaaggtattctgaaggaggtaacatgtttgtaacaatggttcttaaaagagaaactaaagctctggggtcctagttttttttttttttttttttttttgagacagagtctcactatgttgcccaggctggagtacagtggcacgatctcaggtcactgcaaactccgccctccgggttcacgccattctcctgcctcagcctcccgagtagccgggactacaggcacctgccaccatgtgcggctaattgtttgtatttttagtacagacagggtttcaccgtgttggccaggatggtctcgatctcctgacctcgtgatttccacccgcttcggcctccaaagtgctaggattacaggtgtgagccaccgcgcccggctgttaatttttaagagtgaaaagaggtgctgcgactaaatggtttgagaactgcttgtatagaggaatgaacactgaactgtgagccaagccttggtttttcagttatagctctgttgcttgattgtatgactgtggacaaatcatttatctgttccaggcttctgctttgtcatttgcagaacgaacaagactagatggtctgtagcattaatttttttttgggacaaggtctcactgtcacccaagctgtagtgcagtgacactgaacatggctcactgtagccttgacctcctggctcaagcaatcctcctgcttcagcctcccatgtagctgggaccacaggtgtgtcatcatgccccgctaattttttgatttttttgtagaaacagtggtctcactttgttgcccagtctggtcttgaactcctggacttaagcgatcctcctgccttggcctcccaaagtgctgggattacaggtgtaaaccaccataccctgcctaaagttagtttttaaaaaattctgcttacaggccacgtgcagtggctcacgcctgtaatcccagcactttgggaggccgaggcaggtggatcatgaggtcaggagttcaagaccagcctggccaagatggtgaaaccccatctctactaaaaatacaaaaaaaaatcatctcggtgtggtggtgggcacctgtaatctcagctactagggaggctgagacagagaattgcttgaacccaggaggcggaggttgcagtgagctgagattgcgccactgcagcctgggcgacagggtgagagtctgtctcaaaaacaaaaacaaaaacaaataagcaaaaaattctgcttatatgagtgtttatcattttctcttatctgccttttgtgggttagggagaagggtagtggtgagataaagtttctttattcagtgtatttatatctttttgccttaaaacttacatggttaggttacaggtgttttgttgctgatacttgtcatagtatcatgtatacctggttgtataaacatttattggaaaggaaaaaacatttttgttggaaagtttggtaattattgtggcttaggatatgttctattttgaaagattgctatatccagtatatttctgcccttttatgattgaagatgtacgtctgaaaatacctatgttagttctagccggttgttctttttgcgctgggaagtctttgaattttgcactgtagctgctattttcagatcctgtctctgaaactttgtctctcagttttagcttgaagtagccatttcctgtatctgtagtccagcactcttgttaactgtcccatacaatatttgttaagaaattattgttctggcagtagtattcacatgtatatatcctgcactccatattttgggggaatgctttattagttgatcaaatacttaagtatcaatttggggccaggcatggcactgtgttagggttatgccaaaggtaataaaattcctgccatcttaaggcattcttagtcaagtgagggagattggtaagtaaatgagcaattagaaagcagtgctaaaatatggaaatatattgattgcgctagggatcagaaatgaaagaaagcctaatttgggggatgtctaggaaagttttgcaaaggagatgttaactgtattgagtcttgaatgagttagcagttaagggttgactgtgagagggcagtccagacagctattagtatggttaaagattagtcttattttccatatatcagaggaaataagacatgtacacgattagttttggtgcaagatataaagtgataaatgctgcatgaagtaaaagtaagttgttgtgtgagttcaaagtagaaagacatttctggtggggaccaaggaaagctttatagagagatagcatttgagccgggcgccgtggctcacacctgtaatcctagcactttgggaggctgaggcgggtggatcacgaggtcaggagatcgagaccatcctggctaacatggtgaaaacccgtctctactaaaaatacaaaaaaaaaaaaaaaaaaaaaaaaatccgggcatggtggcgggcgcctgtagtgccagctgctcgggaagttgaggcaggagaacttcgtgaacctgggaggcggagcttgcagtgggccgagatcgcgccactgcactctagtctgggcaacagagcgagactccgtttcaaaaaaaagaaaaaagagagatagcatttgaatctagtccttggaatataggtacagttttgacaaaggagactgtgggagaattccagatgtgaggagtagcagcttgagcaaaggaatgttgtgtatattagcattttctatttggaagaaggtcaacatcgaattttaaacttaatttctggacaaatactgtataactattgtgcctttttttttttttttgagacgtagtctcgctctgtcacccaggctggagtgcagtggcatgatcttggctcactgcaacctccgcttcccgggttcaagcgattctcctgcctcagcttcccgagtagcttggactacaggcgtgtgccaccatgcctagctaatttttgtatttttagtagagatgggatttcaccgtgttggccaggatggtcttgatctcctgacctcatgatccgcccgccttggcctcccaaagtgctgggattacaggcgtgagccaccgcgccctgcctattgtgcttttttttttttttttaagagacagggacttcctctgtcacccagcctggagtgcagtggggtgatcatagctcatagcttactgcatcctagaactcccgggctcaagtgatcctcccacctgagcctcctgagtagctgggaccacaggcatgtgccactatgcccagctactattgtgcattttgtatggtagcttttgtggcttgatgatcttgtaaaaggtacatgtgcctttgtgaatgggcctgataattttagttcagaattgtcaaaagtattatctacttttttttttttttttgagacagagtctcactctgtcacccgggctcagtggcaccatctcagcttactgcaacctccacctcctgggttcaagcgattcttctgcctcagcctccgagtagctgggactacaggtgtgagccaccatgcctggctagtttttgtatttttagtagagacggggtgtcaccatattggccaggctggtctcgaactcctagacctcgtgatctgcccacctcggcctcccaaagtgctgggattacaggcatgagccaccgcgcctggccagtattacctacttttaaataagattgtgtaggatttaatgcacagattttgaatcactgtgataaaaatgcatccttagttgtcttcattttgctcatttgaagtgctcagttgacttttgggtgggtaacatttgacttatagaatctaagataaaaaattatttctgagtaatactggatttgttattttgcttatttggattatattagttattttttggtttatttgatagcattccagatttagttttgctataatgcttgttttgaaaatgtggattttttccaaaagggttgatatttcagggaacaatttgaagcatacgacaaaatttgcatttgcttatgggggattttgtctgcagggtcagggatcagcatactgtggcctaccaaccagtggcctgttttttgtaaataaagttctttttttttgtttttgatctttgttttgttttgttttgttttgttgagacggagtcttgctctgtcgcccaggctggagtgcggtggtgtgatgtccgctcactgcaacctccgcctcttgggttcaagcgattctcatgcctcagcctcacgagtaggtgggatttcaggcatttgccaccacgcctggctgatttttgtattttttttttttttttttttttttttttttttagtagagacagggttttaccacattggcctggctggtcttgaactcctgacctcaggtgatccgcctgccttggcctcccaaagtgcagggattatagatgtgagccatgtaaataaagttctattggaatacacctatgtccatttatttacattgtctgtggctgcttttgcactgtagttgcagagttgaatagctgcagcagagacctagtagcccacaaagcctaaaatgtttactgtctggccctgtattgaaagagtttgctgattattgtgctagatgaatgcaggatactacacccctctaaaaagagctgcatagaaatacatgcatatagatgcacacacgtctgacatctaccagctacctcatttcaccacttgggttataaaccacacatatttacatctgttgtacaattttcaatccgatttcagataaccttccttctaccacttcacaataattcatgagctgcaacccttttgatgcccacttcacaagcaaacttcaggtctttttcaaagtaaagtgccacatttattgttatatttgagcatttattatttaacatgtcaaactgtgctaccatttttctttggtttctttgttttaaaaaaagtcactgatgaaatttttgaatgttgtgcttctaacctcatttttcctatgagttctatggtgttaattgcacaattttacatagtttggtggtttttaggaacccatatgttacattattgaggaactgactaattatcatcctgtaaaaagtactaattcattcaccaaacatttctggggtgatgtaaatattaagtgagttaaatgggcataaagcacttatgtctttattgttactcaaatattagttattactgattactattaccatgtgtcaggaactgtaataagtagtgcattgatgaacaagacagataagggacctgtctccatgaagcttacattgtatttttaaaaatctattaatatacattttggctagtaaccgagcccttgccccacagaaaagttgtgctgttacacaaaataatattttaagatccatccacaagtcaaagacatttcacttaaaacagctttctcagcagtgtctccttgatagggtataatattttattgaattattgtttttggctgggtgcagtggctcatgcctgtaatcccaccactttgggtggccaaggcaggtggttctcctgaggtcaggagttcaagaccagcctggccaacatggtgaaaccccgtctctactaaaaatacaaaaattagccgggcgtggtggcgcatgcctgtaatcccagctactcaggaggctgaggcaaaattgcttgaagccgggaggcagaggttggagtgagccgagatatcaccaccgcactccggcctgggcgacagaatgagattccgtttcaaaaataaataaataaataaataaataaataaataaagaattattgtttttaatttttgtttttttctgagataggctgttactctgtcactcaggctggagtgcattggtgcagtcatggctcactgcagcctccgcctccctggttgcaggtgatactcccacctcagcctcccgaatatctgggactataggtgcatgccaccatgctgagttaatttttgtatttttttgtggagatgagtttttgccatgttgcccaggctggtatcgaactcctggactcaagctatctgccctctttggcctcccaaagtgctgggattataggcatgagccaccaaacctggccatgtgattgtttttttgtaactgtaacctcaggagatgaatccgatctatctttagggagataaagagtaatcatcccttcctttttttactgtataaaaggttacaaaatataatttcagacttgtagaaaatttgtaaaaatagcacaaagattctcagatgtgcttcatccagatgcagcaaggggtaacattttaccatgtttactttatcatcctctattattatttttctgaattgtttcagagtaaattgcagacatgatgtccctttactcccaaatactttaatacatatttctcgaaactaggaatagtctgttacatgatcccagtatagttagcaaaattaaaaattagcattaaggctgagtgcggcctcccacacctgttatcccagcactttgggaggctgaggtgggaggattgtttgaggccaggaattcaagaccagtcttctcaacatagaccctgtctctacaaaacaaacaaacaaacaaacaaacaaacaaacaaaagtactaaattagccggtgtggagcatgcctggagtcccagctactcagaaagctagagtcaggaggatcacttgagcctagaagttccaggctgccatgaactatgatcatgccactgcagtctagtgtgaatgacagagtgagacccccatctcttaaaataaaagagagattagcattgatacaataccatttttttttttttgagacagagtctcacactgtcgcccaggctggagtgcggtggcgcgatcttggctcactgcaagctccgcctgctgggttcacgccattctcctgcctcagcctcccgagtagctgggtctacaggttcccgccatcacgcccagctaattttttgtatttttagtcgagacgggttttcaccgtgttagccaggatggtctcgatctcctgacctcatgatccgcctgcctcggcctcccaaagtgctgggattacaggcgtgagccactgcacccggccgatacaataccatttttaatctacagaccttattcacattttaccaattgcttcatgacatccttcatgatgaaagacaaaaagttcttgttttctgatctaccatctaattctagaacactcattatatttcattgtcatctggaacagctcaccttgccatttttttttttttgagacagttttgctcttgttgcccaggctggagtgcaatggcatagtcttggctcactgcaacctccatctcccaggttcaagtgattctcctacctcagccacccgagtaactgggactacagacatgccccaccacgcacggctaattttgtatttttagtagagatggggttgcaccatattggtcaggctggtcttgaactcctgacctcaggtggtctgcccgcctcggactcccaaagtgctgggattacagatgtgagccactgcgcccggcctcttctccatttttaaaagaacacaggccagttgatttgaatttgtctgatgtttccctttgattatatattttggtaggaacactatgaagtgatgttttgtccttcacagcacattttatcaggaggtgtataatgcctttgcttttactatgttttagaatgattttgctttgtttttttttttctgagacagagtcttgctctgtcgcccaggctggtgtgcagacgtgcgatctcggctcactgcagcctccgcctcctgggtccaggcgattctcctgcctcagcctcctgagtagctgggactacaggcgtgcaccaccatgcccagctaatttttatatttttagtagagacggggtttcactgtgttgatcaggatggtctcgatatcctgacttcgtgatccgcccgccttggcctttcaaagtgctgggattacaggcgtgagccatcgtgcctggccgattttgcttctcatgctaaaattattaatcagctcattctctgccattttatttagaggtttgaagtttggcttgattaatttctacagaattggggagagttttcccacctcccatttttcttgctttttccatttcctccttcctcagatacccccaaagttcaaaaccaaccaccccgattatgaattttcattttgtattctgaacatatagctaaaagcagagaattaagggtgaatgtttcatgttaaagtgattggacctgttgttaagcatatgaaataatatatttccttcaaaggctgactatactatagtgcatccaacatagcttgttgaatatctcagttcttttttttttttttttttttttttagctgaaatttgccacagggaaatatctctccagcctgggcaacatagtgagactctgtctcaaaaaaaaaaaaaaaattagccaggtgtggtggtgcacaactgtagtcctaaatacttgggaggctgaggagggaggatcctttgagcacaggagtctgaggctgcagtgagctatgattataccactgtactctagcctgggagacagagcaagaccccgtctctcaaaaaaaaaaaaaaattggtggtgaaatacacataccacaagatttagcattttaaccattaaaaaagtttgtttttggctgggtgtggtgactcacgcctttgggagtgatcccagcactttgggaggccgaggcggatggatcacgaggtcaagagatggagaccatcctgtccaaaatggtgaaaccctgtctctactaaaaatacaaaaaaaaaaactagctgggcatggtggtgtatgcctgaagtcccagctactcgggaggctgaggcaggagaattgcttgaacccagggggcagaggttgcagtgagccgagatggcgccactgcccgccagcctggagacagaacgagactctgtctcaaaaaaaagcttttttttttttttttttgagagaagggatctcgctatgtttcccaggctggtctcaaacttctggcctcaagcaatccttctgcttcggcctcccaaagtactgggattacaagagtgagccactgtacctggcctcatttttctattttgataaacacttttttttttttttttgagacggattcttgctgtgttgcccaggctggagtgcagtggcatgatcttggctcactgcacctctgcctcccgggttctctgcctcccgggttcaagcaattctgcctcagcctcctgagtagccgggactacaggcgtatgccaccgtgcccagctaattttttttgtagttttagtagagacgggttttccccatgttggtcaggatggtctcgaactcctgacctcaggtgatccgcccgcctcggcctcccacagtgctgggattacaggcgtgagccaccatgcctggctgataaacacttttaaggcttaacatgagctaagtattattttagaacagattgtctcaaccttggcactatagacattttgtccagaaaattttttgttagaggctgtcctgtgaatgcattttatccctgacctctacccactagataccagtaacacccctaccctgagttgtgacaagcaaaaatatttccagaaattgccagatgttccctgtgggcggtatgggtttgagaaccacttttctagataataggcatttgtagataatgaatactgagctaagtggaggagtaaatggttgaaatagactatgtggttaagtacagttacagagatataaaccaagagatgtggaagaatagcaaaaaatttccttagagagttgatagcaagtattttcccaagagagacagcaattctgagttgggtcattggggatggtggggggaaatgtgctgaggagggggaaatattctaggtggtggaacgggttatgtctagagatacggtagaggagcccttgggtgccttgagaaaaatgagataataagtatgattggagagaatatgggaggtagaattggaaagaaggatgctagttggggtcaggtttgagaaaggcttttttttttttttgagacggagtcttgccctgtcacccaggctggagtgcagtgcctcactcggctcactgcaacctccgccttctgggtttaagtgattcttctgcctcagcctcttgagtagctggcattacaggtgcgtgccaccacttccggctaattttgtatttttagtagagaccgggtttcaccatgttggccagactagtctcagaactcctgaccttgtgatccgccagcctcggcctcccaaagtgctgggattacaggcatgaaccaccacgcccggccgagaaaggctttttatgctatgctaaaatgtttcattttccccctttcattatagaaaatcaacaaatacttttaaagtctgtagagttatatgatcagctttttaaaagaatagtgatacagtgaaatggtaaaaatggtcaatggtgaatattaaactcaagaagataactctagcctgtaaagtaggaaaataggaagggatggagatttatataaaactaaaactagatgtcatatgttgcccttaaatcacatcaccctgtgtgtagacttcttcatcctcatttgtcaaaattctgacatattgtcaatactgatgaagattcttgatattcaaagcaggagtgaagtgggcaaaaatctgtattctaattttcattaccctaataatgtccttttaatttggagcagttctgtggcctctctttgtctgtcctgatcttgacatttttgaagagtatagaacaattattttttagaatgtatctctatttgggtttgtgtgatgcttctttatgattagatgaagggtatgcatttttggaagaaataacagaagtgatggtatgttgttttcagtgcctctgtaacaggagatgcatgacattggttggtcccattactgatgatggtaattttaatcacttgggtggtttccagtagatttttctatgtaaagtttatcatttttggccgggcatggtggctcacgcctgtaatgccagcactttgggaggctgaggcaagcagattacttgaggtcaggagtttgagaccagtctgaccaatgtggtgaaaccccatctctaaaaaaatacataaattagccaggcatggtggcatgcgtctgtaatcccagctgctcaggaggctgaggcaggagaatcacttgaaccctggaggtggaggttgcagtgagccgagattgtgccactgcacttcagcctgggtgacagagtgagactccgtgtcaaaaaaaaaaaaaagtttatcatttcccatttttattttgaaacagtcttgctctgttgcctaggctggagtgcattggcacaatctcagctcactgcagcctcaacctcctgggctcaagtgatcctcccacctcagtctcctcagtagcgtgttccaccacacccggctgctttttgtattttttggtagaggtggagtttcaccatgttgctcaggctggtctggaacccctgagctcaagggcactgatcacctcagcctcccaaagtgttgggattacaggtgtgagccaccacgcctggccctgaaaaatatttttaacggttacattatcatggagaattggatggtataaaacaatagcagttctcatatttgaaaataaattgatgtaatgaaacaaatgagaggatcaaataatattgtaaaaagaataaaaacccacatatggacaggtctgtggaaattgtattaaagcctacctctcccagattgtttccgtttgttgcaatccatttaagaacagtttttgggctgggcacggtggctcacgcctgtcatcccagcactttgggaggcccaggcaggtgtatcatgaggtcagatttcaagaccagcctggccaacatggtgaaaccctgtctctactaaaaatataaaaattagctgggcatggtggcatgcacttgtaatcccaggtactcgggaggctgaggcaggagaattgcttgaaccaggactcgggaggtggaggttgcagtgagccaagatagcaccactgcactccagcctggcctgggctacagggtgagactcagtctcaaaaaaaaaaaaaacaaacaaaaaacagtttgtgggaaaaaacaatccttgtgtatgacataatttgctgcttttcccatttagaaaatttaaaaaatacttatttgagatggggtctcactatgttgtccaggctagggtgcagtggctattcacaggtgtgaacatagtacactacagcctcgtactcctggccttagcatcttgagtagctgggactgcaggtgcacatcacagtgcctcgcttactttttccatttttgtctgttgatcctctctctcttcctttggggtaaaaattgtggcttgtgatggtggtttgtggggaaagaaaaagttggtaagctacaagctctgagcctttaatgtgtttttgttaaccatgcagacagacattagatacatagatacaacatagatgagttaaatttgaaagaaggcaccaaactttgttactttaaagcaggatttctcaaagggacactgttgacattgatttcagaagtgagattttcatggtttttaatgttattattataatggtatggatagtgttttgccctctaagaagtagctaggagtgtttccatagatgcatttagtttatatcacttatgtattctgtctctattttgtaagaaaattgcctatgaacagaattttttctgtatgtggatttaatgtcttcttctaaaggaaacatgggtgtggttcacatttccttagttttgagtagcatggcttaagttgtgatccaattttaaaaaatcagttgaataaataaatagaaaataaaaggataatttctgtactaaaaaagtcagctggacagttaaaacatctccttttattcgtaagtttttcaataaaaattgttaaaagcagtattcatttgtgtaatgatataatctttgttattgttttatgtgcttttctaaaatgcaggaaacataaggtaaggagaagtctttccttaccctgggaccagatgtctatgaggactgttgacttttctgctataaacaggatgataaattaacagtggtgtgataggtaaagtagatttgttatgacatatcttccattaagcgataataacttgatttttacttagttgatgaaataaaataactttgaaaccttgggtaacatgaaattgaatcaaaatattttcaagttatggaacatagtgttattaatagaatggagtgttgaaaaagcactggattatgctttctgtaacttttagttctgggtcttatgataactgtgaccctgagcctcagtgttttccttttaatctgtagtgatattttttagttcagtctctcattttaaactgcttttagctctaaaattttatctcagtgacctgttgagttatataacaatcgtatcaggtaacctagataagaagaggaaggcagtaacatttcagaaatacagtttggggttgggaatccttaagtgatccagacttctcctttggtccgaagatagtgtgaataaaacagctgagggatgtgggcatcaatatattgcagaggaaaaggttatttccaggagtggatttgcagctactcttaaatctattatgttggggctgggcactggggctcatggctgtaatcccagcactttgggaggctgaggcgggcggatcacctgaggtcaggagttcaagaccagcctggccaacgtggtgaaaccctgtctctacaaaaatacaaaattttgccgagcatgatggcgggtgcctataattccagctacttgggaggctgaggtgagagaattgcttgaacccaggagtcggaggttgcagtgagctgagattgtgccattgcactcctgcctgggtgacagagcgagactctgtctcaaaaagaaaaaaaaaatctattatgttggatagatggtcttttccagaagcaaattttatagatggaaagcattttaattaatctagtaaaattctctcattttacaaatgaggctccctctacctctctccccctctccccctctccctctctccctctctccctctctccctctccccacggtctccctctccctctctttccacggtctccctctgatgccgagccgaagctggactgtactgctgccatctcggctcactgcaacctccctgcctgattctcctgcctcagcctgccgagtgcctgcgattgcaggcgcgcgccaccacacctgactggttttcgtatttttttggtggagatggggtttcgctgtgttggccgggctggtctccagctcctaaccgcgagtgatccgccagcctcggcctcccgaggtgccgggattgcagacggagtctcgttcactcagtgctcaatggtgcccaggctggagtgcagtggcgtgatctcggctcgctacaacctcacctcccagccacctgccttggcctcccaaagtgccgagattgcagcctctgcccggccgccaccccgtctgggaagtgaggagcgtctctgcctggccgcccatcgtctgggatgtgaggagcccctctgcctggctgcccagtctggaaagtgaggagcgtctctgcccggccgccatcccatctaggaagtgaggagcgccttttcccggccgccatcccatctaggaagtgaggagcgtctctgcccggccgctcatcgtctgagatgtggggagcgcctctgccccgccgccccgtctgggatgtgaggagcgcctctgcccggctgcgaccccgtctgggaggtgaggagcgtctctgcctggccgccccgtctgagaagtgaggagaccctctgcgtggcaaccgcctcgtctgagaattgaggagcccctccgcctggcagccgccccgtctgagaagtgaggagcccctctgccccgctgccaccccgtctgggaagtgaggagcgtctccgcccggcagccaccccgtccaggagggaggtgggggggtcagccccccgcccggccagccgccccgtcggggaggtgaggggcgcctctgcccggccgcccctgctgggaagtgaggagcccctctgcccggccaccaccccgtctgggaggtgtgcccagcggctcattgagaacgggccatgatgacagtggcggttttgtggaatagaaaggggggaaaggtggggaaaagattgagaaatcggatggttgccgtgtctgtgtagaaagaggtagacatgggagacttcattttgttctgtactaagaaaaattcttctgccttgggatcctgttgatctgtgaccttacccccaaccctgtgctctctgaaacatgtgctgtgtccactcagggttaaatggattaagggcggtgcaagatgtgctttgttaaacagatgcttgaaggcagcatgctcgttaagaatcatcaccactccctaatctcaagtacccagggacacaaacactgtggaaggccgcagggtcctctgcctaggaaaaccagagacctttgttcacttgtttatctgctgaccttccctccactattgtcctatgaccctgccaaatccccctctgcgagaaacacccaagaatgatcaataaaaaaaataaaaataaaaataaaaaaaattaaaaaaaaatgagaaaattgagctctcctgaggttgcagtttgcttaacagcatagatctaattagtaattaggactagaaccaaggttatctgactcccagttcaaggttcttggtacagtaccgtgtttttaactagtccattaggttgttttctgtgtattttataacacttctgtaagaaagtggaatatttttctctaaggtatgttaaaactcttgttcgagaaaatacagtaaaggatacctgttgtatcttaaagtgatttttatgtttttctgtcaatgccacaatctgaagaaagtaaattagctacacttctattgctgtgacaatagattatttagaatcttcttgattacttgtattattgttcccgtgcttcagagctgtttccttgctatttaaaatcattatggtatagcccagaggctaagggggttttctaagagtatgcaatttgtcattgacatagtttttttgtttgtttttgtttgttttgtttgtttttgagacagagtttttgctctgttgcccaggctggagtgcaatggtgtgatctcggctcactgcaacctccacctcctgggttaaagcaattctcctgcctcagcctcccgagtagctgggattacaggcacccaccaccacacctgactaatttttgtagaggcagggtttcaccatgtcggcgaggctggtcttgaactcttgacctcatgtgatccacctgcctcggcctgtgaggattacaggcatgagccaccgcaccctgccaacacagttgtttttgattggaaaagtttattttcctaatctcaaagtagcttgtatctgttctttattgtgaaatgcagtttctacattgaatttgtgtagtctgtagttttgactgttttaagttcaataactagcttagtagtatacttgttagaggtcagagtaggttaactactagaaagaacagtccttctgcttactgtactaggaggaagtctgtggtggagggaaaaaaggagtaaaacaattccagtcttctgtaaaatttgagtaatttctttctctactccttctacatgaaaaatacatcttatttgatttttgcatcacatgccttctatatgtgttggaatctggatcaccatttcttcattacttgtgggtttttgttgtgaaaaatgtggagtaagttagaagttgactgtagaataggtaacattctcttaaattctttgatcagagtgagcagagtccagaagcttggctcagacttagggaactcatgacacttctcttaatatcctaagttcatgacatgtctcttaataccctaagtgtacaatacaatagtagatcaaggaaggcagaggtatctggcagacttagaagtaactgttcataaaaacaaggatcagtatgtttctacaagataatgatttaaagttgagccaggattagttatacctttaatataaaaaattgaaatagcttatttaatctgttctaggctatagtatacggagctaggtattaaaacattctctatatatttaactcttttttttgagacagggtctcactctgtctcccaggctagagtacagtggcatgatcttggatcactgcagcctagacctcctgggcacaagtgattctcccaccttagcctccacagtagctgggactacaggcctttgccaccacacctggctcatttttgtattttttgttgagacggggtttcaccttgttgcccaggctggtcttaaacccctaagctcaagtgatccgcttgcctcagcctcccaaagtgctgggattacaggtgtgcaccactgcgcccaggctatttgacttttttattctgtaaaattgcaagcatattcagaaataagaaaatagtataacggggccgggtgtggtggctcacgcctgtaatcccagcactttgggaggctgaggcaggtagatcacgaggtcaggagttcgagaccagcctggccaacatggtgaaaccccgtctctactaaaaatacaaaaattagccaggcgtggtggtgggcgcctgtaatcctagctactcgggaggccgaggcaggagaatttcttgaaccagggaggcggaggttgcagtgagccgagatcgtgccactgcactccagcctgggtgacagagcaagactcattttttttttttttttttttaaaaaaaagaaaaaagaaaatagtataatgggttgggcccggtggctcacgcctgtaatccagcactttgggaggccaaggtgggcggatcacctgaggtcaggagttcaagaccagcctggccaacatggtgaactcttgtttctactaaaaacacaaaaattagctgggcatggtggcaggcacctgtaatcccagctacttgggaggctgagttaggagactcacttgaacctgggaggtggaggtttcagtgagccaagattgtgccattgcagtccagcctgggcaacaagagcgagactccatcccaaaaaaaacaaaaaacaaaagacaactatatatatatatataaaataacgaaaccccctaagtacctgtcacccagcttcaacaattatcatcttgcagttagttgaatttggttaacacttacccttcagtggattattctagactaaatttccaaacataatcatattgtattgaagtgttttttgaacaaactatactatggggtatttacctaaaatgaactatttgcaaaaagataagttgattttttttcttctggtgccagtacacatcataattgtagttaaaagctattatcctcacattaaagtttaatttttaacacattatgaaaatttaaaacttacagcaaagctttaaaaattttacactgaacaccaatattattaacatctagattctacctttaacattttactcttcttttttttttactcttcttgttttatcacatattgatccatctgtccaactctccattgatgtaacatttcattttattttcttattcatttcaaagtaaattacagatattagtatagttgaggttcagtttttaaagtcatattttcaactaattgtttttcctgttttgaaagactgttatatctgaagttccacattatgacaactcatagtctctatggttccagtgcttcccattttgaacttttctttcatgttctacgaacctttattaaaatatttagagctatgtacaagtaatatatacagtatttagctaaaactaagtagaatgaatgagggttttgcttgtgtgtttattgcagtctttaaaaaaaatctcttctagtgagtcaatgtgtatcttttttttttttttttttttttttgagacagagtcttgctctgtcgcccaggctggagtgcagtggcgtgatctctgctcactgcaaagctccacctcccggattcatgccattctcctgcctcagcctcccgagtagctgcgactacaggcgcctgccaccacgcctggctaattttttttgtattttttgtagagatggggtttcattatgttagccaggatggtcttgatctcctgacctcgtgatctgcccgcctcggcctcccaaaatgctgggattacaggcatgagccaccgcgcctggccaagtcattgcgtatcttaagatggtacactaaactaatatgcttgccattggtgacaacatagatgaacctggaggacattatggcaagtgaagttagccagacgtggaaaaaataatacttcatgacttcaacctatatgtggaatctaagaatgccaagtctgcaaaagaagagagtagaaaagtagttaaatgggtaggaaggtgggagaaatggggagatattggttaaaggttaccaagttggaatcacgtaggatgactaggtctagagatctaatgtacagcatgaacactatagttaataatactgtatcatgtactggaaagttgttaaaagagtagatttcaggtgttttcagcacacacagaaaaagataactatatgtggagatgggacattttgcttgaccatagtaatcatttcactatgtatatgtatatcaaaacattcatgttgtacactttattgattgattgattgagacagggtctctcgctgttgcctcagctggagtgcagaggcatgatcacagttcactgcctgcttgacctcccaggctcaagcgatcatcccacctcagccccccaagtagctgggactacaggtgtatgctaccatgcctggctaatttttatagtttttgtagagatgggttttgccgtgttgcccaggctggtattgaactcctgagctcaagcaatctgcccgcctctgcctcccaaagtgctaggattacagatatgagccactgcgcctggccataccctttaaatatatacataaaaagaagaatgcctttaaaaattttccatttaacaattactctcagggccaaaactcactgtttaagtattttgctcttttactttgatcttggtgttctatgtagtgctaaaatatactttcatctccatatgactgcttgtaacaaaaagctgttcaccacattatgaactccctgaatacacacaataatcatatagtaaatgcttgttgaataaacaagacaaaattcatcagtttttatccttacttaattttttgaacttttccttgaacttctgttatcaaacttaatacatgaacaacagaaagatgctacggatctatgtagtacaaagtaaaatatgaaatttacacactaaatatttctgtagcatattttcagaagtaagtaattgaatataaacagaagcaagcatattctatttttttattatttaagtgggaaatattttaaaatcttatgtcatatttgctttagatttcttttaaagaattaaaacattacagatagagttgaagcctcatgggttattttaatgttttctacataaacatgtttccatatacataaaccttatttagaattttttcagtttatttatttatttttattattatactttaagttttagggtacatgtgcacattgtgcaggttacatacgtatacatgtgccatgctggtgtgctgcacccactaacttgtcatctagcattaggtatatctcccaatgctatccctcccccctcccccctccccccaccccacaacagtccccagagtgtgatgttccccttcctgtgtccatgtgatctcattgttcagttcccacctatgaatgagaatatgtggtgtttggttttttgttcttgcgatagtttactgagaatgaaattttttcagttttatacgtttatgtaagtggcaccatacagtacatattattttgcaacttgccttttttttttttgtttgtttgctcaatgttgtttttaggattttgatgtaactccagatctgcactgtccaatacaatagccactaactatctgtggctattgagtactggaaatgtagctagtccacattgagatgtgctagaaatatatttgtacatggaatttcaaatatttagtattaaaaacatgtaaaatatctcactaaaagtttagtatccctaagaatctgaaatagaaaatgctccaaaacccaaaattttttgattactgacatgactctcaaaggaaatgctcaaaggtttaatgcaaatattccaaaatctgaaaaaatctgatatattgaccacatatggaactgataatagtttggatgtattggattaaataaaatgtaaaaattttaccagtggtttccttttttaaaatatggctactagaaaatttaaatatatatttgaaatgccttacattatatgtctgttgggcagcactgatctatattgcccacttttcattcctgtttatttattattattttatttttatttttattttttgagacagagtctcgctgggtcgcccaggctggagtgcagtggtgctatctttgctcactgcagctgctgcctcccaggtccaagcaattctcttgccttggcctcccaagcagctgcgattacagctgtgcaccaccacacttggctaatttttgtatttttagtagagacggggtttctctgtgttggccaggctggtctcgaactcctgacctcaagtgatccacctgccttggcctcccaaagtgctgggattacaggtgtgagtcactgctcccagccttcactcctgtttagtattaagttatatagataatagtttgctactggtggatagttgttgttttttttttttacgaatttggtgctactaaagactgttctcatgagcattcttaaacatgtctcctttgcacatatgctagagtttctttctccctaatggttcttctgatttatacttccactggcagtttgagaatgttcttgttctgcagttcttcatcctggtcgatgtttttgtgtagataactgtaatttaatacttaaagtcaaaagcataaggaagcattggtaattatttaagtgaatataaaatgtcagcttatttttctcagtgaatcttttgtaatagtcaactcacattgcctattttttattgtagtgcttctgatctgaataaataaatttaaaatttaacagccatgttatgtatcttattagtaggcagctgcagttatgcaaccaaagaatgtcccatctttaagttccattagcttgaaaaagaaatggcagctttacgtcatggaatactgtgctgccactaaaaatgatgttttagaagaatatttaatgatgcagaaaaatattcacagtatcttaatggaaagaaaagattataaagcagtaaccatttcgttttgttaaaatcaggtctatgttagctttttttttttgagatggaatctcgctctgtcacccaggctaaagtgcagtggcgtgatctcggctcactgcaacctccgcctcctgggttcaagtgatgctcctgcctcagcctccctagtagctgggattacaggagcatgccaccacacccggctaatttttttgtatttttagtagagatggggtttcaccatgttggccaggctggtcttgaactcctgacctcaagtgatccacccgccttggcctcccaaagtgctgggattacaggtgtgagccaccgtgcccggcgagcatttccttacatgcttatctctggatggtcagattgtaggtaacttctattttgcacttcacactttttttttttttcttgagatggagtttcgctcttgttgcccaggctagagtgcaatggcgtcatcttggcccactgcaaactccgtgtcccgggttcaagcgattctcctgcctcagcttccagagtagctgggattacaggcgcccgccaccacacctgcctaatttttagtatttttagtagagacagaggttcaccatgttggccaggctggtctcgaactcctgacctcaagtgatccactcgcctcggcctcccaaagtgctgggattacaggcgtgagccaccgtgcccagcctgtacttcacacttttaatatttcattttctgtagtggatttactattaccagggaaggggaatgcaaggaggagggaagagttcttaacctaaaattttcatagttggaatattattataggaaagaagagattgaatgaggtgtcactgttcccatgtttaaagataagtcaattgggaggccgaggcaggtgaatcacgaggtcaggagttcaagaccagcctggccaatatggagaaaccccatctctactaaaaatacaaaaattagctgagcgtggtggcaggggcctgtaatcccagctactcgggaggctgagggaggagaatggcttgaacccagagggtggaggttgcagtgagctgagatcgtgccactgcactccagcctgggcgacagagtgagactttgtctccaaaaaaaaaaaaaaagataatactttccttctattcaatttcaggcttttcttaagttacaaatggaaccagccaaactatgttattgcttacccattgtttttccagcgttagaggagtttttcaaagaatattttttgatttagagattattttatttattatctatttagagattattcatcatttagagattgccatttaatttcagtaagagttccatttgcatctgatattttttagtttcggagaaaggaaatggtggagaaatggattcatctccaatcctttggaataaaattcagacagtttaagctctagtctcaacttgatttaatttggaattgcatgatgtggtgtcagatttgggttcacatccagttctcttgctgtgtaaccttgggaaatttacccagcatctgagttgtttcttcatgtgtgcagtggagacaataccaagatgaagatttcatgagatgtctagtgtagacatctatttttcagagtggatgcatttaacagttggatgctgaatttataagagtatggatttcataaaaagagcataaatttcatgatatgatgtatatatcaaaagatataggtcgggtgcagtggttcatgcctgtagtcccagcactttgggaagttgaagcggatggatcacttgatgccaggagttcgagaccagcctggccaacatggtgaaacttcgtctctactaaaaatacaaaaattagccaggcgtggtggtgtgtgcctgtaatcccagctacttgggaggctgaggcaggagaattgcttgaacccaggaggcagtggttgcagtgagccgattttgtgccactgcactccagcctgagtgacagattgagactccatcttaaaaaaaaaaaaatgatggctgaataggaacagctctggtctgcagctcccagtgagaccaaaatgtagaaggcgggggatttcttcatttccaactgaggtacccagttcatctcattgggactggttaggcagtgggtgcagcccatggagggtagcagaagcagggtggggcgtcgcctctcccggaagtgcaaggagcgagagatctcccttccccaagccaaaggaacccgtgagtctatgctatccggcacagatactacacttttcccatgatttttgcagtccgcagacccggagattccttagtgtgccaactccaccagccctgggtttcaagcacaaaactgggcatctgggcagacagtgagctagctgcaggagttttttttttttccccctcttcataccccagtggtgcctggaaccccagtgagatagacccattcactcccctggaaagggggctgaagccagggagctaggtggtcttgcttagcgggtcccactcccacagaacccagcaagctaagaaccactggcttgaaattctcattgccaacacagcagtctgaagctgacctgtgaagattgagcttggtgaggggaggggcgtctgccattactgaggcttgagtaggcagttttcccctgacagcactaaggaggctgggaagttcagactgggcagaactcaccacagcgtggcaaagtggctatggccagactgcgtctctagattcttcctctctgggcagggcatctctgaaagaaaggcagcagccccagtcaggggcttatagataaaactcacatcttcctgggacagataacctgtgggaaggtgcagctgtgggcgcagcttcagcagacttaaatgttcctgcctgctaggtctgaagaaagcagtggatcctgacaaggaggattctcctagcacagcacttgagctctgctaggggacagactgcctcctcaagcgggtccctgaccccagtgcctcctgactgggagagacctcccagcaggggttgacagacacgtcacacaggagagctcccgtgggcatcaggctggtgcccttctgggacgaagctcccagaggaaggagcaggcagcaatatttgctgttctccagcctccgctggtgatacccaggcaaacagggtcaggagtggacctttagcaaattgcagcagacctgcataagaggggcctgttagatgaaaaactaacaaatagaaagcaataatatcaacatcaacaaaaaggacccccacacaaaaaccccatcaaaaggtcatcagcctcaaagatcaaaggtagataaatccacgaagatgaggaaaacccagtgcaaaaatgctggaaattccaaaaacccgaatgcctcttctccttcaaatgaacacagctcctctctagcaaggccgcaaaactggacggagaatgagtttgacgaattgacagaactaggcttcagaaggtgggtaataacaaactcctctgagctaaaggagcatgttctaatccaatggaaggaagccaaggaacttgataaaaggttacaagaactgctaactagaataaccagtttagaggacataaatgacctgatggagctgaaaaacacagcacaagaacttcgtgaagcatacacatgtatcaatagtcaaatcgctgaagcggaaaaaaggatatcagatattgaagatgaacttactgaaataaggcatgaagacaagattagagaaaaaaggttgaaaaggaacaaacaaagcctctgaaaaaatatgggactatgtgaaaagaccaaacctatgattgattggggtccctgaaagtgatggggagaatggacccaagttggaaaacacacttcagggtattatccaggagaacttccacagcctaccaagacaggccaacgttcaaatcaggaaatacagagaacaccacaaagatactccttgagaagaccaaccccaagacacataatcgtcagattctccaaggttgaaatgaaggaaaaaatgttaagggcagccagagagaaaggtcgggttacccacaaagggaagctcccagaggaaggatatctgggcagaaaccctacaagccagaagagagtgggggccaatagtcaacattcttaaagaaaaaacttttcaacccagaatttcacatccagccaaactaagcttcgtaagcgaaggaggaataaaatcctttacggacaatcaaatgctaagagattttgtcaccactagacctgccttataagagctcccgaaggaagcactaaatacagaaaggaaaaactggtactagccactgcaaaaacattccaaattgtaaagaccatcgacactataaagaaactgcatcaactaacggtcagaataaccagctagcatcataatgacaggatcaaattcacacataataatatgaaccttaaatgtaaaagggctaaatgccccaattaaaaggcacagactggcaaattggataaagagtcaagacccattggtgtgctgtattcagaagacccatctgatgtgcaaagacacacataggctcaaaataaagggttggaggaatattaaccaagcaaatggaaaaaacaaaaaaaaaaggggtgttgtaatcctagtctctgataaaacagactttaaaccaacaaagttcaaaaaaggacaaagaagggcattacataatggttaagggatcgatgcaacaagaagagctattttaaatgtatatgcttccaatacaggagcacccagattcataaagcaagttcttagagacctacaaagagacttagattcccacacaataatagtgggagactttaacaccacactgtcaatattagacagatcactgagacagaaaattaacaaaaatattcaggacgtgaactcagctctggaccaagcagacctaatagtaacctacagaactctctaccacagatcaacagaatatacgttcttctcagcacatcacacttattcactcaaaaccccacaactacatggaaactgaacaacctgctcctgaatgactgctggtaaataacgaaattaaggcagaaataaagaagttctttgaaaccaatgagaacaaagagacaacgtaccagaaatctctgggacacagataaagcagtgtttagaggggaatttatatcactaaatgcccccatcagaaagcaggaaagatctaaaatgaacaccctgatatcacaattaaaagaactagagaaaaagagcaaacaaattcaaaagccagcagaagacaagaaataactaagttcagagcagaactgaaggagatagagacatgaaaacctctccaaaaatcaatgaatcaaggagctggttttttgaaaagattaacaaaatagaccatgagccagactaataaagaagaaaagagagaagaattaaatagacacaataaagaatgataaaggggatatcaccactgatcccacagaaatacagactaccatcagataatattataaacacctctacgcaaataaactagaaaatctagaagaaatggataaattcctggaaacatataccctcccaaggctaaaccaggaagaagttgactccctgaatagaccaataacaagttctgaaattgaggcagtaattaatagcctaccaaccaaaaaaagcccaggagcagatggattcacagccgaatgataccagaggtacaaagaggagctggtaccattccctctgaaactattccaagcaatagaaaaagaaggattccttcctaactcattttatgaggcaagcatcatcctgataccaaaacctgtcagagacacaaccaaaaaaggaaatttcaggccaatatccctgatgaccatcgatgtgaaaatcctcaataaaatactggcaaacagaatccagcagcacatcaaaaagcttatccaccattatcaagtctgcttcatctctgtgatgcaaggctggttcaacatacgcaaatcaataaaagtaatcaatcacataaacggaaccagtgacaagaaccacatgattatctcaatggatgccgaaaaggccttcgataaaattcaacaccccttcatgctagaaactctcaataaattacgtattgatggaacatatttcaaaataataagagctatttatgacaacccatagccagtatcatactgaatgggcaaaagttggaagcattccttttgaaaaccagcacaagacaaggatgccctctctcaccactcctattcaacatagtgttggaagttctggctaggcaagagaaagaaataaaggttattcaaatagcaagacaggaaatcaaattttctctgtttgcagatgacatgattgtatatttagaaaaccccatcatctcaacccaaaaactccttgagctgataagcaacttcagcaaagtctcaggatacaaaatcagtgtgcaaaaatcataagcattcctatgtaccaataatagacaaacagccaaattatgaaggaactccctttcacaattactacaaagagaataaaatacctaggaatgcaacttacaaggggtgtgaagggcctcttcaaggagaactacaaaccactgcttgaggaaataaggacgcaaacaaatggaaaaacattccatgctcatggatgggaagaatcaatatcgtgaaaatggccatactgcccaaagtaatttacagagtcaatgctattcctatcaagctaccattgactttcttcacagaactaggaaaaactacgtagagccaaaacaatcctaagcaaaaagaacaaagctggaggcatcctgctacctgacctcaaactatactacaaggctccagtaaccaaaacagcatggtactggtaccaaaacagatatatagaacaatggaacagaaccgaggcctcagaaataacaccacacatctacaaccatctgatcttcaacaaatctgacaaagacaagcaatggggaaaggattccctgttttataaatggtgctgggaaaactggctagccatatgcagaaaacagaaactggaccccttctttagagcttatacaaaaattaactcaagatcgattaaagacttaaatgtaaaacctaaaaccataaaaaccctagaagaaaacctaggcaataccgttcaggacataggcatgggcaaagacttccatgactaaaacaccaaaagcaatggcaacaaaagccaaaattgacaaatgagatctaattaaagagcttccacacagcaaaaaaactatcattggagtgaacaggcagcctacagaatgtgagaaaatttttgcaatctatgcatctgacaaagggctaatatccagaatctacaaggaacttaaattacaagaagaaaacaactccatcaaaaagtgggtaaaggatatgaacagacatttctcaaaagaagacatttatgtggccaacaaatgtgaaaaaaagctcatcatcactggtcattagagaaatgcaaattaaaaccacaatgagataccatctcacgccagttagaatggcgattattaaaaaggcaggaaacaacagatgctggagaggatgtggagaaataggaacacttttacacttttggtggaagggtaaattagttcaaccattgtggaagacagtgtggctattcctcaaggatctagaaaccagaaatacaatttgacccagcaatcccattactgggtatatacccaaaggattataaatcattctactataaagacacatgtacctgtatgtttattgcagcactatttacaatagcaaagacttggaaccaactcaaatgcccatcaatgacagactggataaggaaaatggggcacatatacaccatgaaatactatgcagccataaaaaagattgagttcgtgtcttttgcaggtacatggatgaagctgtaagccatcattgtcagcagagtaacacagtaacagaaaaccaaacactgcacgttctcactcataagtgggagtcgaacagtgagaacacatgggcacagggaggggaacgttacacattggggcctgtcaggggttggggggcaaggggagggagtgcattaggacaaatataatgcatgtggggcttaaaacctagatgatgggttgataggtgcagcaaaccaccatggcacatctatacctgtgtaacaaacctgcatgttctgcacatgtatttcagatcgtaaagtaaaaaaaaaaagatatggaagttactatgcgcgttaataaaatatgtttatacctcctcccttaggtgtctattatgtagaacaagtttattacattctaatgataaagtaaacactctgttttcaaaggtggtgttatacgtttgtgtatcttttgccccgggcatgatgatttcatcgtttgtgtaataaatttaatactaccatagtctccccttattcacacgggataagttccaagaccccaatggatgcctgaaactgtggatagtactgaatcctatatacacttatgtttttttcctgtacactcatatttatgataaagtttaacttataaattgtgcacagtgagagactgacaataactataataaaatagaacaattataacaatatactgtaataaaatttatgtgaatttggtttcaaaatatcttattgtactgtactcacccttatgatgatgatgttagatgataaaatgcttatgtgatgtgatgaaggtaggtgaattatgttaggcattgtaatgcagcatgaagctactattgaccttctggtgttacatcagaaggaggatcatctgcttgggtggtcctgaatcatcacgtcctgatgatgtctgttgctggttgtcaggagcagacagtgtccatgactaatgggcaggcagcgtatatagcatgtatacactggacaaagggatgtctcatgtccacggctggacagagcaggagagtgcaagattttgtcacactactcagaatcgtgcagtttaaaacttaccaattgtttatttctggaattttccgtttaatatttttggactgcagttgaccacaggtaactgaattcatggaaagcaaaacaaccatggacaaagtgggattactgtattatttcagattttaattagcatttttcaaaactctgtctagctagtgcttgcattgtagaatttgtctgatttcatttttattgattagggaaataagctttatttttatctggagtgatttgtttctttgtgcttcctcaaaattgagtagtggctactgagtatatatcgaaaaggaaataaattattatgtcaaaaagatacctacatttgtatgttgattgtagcactgttcacaagattaaagatatggaatcaacctaagtgatgaagaaaattggtgtgtgtgtgtgtttgtgtgtatacatacacactgtggaataatactattcagccacaaaaaagaaaaaaaaatcatgtcttttgcagcaacatggatgggactggaggccattatcctaactgaaataactcagaaagtcaaatactacatgttctcacttacaggtgggaacttaaatggttacacatagaatagagtagaataatagacattggagactccaaaaggtgagagggtggcaggggggtgagggttgaaaaattacctattgagtactttgttcagtatttgggtgatgggtacactaaaatcccactttaccaccatgcaatatatgcatgtacgaaatctgcacttgtaccccctaaatatatacaaataaaagttttttaaaacacttagtaaatagcctgtcatagggaataattgaaaccatttcgtatctcactttaaaacctttaggctgggtgctgttgcttatgcctataatcctagcactctgggaggccgaggtgggtggatcacctgaggtcaggagttcgagaccagcctggccaacatggcgaaatcccatctctactaaaaatataaaaattagccagtcatggtggcacacgcctgtaatgccagctccttgggaggctgaggcgggaaaatcacttgaacccaggaggcggaggttacagtgagccgagatcacaccactgcactccagtctgggcaacagagcgagactccatctccaaaaaaaaaaataaaaataaaaataaaaaacctttttagttctgtttcaatgttatcttctttttatttaattatttttggaataagaaataatatttatatggtttgaacaccaaaaggtataaaagatatttttaaaggtataaagtataaaagttagaaatttcccccacttccctgttctctgttcccacagctgccagcagcttaccaccccccagcccaatcactgctactgatgcctaacctatctttccagagttctttgtgtgttcagtagcagttaaccacagatctttaatcattcccctttataccataaaaggtggcatgttatgtacacttgcctcccctttgctttttccacttaatgtgtcttgagaagctttccatatatcagtacatggaaaactttcttatattgttttattttaaatttatatacaataaatgcatggatcagaaaaataattgaatagtgggccccaaattaaatgattactctaatgatttgtagatgggtttagttaaagcactgggatatttagctacaggtataggaatgcatgattattttctgtcaggaaacctagattttgttcttctccccttctttatcaaaggtgaaatcagactcttatttaaaccaggattaagtattctttgcataataatatatatttgctttcccaagttattcttcaggaaagtcttgactctctagcaaactttgtttcttaaaatggaggttagcaggtgttggaaataaggtgagagttttaacacttaaaggaaactatataaagattagatatagtcagaaatttagaaaacattaggaaattcacagagagatggatcccccttttctaccctagattacccctgggctgcttaatggcttgtctttactattagattgtgagctccttgaggtcaggttttatctgttttttatttcaataccaagtgccaagaatatattcagcatttggtgtaaatattataaaatgagtaaatgaatgtgctcttgaatagaagttaactctgattttgggttaagtcccccgccccctttttttgagacagtctcactctatagctcaggctggagtgcagtagcgcagtctcagctcactgcaacccccttctccggggttcaagcaattcttatgcctcagcctcccaagtagctgggattacaggtgtgtgccaccacacccggctgatttttgtatttttagtagagatggggtttcaccatgttggccaggctggtcctgatctcctgaccttaggtgatctgcctgccttggcctctcaaagtgctgggattacaagtatgatctactgcgtctggctgattttgtgttaaaatcctttatgtcagttccagaagaggttaaatggaagttttcgaggcaagagatacttgtgaatttgacatgagtggcctttgttttgaaattttaatgctacacagatgctgtaaaaggattttttcaggccgggcgcggtggctcacgcctgtaatcccagcactttgggaggccgaagcgggtggatcacgaggttaggagatcgagaccatcctggccaacatggtgaaacctcatctctactaaaaatacaaaaattagccgggcgtggtggtgtgcgcctgtagtctcagctactcaggaggctgaggcaggagaattgcttgaacccgggaggtggaggttgcagtagagccgagatcgcgccactgcaactccagcctgggccacagagcaagactccatctcaaaaaaagggtttttcaaaaaatcatgtacaattagaaaattgtgtctcttaaatctatttgcttatgttattaatcccagattatgactgttctttcccctaaggcattagcctgttgaaagaaacagacctataggacttttgttgatgttaaagccagaccagaaatttagaaaatcaggatatttgccattttgataagaaaaccatttaatagttgaatataggaatttgcattttgagagtgtgtactaatttagattctccaggaatagaaccatcatctgaaaataaataagtttaaccagacggacaaggagtgatatgtagttttaggtggtaagactgtgatattgttaggttacatgtatctagggcaagatgctcaaatacaataagtatatacagactaggaactctagttgtctttttttaattaatgaaaagagggttttatgcttcatttctaaacattctcaaaggaatttatgttttgttgatgatctttttttatttatataaatttacgggggtacttgtgcactttttttttaaacatggatagattacagagccgtcaagtcaagcctttagagtttccatcacccaaataacacacattgtattcattaagtaatttctcatgatctcccacctcctgctctctcacctttccaagtctgttatctatcattccatgctctacgtccatgtgtacacatttttcagcatccacatgtgaatgagaacatgtgttattcccaccaacagtgtatgagtgttcccttttctctgcaacctcaccaacttgtgttattttttgtctttttagtaatagtcattctaactggggctggatgatacctcattgtgggtatttttaaaataaaaaaaaatttgtgtgtacataggtatatttatttatggggtacatgagataatattgatacagacatacaatgttcaataactacatcagggttgtatccatcaccaagcatttatcctttcttggtgttagaaacaatctagtttctaatctctaatagtttctaatctctagtagttatattaaaatgcataatgaattattattgactgtagtcaccccattgtgctatcaaatgctaggtcttattcattctatctaactatatttttatacatattagccatccccactgtgccaccatccccattagtgccctggcccccactacccgtcctagcctctggtaaccatcattctactctctatctctatgagttcaattgttttgatttttagataccacaaataagtgagaacatgtgaagtttgtttttctatgtctagattatttcacttaatataatgacctacagttccatccatgttgttgcaatgacaggatctcatacttttttaagggctgaataggactccattgtgtatgtgtaacacattttctttattcgtccgtctgttgatggacactcaggttacttccaaatcttggttattgtgaatagtgctgcagtaatcatgggagtgcagataactctttgatatactgatttcctttctttggggtacatatttagcagtggaattgctggattatatggtagctctctagtttttttttttttttttttttttcatttttgagacagggtctcactctgttgcccaggctggaatgcagtggcggaggttcacttcagcctcaacctcgcaggcttaggggatccacccacttcagtcttccaagtagctgggactataggcgcataccaccatgcccagctaggtttttgttgttgttgttgttgttgttgaggcagagtctcactctgtcacccaggctggagtgcagtggtgcgatctcggctcactgcaacctctgcctcctcggttcaagccattctcctgccttagcctcccaagcagctgggattacaggcgcccaccaccatgcctggctaacccagctagtttttaattgttcgtagagatggggtttcaccatgttgtctagactggtctcgaactcctcgactcaagtgatcctcctgcgttggtgtctcaaagtgctgggattgcaggcacaaggcaccgtgcctggtcagaatttttttttaagggtttctcctttgtaaatttcttattcatatcttgaattgattttctgagtttcttgtattggttttcagacttttcttgcatctcagtgacccttaaaatcaatattttgaatattttatctgggattttgtggatttcattttggttaagatctgttgctgcagaatcgtgttcctttgacagtgtcatattaccttggtttctgatgtttcctttgtcttttcattgatttctgtgcatgtgctgtaacagtcacttcttatctttgaatttactttcatggtgaggggagatttcttcctgaagatgtgactataatgttggttgggccttgcttctgggtgcgtgcagtagtgaagtctctgtatgatttattttgagacagctctgttgcccaggctggagtgcagtggcacattcatagcttgcttcagcctcaaagtcctgggcataagtgatccttctgcctcagcctcctgagtacctaggactacaggcgtgtgccaccatgcctggctaattttcaattttcttttagagatgggggtctcattatattgcccaggctggtcttgaactcctggtctcaagcaatcctctctccttggcctcccaaaatgttaggattacaggcatgaaccaccgtgcccagcctctgtatgatttctttggctataaatagcattaatggtgtctgtggtttccttgatgtcttagcttgagtttatttgtggaggctgaagttgcgctggggattggaatgcctaataggcctgtctttaggtttcaatggtagtgatggtgggctaagcatgtctatccatgtgccctggggcagtgtgtgctggtaactgtgttggcagttccaggcaggctgattcttgggcttctgagtgactttctcagatgcctgttgtaatggtgtaccaggtgggtgagctggctcttgagctcctgggcaactggcatggcatagtttatggtggtagtagttttgttgagatactcttgtgggtcccaagcactttgcatttgtgttagcagtggttacaatgagatccaggccagtaaggtggtacttgcaggcatgaggcagctgaggcggtactggtagggtgttatccctgacctctgtcccctgggagaagtactctggtgtttcagagtgtttcaggtagtgggtttggttgtggaatcccctggtaacctggatcctgcactgtttctcagccaggtcaaagcctggtagagctggactgggaaagcttgcactcaggcccccacagtggtgtaatgtcatgataggcggggtggaatgatcttcaggctgctggcaaaatgcttgggtgagggatgagtgccactgctgagatcctgccatggggaagttgggcctggtcccaggagtgagttgtgttcctttcatgccccagtccaggcggagttccttcctcttgtccctgctgttcagtcagaactctgcagttcttgcctagtccctaaatcatcccagggtcgggtcatataagccccatccagctcaagacttaagcctccagggcaattaatcgtgctcaaatcctgggggtggtgtttgcttctagcactggtggtggctgcatcccacaccaggcagagccaccccatccccgcccctactcacactctgcctctccaaacagcagcccaagtttccctaatggctaggactggccctgttgcttccccgtactgctcacagttatgagctgagatcctgcatcgtgtcttgttacagctgcttaggtttcaaaaatggcatgggacacagaatgtgttccctccctgaaacagttctttctcacagtcttccagtcattccctaaattaattagattcagggcttaagagggtcagggtgctctactgaggactggattgtatggtagtggaccacagaaaaatactcaccctctcccatattggggaatcacttctggttccctgtgggtcccagccacacaggctctctgttttccttttgcttcctagattttggtttttgctgtcgcttttctgttgaactcctgtgttccctctgggataatatatccaaagtgtcattgtctacacaattttagctcttgtacctggatgaggcacgcttgaaattcttgcagtcatccatcttttcctgatcttgtttcttctgccccattccccaggttcctccagggtctcacagttcccctgtatgtgggaaaggcagttttctttctgcccaatcctgcttctcctttgtccacccagatgaggtttccgctagaattgctacttaaagtggttctgtggaacattttgtagcagagaaaatcagggctgagggagcaccataaaggttagaaaagattagaacattaggttagaaaatctgaactactctacctgtcttgattaggaggattagagttgatgttggatgggtttgttggtttattttccacttatctatcagaatgaagaacttactgccttttcttcttagttggtctaatatttatcactttaattatttttaagtgtacaattcagtggcattaaatatatttataatgtatcatgatcattactacctatgcccaaaactttttcatcatccccaacaaaactctatatccaaaaaaaaataaaaccctctatatgtacatggaacaattaagttgggcccctatcttgcaccatataaaacagttaaatgcatcaaagatcttaacgttaacagctaaaattataaaactcttagcagaaaacatttgggctgattttcatgacctgggatttggcaatgatttcataaacataatgtagaaagcacaggcagcaaaagaataagtaagttggacttcattaaaaatttaaaaatttttttacatcagaggtcactatcggctggatgtggtggctcacacctgtaatcccagcactttgagaggctgaggcgggtggatcacttgaggtcaggagttcgagaccagcctgaccaacatggtgaaaccctgtctctactaaaaatacaaaaattagctgggcatggtggcgcgcacctgtagtcccagctacttgagaggctgtggcaggagaatcacttgagcatgggaggtggaggttgtagtgagctgagatcgtgccactgcactagaacctgggcgagagcgcaagactccatctcaaaacaaacaaacaaacaaaatgaagcaatcccccccccaaaaaaaaggtcactatcaagagaataaaaagaaagacaactcagaatgggagaaaatatttgcaaatcatatgactgatgagggtttaatatccagaatgtgtaaagaacttttactgagcagcgaaaagaaaacccaatgaagaaatgaacaaaggccttcaagaaatgaacaaaggccttcaatagccatgactttacttttttaaatttaaatttaaattttttgagacaaagtcttactctcttgcttgggctggagtgcagtggtgtgactgtggctcactgcagccttgatctcccagactcaagtgattctcctacctcagtctctggagtagctaggatgacagactcacactaccacatgtgactttgtgtgtgtgtgtgtgtgtgtgtgtgtagagacagggtctcactatgttgctcaggctggtcttgacctcctgggctcaagtgagcctctcacttttatttttatttgtagtagagatgagatcttgctaatgttccccaagctggtctcgaactcctgagctcaagcaatcctaccttcctcggcctcccaaagggctgggattataggcgtgattcactgtgcctggcctagtttctttgttttaatttttttcctccccatttgtcttttgagtttccctgagaatctgtcttgctgctgtctcagttgtcattcactgttattacactggaaccctattgatgtagtggtaaggaattagggaggggaagtgttttgtaatctcatgattaaatgtcatttcttttttttttaattggtcctgagtccctgaattgtgactctcagaagtgtttcttagcccttgccctcccacttagatgagacaggaaggctataagcctcgggggttttctaattgtctttcctcttggtagataatggtgtgagcatatttgaatatagtttctttcctctcctcctgctcaaggcacaaggaaattttcctcaaatatttgcagtgaaaacatactaaaacccttgtaggattcctggaggtaaaacctaggaaagtgtaggggcccctctaagactgggatgtcaggatttttaaactctcaaactaatccatatttggcctccagaagttgtcagtttctacttgagtgtttctgttctaggaaagctgtgatattctgtatctgtctttctagttttttttggtggtggtttgccttgtgacctcagtttttggattgatctaagataaattactgattttcagttttctcagcgttttttcttgtcaggatagaagtgaggacctccaaaatccttacatattatagctgcctggtgagttttgtttgtttctttttttaaaaattttttttttttttttttttttttgggatggagttttgcgcttcttccccaggctggagtgcagtggcgcaatctcggctcactaaaacctctgcctcccaggttcaagcaattctcctgcctcagcctcccaagtagctgaaattacaggtgcccgccactatatctggctaattttttttatatttttgatagagatggggtttcgtcatgttggccaggctggtcttgaaatcctgacctcaggtgatctacccacctcggcctcccaaagtgctgggattacaagtatgagccaccttgcctggcccgttttttcttacttttagtaaaaataacctcacgtaaactgtcataggtgtctgtgggcttatttttgatgttctcctttgttggaaattcttgtgaaataccttccaggtcttagtctttgtgaggatcaggttctgctttcaattggatgttttaagaattagttttaaaataatttgtttttcttattattagcaccctatgtttagttgctgtacttatttggatagtgtggtaagcacagtggcttaggcatgagaaatataactagagatctcataattttatgtgtttataaagtgttttatttaaaaattaaataattgcaaatgagtggataaagaaactgatatatatatatctgattatatatatatatatctgattatgtatatatatctgattatatatatatgatggaatactacccggctataagaatgaatgaattaatggcatttgcagtaacctggatgggattggagactattattctaagtgaagtaactcaggaatggaaaaccaaacatcgttatgttctcgctcataagtaggagctaagctataaggatgcaaaggcataagaatgacacagtggcttttggggactcagagggaaagggtaggaaggagatgagggataaaagactacaaattgggttcatgtgtactgcttgggagatgggtgcaacaaaatctcagaaattaccactaaagaatttactcgtgtaaccaaataccacgtattccccagaagcctgtggaaataaaaaattaaaaaaattgcaaatgtaaataagacagtaacaaagatggcaaagaacaaagatgaaaaagtatgctgtattacctgaaagtgcttttatggatatcttagcttatccttcgtccatttaaatattgttagttttagccgggaacatgcctgtaatcccagcaccttgggaagctgaggcgggcagaccacttgagaccaggagtttgagaccagccaggccaacatggtgaaacccgtctctactgaaaatataaaaattagccgggcgttggggcgcatacctgtaatcccagctatttaggaggctgaggcaggacaatcacttgaacctgggaggcggaggttgcagtgagacgagattgtgccactgaactccagcatgggtgacagagtaagaccctgtctccaaaaaaaaaaaaaaaaaaaaaagacacaaaagagaaacaaaaaaaacatattgttagttttgatgattatctactagggtaagtacttttctactcattaaattccattagtgactgtgccttgatttccctgaaaggatgcagtatagagtaggcttttgattggagatagacttcctgattttccacttagtatttaggagtgaaaattattattattattatttattgttttttttttttttggagacagggtgtcactgtatcgcctaggctggagtgcagtggcttgatcctgactcactgtagccttgacttcctagggtcaagcaatcttcccacctcagcctcctgagtagctgggactacaggcacgtgccaccacagccggctaatttaaaaaaattctgtagagatgggatctcactatgttgttcaggcttgtctcaaactcttgggctcaaatcatcttcccacctcagcctccctaagtgctgggattataggtgtgagccactgcacccagccggaagtgcaaattatttaactcctttattttattcagcaaataaatgtctttctgagcctcagtttcctgtaataaggttcttataagttttaaatgaggtcagtgtgcattaaatgtacatgttagaatttggtaaggttagtaagaaaaccaaagacatgtggaccctttacaaaaaattccagcatttaccctaagagatgctttttaagtggttgaaatttggtggcatggaggaaatgtatatgggctcgtatcacatttgggagtaaaattaaggcatgaaatttaaacaaaaaataaaattgtgggtacatagtaggtgtatatatttatgggatttatgagattctgagacaggcatgaaatgtgtactaatcacatcatgtaaaatgggctgtccatcccctcaagcatgtatcctttgagttgaaaaacaatccaattttattctttcaggtattaaaaaatgtacaattaatttaatacagtaaataatacattaatttgatctcaaactcctgacctcaaatgattaattagattaattaatgtattatctattatttattatatacaccctgttgtgccatcaaatactaggccccccccccccttttttttttttggagacagagtcttgccctgtcgcctaagctggagtgcaatggtgcgatcttggctcactgtaacctccgcctcctgggttcaaatgattctgctgcctcagcctcccgagtagctgggattacaggcgcccaccaccaagcccagctaatttttgtatttttagtagagacggggtttcaccatgttggccaggctgctatcgaactcctgaccgcgtggttcgcccgccgcggcctcctaaagtgctgggagtacaggtgtgagccactgcgcctggccaaatactaggtcttattcatgctttccaactgtttttttttttgtacccattaaacgtcaccacatcttgccccccctcgcacttctcttttctttctactctgtgtctccatgagtttgttttgatttttagattccacaaataagtgagaatatgcaatgttggtctttctgtgcctggcttatttcacttagcataataacctctagttccatccatgttgttgcaaatgacgggatctcattcttttttatggctgaatagtagtccattttgtgtaactaccacattttctttatccattcatctcttttgatggatacttaggttgcatccaaacctggctattgggaacagtgctgtaataaacatgggaatgcaggtatccctttgatatgctgatttgctttatttctggtgtatacccaagcagctggattgctggatcatatggtagctcaatttttagttttataaggaacctccaaactgttcttcgtagtggttgtcctatttcacgttgttgccaactgtgtatgaggattttcttttctttacatcattgccaacatttgttattgcctgtcttttggatataagccatttcaactcaggcaagatggtatctcatggtagctttgatttgcatttctctgatgatcagtgatgtagaatgctttttcatatgcctatttgcaatttgtatgtcttcttttgagaaatgtgtatccacattttttgcccatttttgattggattattagatttttattctgtagagttgtttgagctacttacatattctggttattaatcgcttgttagatggatagtttgcaaatactttctcccattctttgggttgtttgttcactttgttgattgtttcttttgttatgcaaaagctttttaacttgatgtgatcccatttgtcaagttttgtttggttacctgtgcttgtggggtattgttcaagaaaattttgcccagactaatggcctagagagtttccccaatgttttcttgtagaggattcataaattgaagttttagataaaattctttaatccattttgattttatttatgtatagagcaagagataggagtctagtttctttttctttttttttttttgaggtggagtttcggctcttgttgcccatactggagtgcaatggcacggtctcagctcactgcaacctccgtctcccaggttcaagcgattctcctgcctcagcctcccgagtagctgggattacaagagcccaccaccatgcccgtctgatttttgtatttatttatttttatttatttatttatttatttatttagttttttgagacggagtcttgctctgtcacccaggctggagtgcagtggcacgatctcggctcactgcaagctccgcctcccgggttcacgccattctccagcctcagcctcccgagtagctgggattacaagagcccaccaccatgcccgtctgatttttgtatttatttttatttatttatttatttatttatttatttatttatttagttttttgagacggagtcttgctctgtcacccaggctggagtgcagtggcacgatctcggctcactgcaagctccgcctcccgggttcacgccattctccagcctcagcctcccgagtagctgggactacaggcgtccgtcactgtgccggctaattttttgtatttttattagagacggggtttcaccgtagccagaatggtctcgatctcctgacctcgtgatccgcctgccttggcctcccaaagtgctgggattacaggcgtgagtcattgcgccaggctaatttttgtatttttaatagagaccggatttcaccatgttggccaggctggccttgaactcctgacctcaggtggtctggccgtctcggcctcccaaactgctgagattacaggtatgagccactgcacccggcctggagtctagtttcattcttctgtatatggatatccagttttcccggcaccatttatttatttatttttatttattttatttttttttgagacagagtctcattccatcacccaggctggagtgcagtggtgtgatgtgggctcactgcaacctctgcctcccggattcaagcagttctcctgcctcagcctcccgagtagctgggattacaagctaatttttatattttgagtagagatggggtttcaccatgttggccaggctgatctcgaactcttgacctcaaatgatccacctgcctcggccccccaaattactgggattacaggcgtgagccaccgtgccgggccagcaccatttatttttattttattttacttatttttttgagagtgagtctccctatgttgcccaggctggagtgcagtggtgctatctcatctcactgcatgcagcctctgcctcctgcgttcaagcgattctcctgcctcagcctcccaagtagctgggattacaggcacccaccatgatgcccagctaatttttgtatttttagtagagacggggtttcaccatgttggccaggctggtctcaaactcctgacctcaggtgatccttccgccttggcctcccaaagtgctgggattacaggcatgagccaccatgcccagcctggagtctagtttcattcttccgtatatggatatccagttttcccggcaccgtttacttatttatatttatttattttattttttttgagacagagtctcatttcatcacccaggctggcgtgcagtggtgtgatctaggctcactgcaacctcttcctcctgggttcaagcaattctcctgcctcagcctcctgagtagctgggatgacaggtgtgtactaccaccatgcccaactaatttttgtatgtatgtatgtatgtatgtatgtatgtatgtatgtatgtatgtatgtatttgagacagaatcttgctcttttgtcgaggctggagtgcactggcacgatctcggctcactgcaacctccgcctcccaggttcaagcgattctcctgcctcagcctcctgaggagctgggattacaggtgcatgccaccacgcctggctaatttttttttcgtatttttagtagagatggagtttcaccatgttgcccaggctggtctcgaactcctgaccttgtgatctgctcacctcagcttcccaaagtgttgggattacaggtgtgagccagcgtgcctggccccagcaccttttattttatttattttatttatttttctgagagtgagtctcactgtgttgcccaggctggagtgcagtggtgctatctcccctcactgcaacctctgcctcctgggttcaagtgattcttctgcctcagccttccaagtagctgggattacaggtgcctgccaccatggctggctaattttttttttttttttttttttttttttagcatagatggggtttcaccctgttggccaggctggtctcaaactcctgacctcaagtgatccgtctgctttagccttccaaagttctgggattacagatgtgagccactgtgcctggccccagcatcatgtattgagcctttttcttttccccagcatatgttctcggcacctttctagaaatagaaaatgagttcaccgtagatgtgtggatttgtttctgagttctgtattctgtccattggtttatgtgtctgcttttatgccagaatcatgctgttttggttactataactctgtggtataatttgaagtctgataatgtgattcttccagttttgttctttctgcttagtatagttttgggaattctggaacttttgtagttccgtgtaagttttaggattgttttttctatttctgtgaagagtgtcattggtattttgatagggattgcattgaatctatagattgctttggatagtatggacagtttaacaatattgattcttccagtccatgaacatgaaatatctttacattttttggtgtcctcttcaatttcattcagtttgcttttcagattggtcactgtcgatgtttagaaatgctgctgatttttgtatattgattttttatactgacagtttactgaatttgtttatccgttctaatagtttttttgtagagtctgtaggtttttctaaatataagatcatatcatctgcaaataagggtaatttgacttcttcctttcccttatttctttctcttgtctggttgctgtagctaggacttccagtagtaccatgttgagtaactgctggaagtgggcattcttgtcgtgatctggatcttagaggaaaggcgttcagtttttcccctcagtttgataccagttgtgggtgtgttgtatatggcttttattatgttgaggtatgttcctcctaaacccatttttttgagggtttttatcatgaaggaatgttgaatattatcaaatagtttttaagcatcaattgatataatatggtttttgttcttcattctgttgatatgatgtatcacattgatttgcatatattgatcccctcttgcatccaagggataaactccacctggttacgatgaatgatctttttaatgtgtctgatttgctagtattttgttgaggatgtttgcagcaatatttatcagagatattggcctgtcattttctttttttgatgtgtttttgtcaggttttggtaacagggtaatactggcctcacagaatgtgtttggaagtattgcttccttttattttttggaatagtttgagtaggaatagtattgatgcaggaattttctcggcccctttgttggacttgtgacaggggcgaatgtttactcagcctgccgtgctcaaccccttgttggagggtgcatgtgagtgagtgagtgcgggacctggccagctggtgggggcactgacacagcagcaagccctgtgcagggaccacggccagaccaggcacaagcgagtgagtgtgggacccagctgttctgagcaccagcaggagcaggcctgtgcacagcacccaggttgatggggaggggggtggtgtctgtgaccccgaggcccctgagggggtgttaacagtgctcctttagttctgctgtctgctgatggctgtgtgttaacaagttggcctcttgccttgtcatgtggggtggctgccctccactggtgagggcaaagggctggtgtgacagtcttttttgggtacctgcactcagtgggtcctgagctcttgtctggcatccaagaagaatgaggttgagtggacacttgaaggatggtgaaggtgaagaattttattgagcagtgggaatggctcagtggagaggggagctggagaggggatgggaagggctgatctccctgaagtccggccgtttcttccctaagtcatgctgtctcctttcccaaagtttggccatcttctctccgaaattaagctgtttctctcctctctaccaactgaatctggggtctttataagcataggatcctctttataagcacaggatgggggcggggcaggctgtagaagttttggaaaaggcaacattctattggtaaagagacattattcaaacagaaccaatcgggagagagcggacaaacaggaatagaagttttcactttgggctgtgggtttcaggctttttggcttgaacgtggggtttcaccagggactgcccttgtcttcctagaatttctctgcctcctgcctctatcagtattagatcttctttaaatgtttggtagaattcagcagtgaagccatcaggtcccaggcttttatttactgggagaatttttattatggtgtcaatctcgttatttgttatagctgtgttcaggttgcagatttgttcatggttcaatcttggtagattgtgtctaggaatttgtccatttcttctaggttttccagttcattagcatatagtttttcatagtagccatgaatgaacctttttatttctgcagtattggttatcattgtaatgtctccattctcatctctggtttatatatttggatcttcttttttttttctttttttttttttactctggccaaaggtttttaaattttcttttaacttttacaaaaaccaacattttgttttattgatattttgtattattttctttatttcagtttcgtttgcttcactctgatctttattatttcttctaattttggggttggtttactcttgcttttcttattctttaagatgtgttgttaggttgtttatttgaagtatttcttcttttttcatgtaggcactcacagctataaacttcccttttagtaatgcttttgctgtatcccataggttttggtatgttgtgtttcagtatcatttgtttcaatgaattttccaattttcttcttaatttttgcattgacttactgatcattcaagaacatattgtttaatttacatgtatttgtatacttttcaaaatttctcattattgatttctagttttattccgttatcagaggagatgcttgatattatttcaatatttttaatgtcttaagacttgttttgttacttaacatatgttctatccttgagaataatccatgggctgaggagaagaatgtgtattctgcagcccttggatgaatttttctgtaaatatctattaggtccatttggcctctaatgcacattaagtctgatgcttcattgttggttttctttggaaggtctgtccaatgctgaaagtgggatattgaagtctccaagttttatcatattggggcctgtctctcccttttgctctaataatacttgctttatatatgtgagtgctccagtgttgggtgcatttatgtttaaaatggttacatcctcttgctgaattgactgctttatcattatatagtgaccctctttggcttttcctatagtttttgtcttgaaatctattttgtcttatattagtatagccacttctgcacttttttggtttccattggctttggaaaagatttctcgtaattctgtttgataaggacacatgttaggaggttttcaacacttcagtgagtagtaaacttgtaagtaaagcaggtatgaacagaatctcttgaattagtgaaaagtcaaaatcgttaattactgtttaatttaaaactgaaattataggtattaacaaataactatatgccttatactgtactttatttatttatttttccgagacggtcttgctctgttgcccaggctggagtgcggtgacgtgatcttggctcactgcagcctctgcctcccgggttcaagcaattttcatgcctcagcctaccgagtagctgggactacaggcatgcactggcacacccagctaagttttttgtatttttagtagagatgggatttcaccatgttgcccaggctggtctccaattcctgacctcaagtgatccacccaccttggcctcccaaagtgctgggattacaggcatgagccatcatgcccggccatataatgtactttaaacatgatgattttgaaactggaaacacacgcacatgtgagtaatttcttaaatggaattgaattaccttgaagaatcttagaaaaatgatgtttttaattttaaattagttttgcgtcatacatgtctttatttctcaaattttaaagaaaagtctatgaattaaagaaaataaaacttttcctgcatgaaagcaatgagtgtattatgtaccaaaaaggtagaagaaaaatatcttctgtaatattagctagatattacttactaaagatatttttggggtatatttattagcaatattttaatgcaattttaaacataattgtcatcatacttcatagacagtttatagcctgctatttttggttagcattgtagtatgagctattttccatattatttgaacttttaaaatttaatggttggtatgatattgtatgacttgtatgcatccttgtttacctagtctttattatacactttaattgattacagttttttttttttttttttgcttttgtgagcatctggcagataactttcttgagtaaagttattatgtagaaatattttctttgggccaggtgcggtggctcatgcctataatcccagcactttgggaggctgaggcaggtggaacatgaagtcaggagttcaagaccagcctggccaatatggtgaaaccccgtctatactaaaaatacaaaaatcagctgggcatggtggtgcatgcctgtagtcccaggtactcaggaggttgaggcaggagaattgcttgaacccgggaggtggagaggttgcagtgagccgagatcgaaccactgcactccagcctgggcgacagagcaagactccaactcaaaaaaaaaaaaagaaaagaaaagaaaagaaatactttcttactttctttgtatagataaagggagatagaattactagatcaaagtctcttgatggtttttgccaatttgttttgtaaatgtatgtatcaccacaggctatctatgagagtgtctatttcatggaaacttagcctacaatgaatagtcattttacccctaaatatttgataagttaaaaaatgctatcacatttaacatttcataggctttaagaagttgcagttttatattcatttcttcatgcattttgtgtactatttcaaaagtttctataggggaatgagagcaaagtaatgtgtttttcattatttattttgctaaccaaacatatttaattactaaccaaaaggatgatcctaattaagccaacacttggaattattttcatgtaaaatgtctgtgatagagataattgaatttaataatgaaaaaagtattacagaaatttgctcattaaactgagcttgttttcagctaatccttctgcgaagtgataatgactttttttttttttttttaaataaagatgggggctcgctatgttgaccaggctggtcttgaactcctggcctcaagtgatcctcccatctccgcctctcaaattgctaggaatacaggcatgagccaccacacttggtttaatagtggaatttttattacacttttttatggattcgaggagaggtggcattgtacataacacattctaccgctaattttccatctttcacttttctcattgtgctttccttcccattccgttcctggtgttgaaccaatgcatcatttgtaaatttgtagacagtctgagtttttctgccataatctgttgtttcttcagacttcttctctggtttataagaaaactgttgttttaaaactctcagttttgtattttttatttcttattatactttaagttctgggatatgtgagcagaacgtgcaagttttttacataagtatacatgtgccatggtggtttgctgcacccatcaacctatcatctccattgggtatttcttctaatgctatccctccccttgcccccaaccccccaacaggccccagtgtgatgttcccctccttgtgcccatatgttctcattgttcaactcccacttatgagtgagaacatgcagtgtttggttttctgttcctgtgttagtttgctgagagtgatggtttccagcttcatccatgtccctgcaaaatatatgaactgatcctttttttatggctgcatagtattccgtggtgtataggtgccacattttctttatccagtgtaccattgataggtatttgggttggttccaagtctttgctactgtgaatagtgctgcagtaaacatatgtgtgcatgtgtctttacagtagaatgatttataatcctttgggtatatacccagtaatgggattgctgggtcaaatggtatttctaattctagatcattgtggaatcgtcacactgtcttccacaatggttgaacgaatttatcctcccaccaacagtgtaaaagtgttcctatttctccacatcctctccagcatctgttgtttcctgacttcttaatgatcggcattctaattggcatgagatggtatctcattgtggttttgatttgcatttctctaatgaccagtgatgctgagctgtttttcatgtttgttggccatgtaaatgtcttctttggagaagtgtctattcatatcctatgcccactttttgatagggttatttgtttttttcttataaatttaagttctttgtagattctggatattagccctttgtcagatggataaaaaaacactatttttttaaaaaattttccaattcctcatcggtaaaaaagcagtaaaacattcatggtaatgatcatggcctatagttttttttttttttaagtgacattaggatttaaaactggtatgaaacctaatcatttattttagttagctaatatcaggatttagatttatttttttgacccaattgcagataggcagatcagatctcatagactgccatctgcctcaagctccttttgtagttatgtgaatgtgagcctgaaggctgaacccacttttctctaatggagatttttttttattacactttaagttctagggtacatgtgcacaacgtgcaggtttgttacatatgcatacatgtgccatgttggtgtgctgcacccattaactcgtcatttacattaggtatatctactaatgctatccctcccccctccccccaccccatgacaggccccggtgtgtgatgttccccttcctgtgtccaagtgttttcattgttgaattcccacctatgagtgagaacatgcggtgtttggttttttgtccttgcgatagtttgctgagaatgatggtttccagcttcatccatgtccctatataggacatgaactcatccttttttatggctgcatagtattccatggtgtgtatgtgccacattttcttaatccagtctgtcattgatggacatttgggttggttccaggtctttgctattgtgaatagtgctgcaataaacatacatgtgtgtgagtctttatagcagcatgattgataatcctttgggtatatacccagtaatggggtggctgggtcaaatggtatttctagttctagatccttgaggagtcaccacactgtcttccacaatggttgaactagtttacagtcccaccaacaatgtaaaagtgttcctatttctccacatcctctccagcatgtgttgtttcctgactttttaatgatcgccattctaactggcatgagatggtatctcattgtggttttgatttgcatttgtctgatgaccagtgatgatgagcatttttacatgtgtctttggctgcataaatgtcttcttttgagaagtgtctgttcatatcctttgcctactttttgatggggttgtttgatttttttcttgtaaatttgtttaagttctttgtagattctggatattagccctttgtcagatgagtagattgcaaaaattttctcccattctgtagtttgcctgttcactctgatggtagtttcttttgctgtgcagaagctcttgagtttaattagatcccatttgtcaattttggcttttgttgccattgcttttggtgttttagacatgaagtccttgcccatgcctatgtcctgaatggtattgcctaggttttcttctagggtttttatggttttaggtctgacgcttaagtctttaatccatcttgaattaatttttgtgtaaggtgtaaggaagggatccagtttcagctttctccatatggctagccagttttcccagcaccatttgttaaatagggaattctttccccattttttgtttttgtcaggtttgtcaaagatcaggtggttgtagatgtgtggtattatttctgagggctctgttttgttccattgttctatatctctgttttggtaccagtaccatgctgttttggttactgtagccttgtagtatagtttgaagtcaggtagcgtgatgcctccagctttgttctttttgcttaggattgttgtggcaatgcggtttaaccactctgaaaagatgtatttaaggacttttatctagactctatggtgaggtataacatagtgctggttgagtcagcttcaagtttttgtagagggaggaagagagtaacaaccatgtctggatttaataaaaagtttagcataagtaaatgtgtgctcttttgccttaagaaaatatttttcaatatataaaaaggattaatgagtgctgcctttcagatacttggtttggtgtgtttgaaacatcatttccaaagataggacatacacatttccagggatcatctctatgatatgactctagaaatgatgtagatttttaaaatcaatgtcagaacttatagacacaaatgtatgctttccttctaagtagtcactttgggagcccatatacataacagtggtgtcattcctgatgatatgttgggaactctcattttgtaaccagtttagaagtcatgcaagtaaataaatcttcaggattacttcagatttgggcaaaaaattagttttacccaacttgatcattttgcatttttcaccatatttgactctaagtgaaaactggctatttccaaaaatcatacccatcctgaggatgtgaagatatttttgggctgggcacggtagctcactcctgtaatcccagcagtttgggaggctgaggcagtagggttgtttgaggccagaatttgaagaccagcttggtcaacatagtgagactccctctctccaaaggaaaaaaaaaagtgaagttttttttttctttttcaaatgagtaggcagcattgtttagttatctgtttttttttcttttttttccactgttggacttctgtccattctctttatttgtttatttatttatttgagatggagttttgctctgttgtctaggccggagtgcagtggcgcgatcttggctcactgcagtctctccctcccggctcaagtgattctcctgcctcagcctcccaagtagctgggattacaggcatgcaccaccaggcccggctaattttgtgtttctaggggagacggggtttcaccatgttggccaggctggtctggaactcctgacctcaagtgatctgcctgtctagctcccaaagtgccggggttacaggtgtgagctaccgtgcctggcctgctgatcatactctcttgattttatttttgtactgtggtactgcggttgatggactgcactgatgttatccatatttttaaccttggtcacccacagtgtgaactcattaaatagctgactttgcaatttgattgctatgatttgggaatgagtgtggcagtcataattgtgcaggtttgctatcgtttcatttctagagaacttttctatggtgatctattgatgagataagatatagtatgacattatttattcctctttttgacttttggttctcaggaattttgggtgctgtgagttgacatgtagcatcatttcctcaggtctcattttctatctgagcacgattaaggacacagtgacctgatgataaatttttttgtacatctgactcttatctgaaagaatggttattggccaaatatggaaaccatacccacttggtacctttattctagaggcaaagtttgtttcaaaattttgtaaaacaaccctctccaccaaaagaaaacaaatacccacacaagatctctagttacggtgtctgttatatctcatttcttttccttccctaaatatactgagctattcttaactaaatacaggaaaattgtgcagaggaacacttactaagtgttcagtaaatgttttcatttttcttatgtgtatatctagaagtagaattgttgggtcattgagtaactgtttctgcgtaaatatctatacacgtgccatggtggtttgctgcacccatcaacccgtcatctacattacgtatttctcctaatgctatccctcccccaacccctaacaggccccagtgtgtgatgttcccctccctgtgtccatgtgttctcattgttcaactcccacttatgagtgagaacatgcagtatttggttttctgttcttgtgttagtttgctgagaatgatggtttccagctccatccatgtccctgcaaaggacataaacgcatccttttttatggctgcatagtattccatggggtatatgtgccacattttctttatccagtctatcactgatgggcatttgggttagttccaagtctttgctattgtgaatagtgctgcagtaaacatgtgtgcatgtgtctttatagtagaatgatttataatcctttgggtatatacccagtaatgggatggctgggtcaaatggtatttctagttctagatccttgaggaatcgccacactgtctgccacgatggttgaactaatttaccctcccatcaacagtgtaaaattgttcctatttctccacatcctctccagcatgtgttgttccctgactttttaatgttcgccattctaaccggcgtgaggtggtatctcattgtggtttttatttgcatttctctaatgaccagtgatgatgagttttttttcatatgtttgttggccacataaatgtcttcttttgagaaatgtctgttcatatcctttgcccactttttgttagggttgtttgcttttttcttgtaaatttgtttaagttctttgtagattctggatattagccctttgtcagatggatagatcacaaaaaagttctcccattctgtaggttgcctgttcactctgatgagatatatatatatattttttttttgctgtgcagaaggtctttagtttagttagatcccatttgtcaattttggcttttgttgtcattgcttttggtgttttagtcatgaagtctttgcccatgcctatgtcctgaatggtggtttgcctaggttttcttctagggtttttatggttttaggtcttatgtttaagtctttaatccatcttgagttaatttttatataatgtgtaaggaaggagtccagcttcagttttctgcatatggctagccagttttccaaacaccatttattaaatagggagtcctttctccattgcttgtttttgtcaggtttgtcaaagatcagatggttgtagatatgtggtgttatttctgaggcctcggttctgttccattgttctatatctctgttttggtaccagtaccatgctgttttggttactgtagccttgtagtatagtttgaagtcaggtagcatgatgcctccagctttgttctgtttgcttaggattgtcgtggccctgtggggtattttttggttccatatgaaatttaaagtagcttttttttccaattctgtgaagaaagtcagtggtagcttgatggggatagcattgaatgtatacattactttgggcagtatggccattttcatgatattgattcttcctatccatgagcatggaatgtttttccatttatttgagtcctctcttatttccttgagcagtggtttgtagttctccttgaagaggtccttcacatcccttgtaagttgtattcctaggtattttattgtctttgtagcagttgttaataggaattcactcatgatttggctctctatctgttattgttgtataagaatgcttgtgatttttgcacattgattttgtatcctgagacttcgctgaagttgcttgtcagcttaaggagattttgggctgagatggtggggttttctaaatatgcaatcatttcatctgcagacagagaatttgacttcctcttttccggattgaataccctttatttctttctgttgcctaaatgccctggccagaacttacaatactgtgttgaataggagtggtgagagtgggcatccttgtcttgtaccgggtttcaaagggaatgcttccagtttttgcccattcagtatgatgttggctgtggttttgtcataaatagctcttattattttgagatacgtttcatcggtacccagtttattgagagtttttagcgtgaaggagtgttgaattttattgaagtccttttctgcatctattgagataatcatgtggtttttgtcattggttctgtttatgtgatggattatgtttattgatttgcgtatgttgaaccagctgtgtatcacagggatgaagccgacttgatcgtggtggataagctttttgatgtgctgctggattcggcttgccagtattttattgaggatttttgcatcgatgttcatcagggatattggcctgaaattttctttatttgttgtgtctctgccaggttttggtatcaggatgatgctggcctcataaaatgagttagggaggattccctcgttttctattttttggaatagtttcagaaggaatggtaccagctcctctttgtacctctggtagaattcagctttgaatctgtctggtcctggacttattttgatcggtaggctattagttactgcctcaacttcagaactttttattggtttattcagggattcgacttcttccttgtttagtcttcggagggtgtatgtgtccaggcatttatccatttcctctagattttctagtttgtttgcatagaggtgcttatagtattctctgatggtagtttgtatttttgtgggatcagtggtgatatcccctttatcattttttattgcatctatttgattcttctctcttttgttctttattagtccggatagtggtctgttttgttgatcttctcaaaaaaacacctcctgaattcactgatagtttgaagggtttttcctgtctctatctctttgagttcttctctgatcttagttatttcttgtcttctcctagcttttgaagttgtttgctcttccttctctagttgttttaattatgatgttagggtgttgactttagatatttcctgctttctcttgtgggcatttagtgctataaatttccctgtacacactgctttaaatttgtcccagaaattctggtatgttgtctctttgttctcattggtttcaaagaacttctttatttctgccttaatttctttgtttacctagtagtcattcaggggcaggttgttcagtttccatgtagttgtgcggttttgaatgagtttcttaatcctgagttctaatttgattgcattatagtctgagagactgttatgatttccgttctttttcatttgcttaggagtgttttacttctaattatatggtcagttttagaataagcacgatgaggtgctgagaagaatgtatattctgttgctttggggtcaagagttctgtagatgtctgttaggtctgcttggtccagagctgagttcaagtgttgtatatccttgttaattttccgtcttgtcggtctgtctaatattgacagtgggttattaaaatctcccactattattgtgtgagagtctaagtctctttgtaggtctctaagaacttgctttatgttctgggtgctcccgtattgggtacatatatatttaggatagttagctcttctcgttgctttgatccctttaccattatgtaacacccttctttgtctgttttgatctttgttggtttaaagtctgttttatcagagactaggattgcagcccctggttttttttgctttccatttgcttggtaaatgtttctccatccctttattttgaacctatgtatgtctttaatttgtttttaaaattattatatccatcctacttagtataaattggtttcttgttgtggttttgatttgcatttccctgatatgactaatgatcttgagcattttttcatgtgcttattggccattggtatatattcttttgagaagtgtatatctaagtcttttccccatttaaaaaatagggttgtctttttgttgtttaattgtaagaagtctttatgtattctggttaccagaccctcatgagatacaggatttgaaaatcgttttctctcattgtgtttgctgtgttttcactttcttgatggtgccctttgacatgcaaaagttttgacttttattaaaaatggggctgggcatggtggctcacacttgtcatcccagtgctttgggaggctgaggtggaggatttcttgaggccaggagtttcagaccatcctgggcaacataactggaccccatctctacaaaaaattaaagaaaaaatttagctaagagtatagttgtgtgctgcacttcctcaactaagaacataggtgtgtgccacaggtactcaagatgctgaggcgggaggattgctttagcccaagagttttgagacctcagtgagtcaaggtcacgccactgtgctcaagcctgtgtgacagagcaagaggctaactctaaggaaaaaaaatggggtaaacttatactttccttatttaaagttttaactccttaaaaccctgttgaattacagatacatctattatataacttaagagttgatgctataggctgggcacagtggctcacgcctgtaatcccagcactttgggaggccgagatgggtggatcacgaggtcaggagatagagaccatcctggctaacacggtgaaacctcgtctctgctaaaaatacaaaaaaattagccgggcgtggtggcgggcgcctgtagtcccagctacttgggaggctgaggccggagaatggtgtgaacccgggaggcagagcttgcagtgagccaagatcacgccactgcactccagcctgggtgacagagcaagactccgtcttttaaaaaaaaaaaaaaaaaaaaagagttgatgctataaaacttagttaatgaaatatttccctgggcgatggagctcttgcaagtcctgttgtattttttgttcatctttatgccagtcagttagacagttcttctatgtcaagcagaggatggaataataaaccaaaacactgcttagggctttcagagagtaagtgttcagtaaatatattcgataaattactgaattatttttttaaatgatggaaaggaaaatcttgccctctctttttctgggtgttggctagtataaatctttcttgaagtgataatctacatctatgttttgatttctaaggatttcccaaatataagctatatataagtgagaggaaataataacttaggtgcctaatgataatatgacaagataagtacaagggtcagctatttgttgtgaaatagcaatggatataatttaaatatgaatacctttttgctgtttaatcccccaaattttcttttgatttcttttaaaattcttttgtggtaggtaggtttattgtttcttaagaattaacttaagggtagtattttctgatacatttttaagtaacatgaagtttaacttctgtttaaacacatcatatagagtacattgaaagacctcagtattttcgaaatgtttagtaagtaatatcagcagtttccttaaatgatattttaatcctaggtaagtgtacaggtaggttgtgttactcatatttttatattcttagtgaaatagaattcttttttttttttttttttgagacagggtctgactgttgccttggctagagtgcagtggcatgatcttggctcactgcaacctctgcctcacaaggctcaagccatcctcccacctcagcctcctgagtagctgagaccacaggcatgagccacccatgctctattatgagccaccacacctggcctaaaattcgttttctttaatattttttctttctacacccacaactgtaacatttcccttagtttttactttgaatgtgcatactcttacacgacttacagtatggctatattttcagtttgctagagctttacaattaatttaaaacatgaaaggctaattaagggaattctttaaattttgttttaatagtgaaagcaagttgaatacattggtgcagaagcttcatgacttccttgcacactcatcagaagaatctgaagaaacaagttctcctccacgacttgcaatgaatcaaaacacaggtaaattgaaaaagaatgtgctataccttctagtcttttttctattttttttttacacttatggaggtaaccatttattttattcagagagcagcttttaaaagagatttcagtttgtggaaaatgacagattagcaagctttatagaagcccctattatgtatcttagctatatctgatacaggagattttaattttggtaagtatgactatagaaagcttagaaaaggaagcatttatggttttatatgtaatggaaatgtgttatagaatggctagtgaatgttgactgtgaaaaaatagtattagaagaggcaggagtagtataggaatgttttgtcctagcaatcattcatgtattaggagttaaatttttatttttatttttgtgatggagtctcgctctgtcacccagtctggagttcaatggcatgatcttggctcactgcaacttccgcctcttgggctcaagctattctgctgcctcagcctcctgagtagctgggatcacaggcgtctgccaccatgtttggctaattttggtatttttagtagagactgggtttcaccctgttggccaagctggtctggaactcaagtgatctgccctcgttggcctcccgaagtgctaggataacaggcatgagccatcacacccaacataagagttaaatttttatgttgtttgataatatccctgagtagatttggtgtatttattttttaaaataaaaccacttaacacctcctctctacctccctgtctctctcttttaaaaagatatatatatatatatatatatatatttttttttttttttttttttttaaagagacgaggtcttgctttgtcacccagactggagtgtagtggtgtaatcatagctcactgcagcctcagacttcttgggcttaagcaatcttctcacctcaccctcccggtagctgggattacaggtgtgtgccaccatgcctggttaatttcaaaaaaaaaaaaaaaaaaaaaaaaaaaaaaaaaaatttttagagacatggtcttgctatgttgtccagactggtcttggacttcctggcctcaaatgattctcctgcctcagcctcctgagtagctgaaattataagcatgagccattgtacctggttcccttttttaaaaaacattttgtatcatgtgacagttagcattttcaggttttcaagggtaactacaatacacatgcacacagacacacacaatatgtacaaaaaaagtataagagagttatagtgaaaagttcaaccatatgtgtaattagagttctagaaggaataaagagacttggttaaaagtcctatttggagagatacgggctgagcattttttaaaaagtgatgaaaaacatcagactagagattcaagaagttttgtgaaccctgaacaggataaatataaagaaaactacagctaggcatgtcataaccaaactcctaaagaacataaaccgagagaaaaatatcttaagtagccagaggaaaaaaatacattattttcaaaggaataacagtaacactggcagctcacttaacaacagaaatgatagaaggcagatgacaatgaaattatttctttaaaatgtcaaagaaaagtgcagtcatgcatcacttaactatgggataggtttttttgagaaagcattgttgggtgattttgtcattgtgcaaacattatggagtgtccttacataggctactacacacctaggctatatgttatagcctgttgctcataggctacaaacctgtgcagcgtgttcttgtactgaatacggtaggtaatcggaacacaatggtaaatatttgtgtgtctaaacacatggaaacatagaaaaggtacagtaaaaatacagtattataatcttatgggaccaccgatgtatatgtggtcagtcattgagtgaaatgtctttatgcagcatgtgattgtaattgccagcatagaactgtatattcagtgaaaacatccttcataaatgaagggtggaataaggccatatctgggcaaacaaaaagtgagaacttgatgtcaacagacctacactggagtgaataactacactagaggaaattacaagttttctgaaatgagaaagaaaataatttgaaatggcaacaccaaaatacaggaagtaatgaataagaatgggaaagctaaataggtaggtaaactaaataacataaagttatttaagccacagtccctattcttatttcatcaattaccccagtagtgttcacagataagtttttcccccttaaattcaggatccagttcaagatttagtagtcctgtttctttggttttttaaaaatctgaagcagtttgtctgccttttgggactatgactttttttgaaatgtacaggtgtgttactttgtgaaatggccctcaggattatctgtttagttatggttagattcaggttatacatttttggcaggaatactacataaagtggtgttctgttctccatgcatcctgttacatggcacatgatgtgatttgcccctttactggtgatgttaacttaggttgtttggttatggttgtgtttgctaggtaaacccagtctaaagttatgatttattccattgtaactaataactaatttaatggggggcactttgagattactaaggtattctttttattatcaaaacttaatatgttttcttttgcaaatgaccacaaagtttgcagcttaaaacaacccaaatttgttattttacagttctgtaggttcggagtccggtgggccttgctggacccttctcgggctatcacaaggtcaaagtcaagatgttagtaggactaggttcctttctggagactgtagaaaaatccattcctaagctcattcaggttgttggcagaattcagttctttatgataatcggttagaggtccttctttctcactcactattggccaagaccccctcctagttcttttcaggtgtcttcatttcttctcacgtgatgccctccatcttcaaatccagcaacagcacatcaagtctctctcaagctttgaagctctctgacctagctttttgcttgctaattctgctgccacctgctaccagctggagacatttttctgtttttaaggattcatgtgattagattaggtccctctccctctcatctcctcctgattatctcttgagtttaagatcaactgtgccatattacataacacagttatgggagtgatatgtcatcacattgataatttctggggatttgcggtgtagaatcttgtgggccattcctagaaggtctgtttatcacagcatacatttgtgattcttagctgaataatttattcctatgatgggttcaaaatggtgatgttctaacttgtctttccttctatgtttattagttgatattttattgtaagggaggggttcatgttctaacctattcaattatttgtatcagtatatacttacaattttttccatgaatattctctgtcattatttattttgatcctgaaattgtatcagttttggctagtaggagcctcacctggatggctcctgctgacctttttacaaatccgcatcatttcttgaacactttctttctgtcccttcaaagtattcaaggcttgctttccattctctgttccccagccctacaatcagttattttttgcaagagttctgattccttttagtgggatatagtgtttagaaatcaagatcagggtgtgtgatgtgctcattgccaccaagatgtctttgtttccaagctctttcacagagaaagccaataatatgttttatattttcatgagttgatactgatacttttaattcaattccagtcttctttctagacttccccttttcatgtttttaacttctttctccaacagaaagaaacctggttcctattatccccaatttatttatttttatttatttattctttttgagatggagtctcactctgttgccaggctggagttcagtggcgtgatctcagatcactgcaacctttgcctcccaggttcaagcgattctcctgcctcagcctaccaagtagctgagactacagtcatgcgccaccatacccagctaatttttgtatttttagtagagacagggtttcaccatgttggccaggatggtcttgatctcttgacttcatgatccgcctgcctcgacctcccaaagtgctgggattacaagtgtgagccactgtgcccagcctatccccagtttatttatttatttttatttttatttttttgagatggagtctcgctgtgtcacacaggctggagtgcagtggcgccatctcagctcactgcaacctccgcctcctgggttcaagcgattctcctgtctcagcctcttaagtagctggaactacaggtgcacaccaccgtgcccagctaatttttgtatttttagtggagacggcgttttgccatctctggatggcaggctggtctggaactcctgaccttaggtgatccacctgcctcagcctcccaaagtgctctgattacaggcgtgagccaccaagcccggcctttccccagtttatttgtattcatttttctagtcctcattgtacccacagtttcagagttgttaaccatatcatcgcattaaagaaacgtaactatagttcagtatttctttaaagttctttttgtctttagaatgatgttacgttgtcggagtcctgtgttcactagttgaggaactccttcagtagtggtatctccagttggacaaacagatgtcactcacaaataccaattgtaaattctgggcagcatactgaaggctagatatcaacaaagtagataaactggaggggagtcaacacatggaagaagaagtggcaatggctgaattccccattgttaatcctttttgcttcagccaaggatcctcttagctccatctgtggcctttaagacttggataaaaatctacagtcttattggatgtgaaatcaaggaaaaaatttagggagaccacagcagctgtaacatgagtagagagatcccatctagaaaagagccacagaatgggaaaaccagattgcacgaaaactctcccaatagctctggtcctgttgcctaagtgcactccagattccaaccagcctggttaggactaaaagaacagaacaaaagctttgagttgtttggtactacagggtggaaagggtttggagtttcatttcaagtaagttaactatctgtttgtttggttggttggttttttttgagacaggttctttttctgttgcctaggctggtgtgcagtgatgccatctcagctcacagcaacttccacctcccgggttcaagtgattcttgtgcctcagctttctgaatagctgggattacaggcacctgccaccacgcccagctaatttttgtatttttagtagaggcagtgtttcaccatgttggccaggctggtcttgaactcatgacttcaggttatctgcctgcctcggcttcccaaagtgctgggattacaggcgtgagccaccacacccagcccagttgactttttatgttggccttgtatcctgtgaacttgcttaacgtacttattagttctaaatagtatttttccccctcttgtagattctttgggattttctacttagacagttatatcacctgcaaatagggatagttttattttttcctttccatctgtataccttttaatttcttttcttgcttcattatattagctaggattttctgtattttccagtattacattgaagaatgatgatgatagcagacatcctcttagtgttaccaattttagtgggaaaacattcagtctttcacagtgaaggatgtttgctttataggtttcttgtaaatgccctttatcaagttgaggaagttcccctctattcctagtttgctgagaatttttttaagcttaaatttctatttgatttctatttgtaattataaattcacatgcagttgtaataactaatatagagagagctcttatgcactttggcagtttccctcaatggtaacatataaaactagaatacaatatcacaaccaggaaattgacattgataaaatctattaatcaagattttgtcagttttactttgtgtgtgtgtgtgtgtgtgtgtgtgtgtgttaaagttctatacattttttttttacctgggttgattcatgcatctaccaccacagttgagatacagaatagttcatcaacacaggattcctcatcttggcattttataatcacacccacttccctccgcctacctctgcctatgcttaacacctggcaaccactaatctgtcttccattttgaaaattttgtcatttcaaatatgttaaataaatggagtttatagtaaataatcttttggggttggagtgttttcacttggcataattctgtggagattcattgaggttgttgtatgtatcaacaatcctttccttttaattgcagggtaatattccatggtatggatgtacagattgagtatccttaaccccagaatcagaaatctgaaatgttccaagatcggaaacttttgagtgctgacatgacactcaaaggaaatgctcattggaacatttgggattttcagattagggatgctgaatccctaatgtgaataaaccagaatagtgcaaatatgctagaatctgaaaaaatccaaaatttgaaacacttctggtcccatgcattttggataaggaatacgcaacctgtaccacagttgtatttgtattgttttttttttttttttattgaaatggagtcttgttttgtcacccaggctagagggcagtggcatgatcttgactcactgcaacctccgcctcccaggttcaagtgattctcctgcttcagcctccggagtagctgggattacaggcaagcgccaccacacccggctaatttttgtatttatagtagagacgaggtttcaccatgttggccaggctggtctcgaactcctgacctcaggtgatccacccacctcggcctcccaaagtgctgggattacaggtgtgagccaccgcgcctggcctgtaccacagtttgtttaaccatttatttgttaaagcaaatctgggccgattcctgatttcagttgttacaattaaagctggtggtgaatatttatatatacgtttttatatgaatttatgttttcatttctttgcaataaatgccaggagtgcattttgcagttcatatgatggttacacatttatttttattaaattaattaaactacatttacattttattttattttgggtagagacagagcctcactgtgttggccaggcttgttatgaactcctgacctcaggtaatcctcctgccttgtcctctggaggcccttggattacagacatgaatcactgcacctggtttgcattttttttttttttttactccattggactctatcagtgcttttatttatttattggtatttatttatttatttattttaacttttaggttcagtggtacctgtgaaggtttgtcacataggtaaggtagcatcactggggtttattgtttagattatttcatcacttaggtattaagcccagtacctaatagttatcttgtctactcttacatgttcatttttttaaaagaaactcctgaactgttatccagagtggttgtactgttttatattcccacagcaatgtatgagtgatccagtttctccacatccttgccaacactgggtgttaatactatttttaaattttagccatttgatatttatggtatctcattgtggttttaatttgcatttacttaatgagtaataaattctttttaaatagaaacaggatattgctctgttgcccaggctggagtgcagtggtgcaattatagctcactgcagcctcaaactcctaggctcaagtgatcctcctgcctcagcctctcgagtagctgagactgcctcagcctgtcgagtagccaagactacaggcacatgccaccatacccagctaattttttaatgttctgtagagacggggtctggctctgttgcccatgctggtctcagactcctggcctcaagcgatcttcccaccatggcctcccaaagtatttagattacaggcatcagccactgcatctggctggtaataaaacattaaacatctttattgaaatataatttacatgccatacaattaacccatttaaagtataaaattcagtggtttttagtatattgaatatttacacatatgtacaaccatcaccaccatcaattttaaaatatttttatcacctcaaaaagaaactccataccctttagctatcaccccctagctctaagaaatcactaatctagtttcttgttttgagttttttatttttatttttatttttattttttttttgagacagagtctcgttctgttgcccaggctggagtgcagtggctattttggcttactgcaacctctgcctcccaggttcaaatgatttttgtgccttggcctcccaagtagctgggattataggcgtgcgccaccacacctggctaatttttgtattttttagtagagacagggttttgccatgttggccgggctggtctcaaactcctggcctcaagtcatctgcccacctcaggttcccaaagtcctgggattgcaggcgtgagccactgcgcctggcctatttccctattttggactttcatatgaatggcatcatataatacgtgtttttgtggctgatttctttcatttagcgtaatgtattcaagatatctgttgtaacatgtcttagtactccattcctttttatggccacataatattccattatatgtgtataccatatttgtttatccatttatccattgatggacatttgtcttgttcccatgttttggctgttaggaataatgcggctgtaaatattggtgtacagttttttgtgtgtagccatatatttttgtttatcttgtgtatatacctaggaatctaattgctggatttatatggtaactatgttaaattgtttgaggaaatgtcaaactgttttccaaagtagagatactattttacttttccaccaggagtatataaagattgtgagttcttcacgtccatgccaaccattgttaataacagactttttgattctagccattctagtgcatgtgaagtagtatctcattgtgattttagttttcaactgcctgaagggtaatgatgttgaacatcatttcatgtgcttatttgtagtttgtatatattccttggagaaacttctattcaaaccctctgtccagtctttttctttttgacagggtcctgctctgtttcccaggctggagtgcagtggcatgatctcagctcacagcaccctcaacctccctggctcaaatgatcttcccacctcagcctcccgagtagctaagactatgggtgtgtgccacagtgcccagctaatttttgtttattttttatagagatggggtcttaatttgttgaccaagctggtcttgaactcttgtgcttaagcaattcacccgcctcggcctcccaaagtgctgggattacaggcgtgagccaccgtgcccagcccctttgcccatttttaaaatgggtatttatgctttcattgttgatttgtaagaattctttatatattctaaattttttattgtaaaatatgcataacataaaaattgccattttaactaattttaaatgtacagtcctgtaacgttaagtaaaattgttgtgcattcaccaccaccatccatgtctagtactttttcatcttccccaagtgaaactctgtacccatcacatactaactccccaatcttccctctccttagccttgcaaacaccattctacattctcttcctaggaatttgactactctaggaacttcatatacgtataatcctacaatatttgtccttctgacatattttacttagcacaatgtgttgaaggttatccatgttgtagtatatctcaaaatttcatttcttttgaagtctgaataccattccattgtatgtatataccacattttgtttatctattcatatttcaatggacacttggataagatatataatttggaaatattttcccctattctttgagttgtctttatttatttttagagacagggttttgctctgttgctcaggctggggtgcagtggcaagatcatagttcactgcagccttgaactcctgggtacaagcaatccttccatctcagcctcccaagtagatgagactatagttgtgtgccaccatgtctggctagtatttttttttttttattttttagagatgaggtcttaccatgtagcccaggctgagcttgaactcctggcctcaggcgatccaccttggcctcacaagtagctgggattacaggcgtgagacactgcacccagttgggttgtctttaattgaagcacaagttactaattttgatgaacttttatttatctgtttttccttttgttgctcattcttttggtgtctttaagaatccattaccaaattgaaggtaatgaagatttacccccatgttttcttctaaaagttttatagatttagttcttaaatttaggtctttgatctactttgagttaatgttttgtatatgttgcgaagtaggggtccagcttcattttttgtaggtttctaaccagttgtctcagcaccatttattgaaagacaattctttcttcattgaatggtcttgccacccttgtcagaaatcagtgggactgttgggcatggtggctcatgtctgtaatcccagcactttgggaggccgaggtgggaggggtactcgggcccaggagttccagaccagcctggacaacacagtgagactccatctctattaaaaaaaaaaaaagccaggcgtagtggtgtgtgcctgtagtcccagctacttaggaggctgaggcagaaggatcacttgagcccaggagactgaggctgcagtgagccatgattgtaccactgcaccctagcctgggtgacagagtgagatcctgtctccaaaaaaaaaattaaaaaaaaaatcagctggtcatagatatatgggtttatttctggactcttaattctgtttgtccttttaccagtactccacggtcttgattgcattgttttacagttttgtgcaaagttgcaccaaagttgttgtgtagttttgcaaaactggcaatcaagtctgtgcagtactggcaaaattaggaagtgtgagtcttcatacttttcatttttcaaaattatctgcctattctgaatgttttcaattccctatgaattttaactctttgttttttcttggtagagatgaggtttcactatgtttctgaggctgttcttaaacttctgtcctcaagtgatccttccaccttggcctcccaaagtgctgggattataggtctgagccaccatgcctggtccatatgaattttggaatgagcttgtcaatttttacaaagaagtcagctgggattctgacagagattgcagcgtgtctgtagattagtttgtggagtattggtgatggcagcggtgggccgtctggagtggctgctgccatcacactggctgcagcagggagacgtggccagggctgcacggtctatagagttggtgggagccaggggcaagcaggagccctgccccttccaagttggagctccctgggtcctgctgcagctgcctaagcatggctgtagacctgggcatccctgtgctcttgagtcttgggagcaggctggagccccaccctcccaggtgcaactgcagctggccaaaccgtggctgcagtcccaggcctctcattccatggagcaggcaggagacccaccctcccgggtgcagctgcagtctcccaaactgcggctacagaaccttgccttctgctccacgagcaggcaggagccctgggtgcagcaggagccccgggtgcagccgcagccacccaaaccatggctgcagatctggtcctcctgctttatggagcaggctggagtcccaccctcctgggcacagctatagctgcccaaattgtgggtatagacctgggcctcctgctttatggggcaggcaggagccctgccccactgggtgcagctgcagccacccaaatcatgggggggctgcagacccaggtgtctctgcactcttggggcctgggaaggccccccttgctctcataggcttgggagtgcctgctcctgctgcctggcttcaccctgctattggcacctgctctgatcttgtggcaaagttggggccgagcctgggtgctgtcgtagcctggccaggtatccacatgcttggggaactgctgacatgccagccttctgctgccttgaccccctctggactttgggtactgacaaacatagggaagctgaggcagggctgagggcagttcagcactggcctgcaggtgcccccttgcatctacagcctgggcaccatgaatggcagcaggaggtagacaggttcctcagtggaaggtggcaggtccctggtgaggacccaccttcaggccagggaaagcctgaaggctggaggttgggctgccagttgcatggatcagagtgggaacttgtggtgccttttctgggcctgcctgtggaccaattggcatgcacatcctcccctctgaggcccataaaaaccccaggctcagccagagctgaacagatgtcaggatgaccagctgcagagaggagcaacccactctagggcctcctctctgctgtgagctgcagaggtgacaagatgaccttcctgcaaagaggtgccacacattctagggcctcctctttgctgagagctgcagagacgatgggtcgactttcctgcagagaggtactactcatactagggcctcctctctactgagagctgcagagacgaaggagagatgatggggagatgatgggatgacctgcctgcaaagagaagccacccactctcaggcctcctctctcctgagagctgtgcagatgacgggataatcagctgctgagaggagctaccctctctgctgatagctgaacacttgtagtaacgacttgcctagcagagaagaaccaccctctctgctaggagctgaacacttgtagtaatgacttgcctagcagagaagaaccaccctctctgctaggagctgaacacttgttgggataccttgactgtggaaaggagctgccccctttgggtttcctctgagctgttctattgctcaataaagcccctctttatcttgcttactctccacttttctatgcacctcattcttcttgggtgcaggacaagaacttgggacctgccagatgaggctaaaatagctgtaacacaaacagggctgagacatgccccttgctcaccttgttgcaggtgaagagaaggaaagaagagctgcagccctctggggagcccagacctgggagctccccaagccagggctgtgactccctctttggggccctgcctgcggttcctggtgtctccaaacttctgggtgccaccgtgttccctggtgccagctgtggatgctgcttgtggtgttcatggtccagctgcagcctcacagagaaagagctgatgcccatgctggcacctggagctgcgtgccctgctgcagctgccaggatgtctgattgcgcagtgaccggaccccacacttgctcacataccccttgctgcttcatccagtcttccttggctatcataggacacaggccagtagcatgagccgagtgtagccggccaggccaaataggcgggacaagcccagcaggcctgagcaaaactctggcacaggtgccaccagccgcagatgtttctggccagaaaagtgacaccccaaagattctgtaacactggcatcataagaatgataaatcttatggcttggcctggtggctgaaggaattgtgtactttaaatgggtaaattatatggtgtgtaaattgtatctcaaggatgtttaatgttttatcactggcgaggtgcggtgacttatgcctgtaattccagcactttgggaggctgaggtgggaggattacttgaggacaggaatttgagaccagcctgggaaacatagccagaacccatctctacaaaacatttaaaaatcagccaggcatggtggcatgtgcctgtagtgccagctaatcaggatactgaggcaggaggatcacttgagcccaggaatttgaggcggcagtgagctataattgcaccactgcactccagcctgggcaatagggtgagactctgtccctagtaaaaaaaaaatgttatcttctaattcatgaacatgaagtgtttttccattgatttaggtctttaatttctttcaatagcgttttataattttcagagtatgttttgtacttctttttttttcaaattatttccttctaattctgttataaatggaattcttttcttaatttcattttgagattattcattgcaagtgtatagacataacattgatttttgtttattgtccttgtacccatcaatcttcctgaactaattttattcccatagttcttttattattattattattattttttgagatagtcttgctctgttccccaggctggggtgcagtggtgcgatcttggctcactgcaacctctgcctcccaggttcaagcaattctcttgcctcggcttaccgagtagctgggattacaggcacctgccaccacgcccagctaatttttgtatttttagtagagacagggttttgccatgttggccaggctggtcttgaactcctgacctctggtgatccgcctgcctcggcctcccaaagttttgggattacaggcgtgagccactgcgcccagcctattccaataattctttagtggattccttaggatcttctatgtatgagataatgtcacattctaataaggatagttttattttttatttttttttgagacagagtctcgctttgttgaccagggtggagtgcagtggcatgacctcagctcactgcaacctctaccccctgggttcaagtgactttcctacctcagcatccctaggagctgggattacagggatgcgccaccacacccggcaaatttctgtacttttagtagagatggggttttgccatgttggctaggctggtcttgaactccggacctcgggtgatccacccgcctcagcctcccaaagtgctgggattacaggcatcagccaccgcgcctggccctctaataggaatagtttcataccttcattttaaatactgatgactttcaatttttttttttaacatgcatgctctgagtagaatccgtagtgcaaagttgaatagaaatggtgagagcagatttccttgccttgttcctgatcttaagggtttcggaaagcattcagtctgtcgccattaagtatgatattacctacctgtgggtttttgtagattttaaaatttcctttcttccttaatttattagaaaaaagatttttttttttttttgagacggagttttgctcttgttgcccaggctggagtgcaatggcacaatctcggctcactgcagcctccacctcctggattcaagtgattttcctgtctcagcctcccgagtagctaggattgcaggtgcatgccaccacgcccagctaatttttgtatttttagtagcaacagggtttcatcatattggtcaagctggtctcgaactcctgacctcaggtgatctgcccacctcagcctcccaaagtgctaggattacaggtgtgagccaccacacctggccagaaaaaaaagatatttttaaagagctgttttaggttcatagcaaaattgagcaaaaagtacagtgagttcccatatgtccctgcttccacacatgcacagcatctcccactatcagcattccgtaagagagttgtacatttgttatataacgttgatgaacctacattgacatgtcattattaccccaaatgcatagtttatgttaaggttcactcttggtgttatacattttaaagatttttgacaaatatataatgacctgcattcaccattgtggtatcatacagaatagtttcactgccctaaaaagattcctgtgctgtgcctgtttcttcatccctttctcccctgtgagcactggcagccactgatctttttactttctccatagttttgcctttttcagattgtcatagttgtaatcatatgtatgtaacctttccagactggcttctttcacatagtaatctgcatttgtttcctccatgtctctttgtagcttgatagctaatttatttctagtgctgaataatattccattgtctggatgtactacagtttgtttatccattcatcttctaaaggacatcttggttgcttctaagttttggcagttatgaataaagctgcttataaagatatttatataagtaaatgaagatgtttacataaaataaagacatttataaatatctccatgcaggttattttgtggatgtatgttttcagcttctttggataaataccaaggagtgtgattgctgctttatatatggtatgcttagttttgtaagaaattgctgaactgttttcctgagtggctgtatcattttgcattcccaccagcaataaatgatagtttcttttgctccatatgcttctcagcagttttgatgtagtcagtgttctggattttggctattctaataggcatgcaggggtatattgttttaatttgcaattccctaatgacatgttgagcattttttcatgtgcttatttgcgtctgtatatcttttttggtgaggtgtctgttcacatatttctttttttttccttgctttaaaatcatgttgtttgttttattgttgagttttaagcattctttgtatagtttggataattgtcttttatcagatgtgtactttgtgaagattttctcccagtctctagcctgtcttctgatttgaagttttctaatatttttgtggacttttgcatctatattcataagtgatacttgcctgtagttttctctatttgtgatatattttttatatcagggcaatactgttttcataaaatgagttgggaaatgttgcctccttttctgttttttagaagagtttgtgaaggattggtattagtccttttttaaatgtttgttataattaagtggtgagaacatttgggccttttctttatgggtagctttttttattgctaatttaatctcatcaattgttacaggtctgttcacacctgtttcttcttgagtcagttttagtagtttgtgttttggaatttgttcatttcatgtaagttatttagttttttggcacacagttgttcatagtattcctttataatccgtttatttcagtaagattagtagtaatgtcctctttttcatttctgattctagtaacttgagtcttgtttcttttttttcttggtcagtctaccctaaagtttgttcatcttttcttcccccacaggtaagttgttacacaatccctagcagattccaactttcatggccaaggtcctctttgatcatctttttaaaaaattagtttttggccaggtgcctgtggctcacgcctgcaatctcagcactttgggaggccaaggtgggcagaccacttgaacccaggagttagagaccaggctgggcaacatgacaaaaccccatctccacaaaaaattagccaggtgtggtggtgcgcgcctgtagtcccagctacctgggaggcttagaggggaggatcacctgaacccgggaggttgaggctaaagtgaaccatgatagcacctctgcactccagtatggacaatggagtgagaccctatctctaaaaaaaaaggaggaaaaggaaaagaactactctttggttttattgattttttttttctattgcttttctatttcctatttcattagtttcatgaatttctgccataatctttattatttccttctccttgattttggtttagtttgctcttattttcccagtattttatggtaaaatgaaatatactttattggtagtatgttttttatttttagtgtaatagtttaaattttcttctgctgggaaatgtcttgcaatatttataaactacaacaggaaatgtttttataccaaagtaatctttacagagatttcatgctttataaggaggggttagtatgcaaaaggagagtgattctagtgaaagaacacttctaggaatattttaatgtgagtagtatgttaacaatactgccagacttcatagtgtgagaatgggtttgtggagttataggtattgatgttctgtttgataatgcatcgaagagataaataatgttctttatttcttcttttttagataaaatcagtggttctggaagtaactctgatatgatggaaaacagcaaggaagaggtaaggataattatttagagatatttgttagttacgattaaccaagtagagcatatgtctttagattgcttctggacacatgtatgtgtcgaaggctactgatacccagttgtcattatacttcagtttcgttgttttccagtttgagaacaggtgttcattgtttctgttattgttgtggttcacttcagtggtttacctaaagtcagacaactgaagacttccaacagatagatattaaactgtctttatattgccccaaaggtgtttgaggtggatgttaagggcatgaactccatggttgtgaaatctctcaaaacttggtatctagagtctgctaagcattattatagcaactcataacaaggtcctttgcctgatacacaggtccacaactgtggttttgggaattttttgacctactgtaaaaaaaaactgaatccagtaaaatatattgattatactggcaaaatgagggtaagtttagtatctcaaagcaagttgtagaagttacttcatgccatatgttagcttagagaagaatgaaacatatttagatccttgaaactccctacttctcttgagatctgattacttctgcatctttgttttgtctttgttgactggggccatgatcattttgcagcagtgtattccccgcagcatgccacagcaaccatgtaaaaaacgagaaatttaatcttcagccaaggaaacctggcagtaaatgagaattagttttaatttttatttttttgcatctgtgttccttatgtggtagagaattagtttttgaagttccttttagaaaaatattctaggcacataaatagcatctcattatatcactgtattgaagttgctatagggaaatagctaattgtagggatgccgtttcgagaattttattcacttttatatttatgtctcacatctagggaactagctcttcagaaaaatccaagtcttcaggatcgtcacgatcaaagaggttggttgatgttgaagggacaaaaagttattttctttttcaggttattttctgtttctaaaaccatgtttttttctgaactcatgtcaaccactattctgagttaactattctatacaaatatacatatttgaaaatgattagcataatataatgaatccctttgtatctatcacctgatttcaacaattattattcattctaactttgaattctaaagggtttttaaggatttattatatattagtggcccttgcaatatgtagtttatttcattagacaatatatgtccttgaaaaaggacaaaataattgttgaatgcctatgaggcagtgggttttttgggttatatgaaattgtctaggatgggaagttagtcatcatagttgtaagttataaggagaaaaaagagtggtaaaaaacacttttttctgctaaattgtcaactcaagtcatacataaaaactgaaacttttctaacataatgtagtacccaatatactatgcagtataattgttattagaagtttgccgcttagtctattggactttcattgtttctaaccagtgggaatgtctcttaaaaaccaagcttgtttgatattaatttattctctgaagtagtgattcttaaagaagagtgtcctccagggtctccctggtagctttttcagaatgcgtatgccttggtcctgctccagacctactgaatcataatcttcagtgatatggtatagacatacatgcttccctaggtgattctgatgtgcttccttgttgagacccactgctcaatctcaacatgttatttatgttctttgggtattgttccagttgtcagaaacattcataattctatgaacttaattctttcataggaaaccttcaattgtaacaaagtatgtagaatcagatgatgaaaaacctttggatgatgaaactgtaaatgaagatgcgtctaatgaaaattcagaaaatgatattactatgcagagcttgccaaaaggtaatgtgtgttaatttttcatgaagttaaagttgaaatgaatttttaaacatcatttttataaaattggaacttgattactgttaactatgtacaaacgaccaaacatggcattttcctagtggttgtctagaaatatatttgtatgccaatgataatatgtgttattgaagttaaaaatttggaatattcagttggttttgtaaagaatgaaatctatttttttctttcctttgagttttagacaaggggctttagtttccaaattatacttcagtgtgtaagcaggtttaaaaatttaatatattaggttttggttcagtcaatgttaatgtgcttgctttatacaaaaatgtaatgactgttcctgaaaacttaaaaatcatgtacagtctagtttagtcttattgcattcttaaattccctaaggctaaaagctgaagttaactatcatagatagatttagttgtatttcttgctgttatcttttttaaaaaactttgtcacatacctctcaactgttgaagttctaaccataaaaccttgttaataagaatagggaacaatagccaaatgaatatcttggactcttcatagctcaagtctgagagcaatataattggatgatgagaatgacagggaacttggttcaaagagtcaaattttagattttttttctttgttaaataatatgttgtagtctcttggcacatttttcaaattcattctcatagatcttttacagcagtgcttattaaaccttgttccctgtctatgtttttatgacatattttcaaattatggaagtttaaaaaatacagtaggtaggagggatgggactttccttgactaggataaattagaagttacaaaaggtgataaatgaaatgaggaaaggaaattaatgaaagaagagagataggggcctaccgcttacttagttttgcaaatcatttatgacaattttatgtaatggttttggtggccaagggcagaaacaactaacatgggagtctaagtcccataggtggtgacttactttggatttttacattctcagtggttgtcactgggagtgtttatgatgtaagaaataggaattcaaacttttgttttaattgtactgtggaagaaagtcagcatatgatgttactaacctgaactatgcctaattctgtcagaccaaaacaaaaacagacccgtttcataaggttaaatttgggtgtttatattattgttgtaatatttattgagtatgtataagtaccaggctcttacagaattaactcctttaatcctcaaaacaacactgtaaggtagttattattttgcttgtagagataaaggaacaaattcagaacccaaggaactttttcagctttaaattgagaagctaagatttcaacccaggtctgcttgaatccaaagcctagtgagtgctcttttcactctgctgctttgcttccaattctccctagaagaaatctagggagaattcagtttttttttttttttgtcgttgttgttaatttaaaatctttagttcttttcaaatgctggggcttctctgagtgtctacatgcaatgattgctgtgaataacttttttttggtggggattatttaattttactacaatctgtaaaatctcaatcatctgtgtcctccccccccccaccctttcagagactcagaaactcatttaacaactagatgctataacttgtcaaaatttgcttgttgaataacatagagccatatttcagagaaagcccctggtgactacctgcttttttttccttaattgttgccaatgatagccagttactaagcccagcaatgtaggtaaacattgaaacctaaaccctttttactatgcctgtcttatttgctcttgagagaactaatgaaaacttaaattgacagcctctctcttcaattcacatgttttatagttaaggaaggacattctttctaaaatattaacatagggatcaacaaatgatctcattctacaatttattgttagggtacttcagctaaagtatcttaatctgttaaaactctttaaggactttacagagtagtgaaactttgacataccagttgggaaatgctgcagtatagatacaggagtaatagaatgaacttcatttcccccaccaatacccctcccttgcaatataaaactacccttaaaaatctttctgagtttatgatttggattatgaaaataggatgtctttaaaaattttttccctctgaaccacacatattttatgaattctttatggaacttagcatagatgttcatattcataacagcttttgtgataggcactataaaaattcagaactgggttgaggctttctgtttgattcacacatttgttttgtaatcactccataatacctccctttcctgtttttatgaactatatttcaacaaataaactgttgacacctggcccttttactatttccctgttttatttacttttgtgaggtccttacaccaatatctaaagcttgaaagaaacaaactatgtaccagcaatgttggctttatctgaactgaagtcttgtacttcacttgcacatttaatatgtgtaatggttttttaaatgaaatcattctaggtacagtgattgtacagccagagccagtgctgaatgaagacaaagatgattttaaagggcctgaatttagaagcagaagtaaaatgaaaactgaaaatctcaaaaaacgcggaggtaaatacaagtgaaaatgaaacatgaatttaaattgctgtttatgaccatattggaaaatcggatgtgcttactaaaaatacctccacttttctgccttttgtttattaaaagcactacttaaatataacttctgtttctctctgagctctgaagcagaaaaggttaagcaccatttatcgaaacacctttgccttcagtggctattaagttatctcaagaagcgtagcatttccttcttccacatgttctataatacatatatgccataatactatgttttccccccaaccctaaaataattttagattcatgcaaaatcttgtctgtggcctacaggtaactttatatatatttagagttggatagagtgacgtacatctgcattagtattagttggggtattataaatgcaagtcccttgactccactcctcacaaattagaatttctgttgatgaggtcaagaatgtactccagtttgttcttgtgtacactgaagtttcaaatccactaatctaagaatggcaacatggacataagtaggaaggagtagggagctagagctgataaccctccctctgtcttccagaggcacctctccctttgtctgtctatcttcccttaaacacacaaacggtggggagtggtggctcacacctgtaataccagcactttaggaagccaaggcaggagaattacttgagtcctggagttcgagaccagcttgggcaatatggtgagaccccatatctacaaaaaataaaaatatcagctggacatagcggcgcatgcctgtagtcctagctattctggaggctgaggtgggaggatcacttgagcccaggtgatcgaggctgcagtgagccgtgattgcaccactgcactgcagcctggatgacagagtgagaccctgtctcaaaaaaattaaaacacacacacacacacacacacacacacacacacacacacacacactctaatattggctaaccatctataaaaagtttgcatcagaaggattcatttagaaataatagtggactatgtgtcccacttgtttgtgtgtgattcttaaatggtgcctatatatattttggggcagcttaataaagccagaattcataactataaaaggaatgaatctccaaatgatagaacatgacactaaatttctaagtagaagtgtagtgaaagcatatccatttaatattgatcagattatataattgtgaaattatagtgaagttcttatattggtgaaattttgtgtggatttttattttaatgctatgattatcttgctggaaccagtaaaatatatctatttttataacatattttatatattcattttccgattaaataatttgtaaggttgttggcaaaaataaaggaaatattatatagtcttttgtccacaaaggggtagtcaactccttttgagcataaggaatctttctgagaatctagttcatggtagggaaactgccattgcagcaacagagctcattaaagctaaggtagtagtcttaaaatttaagagaatcctcaattataaagtgatggtaaagatcagtagtaagagtttctttcctctgatcataggttctctagagaagacaaataactaagtgttctgcattgtgtacacttagtgtacagagtgtctaaatggtgttatttttgggaagggaccctgtagcagtcagtgtctgaaatgtggataagggctgaaagaataaaagaaccactgttgttgacgagggtattcctagtgccactttggtatgctgctgacatttggtctcagctgataagtttcaggaacattttattgaatgatctgtgtaggaatgttttggtatcacgcttaagggaatacatgcatttatagccatcagtagcacttaaatctttcacatctattttcatcttaatgatttgttacatttttaagctgtcagaaatcacacaggaaatttaacactaggtttactttatatacacatatatagataaattggtgatctgaaatactgaattggtgtagttaatatttaaactttttaagaaagctggttccaaattgaagcctaacttaggaaactgtcaagaatgtaaactttcttgtattacaagaaatgtaagacattacaagaatgtaagacaatatataaagtcttatattgatttggaataatattataacacaaagatacggttaaagttaacatttcaggagctgattttttaaaaaattttcagtatcataccctattttgacattctcttcccagtttaattgttagaaagtatattttacacctaacttttttacatgacacaataattttgttctatttaaaaccattaaaatctattgagctcagaaatgaaaatgcctcttttccatttataccctgtgttacaattttaaatatatttcataattaaaaataaaaaatttaaacatgtatacagcaacaagtacataaagtaacatttcaacattttaccatatttgcttcagatctcacttaagtaaaatattggttcagtcctactctcatccatttccccttcttcccaccccacaggtaatgattatattgaagttttatgcatgtgcatgtgtgtgcatgtttttctatgttttttatatatgtattcataaaacatttttcatttaaaagtataacaaaataatatgctgtatatatcatttgggaacgtttttcatttaacattgtttttgaattgtattcatgtcagtaaatgtacatctagtttgtttatttttcactgctctatagaattatgttatatcaataagccactattcatttcccacataggaagttattcccaatttttcattttctaattttctaattagtgctgtggtgaatatccttatatttgattccttgtgcacatgtgggagaaaatctccaaagaattacctagttttgtttaattcttgagcgatgtatgcaccaaagcacatagaagatacttagtaagtattacttaacactggatgaacattcagattctacattttatttatcttgttagtttatctgaatgaaatcattgtttgaaatgaaaaagtatggtgtggtgtatttgtttctgttaaaacaaatacagaatatatgaatacccaagatcaaactggtgtttgtaaataatgtgattataatacattaggcttgtaatgcctgctattaggtaggttgagataggaggattgcttgaactcaggcgtttgaggctacagtgatttataattgtgccattgtactccagtctgggtgatggattgagaccccatctttaaaattaaaaaaataaataaataaaaatattagcaacataaatagtaaaccttcaagtttacttttctaaaaaagtatgatggtgttcttatacattaacgtttttagcttctggctaggtgtggtggctcacacctgtaatcccagcattttgggaggctgatgccagaagattgcttgagcccaggagttggagaccagcctgggcaacacagtgagacccagtctttaaaaagaattagctgggtgtagtggtgtatgcctatagtcccagctactcaggaggctgaggtaggaggattgcttgagcctgggaggtagaggctgcagtgagctgaatttgcaccattgcattccagcctaggtgacagagtgagactctagctcttaaaaatttttttaaagtttctacaaataaaaatattcatgataatatttgggtccatggcgctttggaccttaaacctaacagaaacccaaaagagaaaattaaaagggtgaaaaatatatgtgatgttttgttttttatttaaggatggagccaatttgttttttagttgtctcctttttatttgtgaatgtaagcattttgagtgacttctgaattataatctaccatcttattttgatcaaggtcttggttgcacatcaggatcatctttgaaactttaagaaaatgcctgagagattttaattcagtggtttaggggtgggaatggctgtttttaaaaagattcttcagatgactctaatgtttagctcagggtgtgaaacactgccttagcagaactagggacaagagggaggctggagaggtttctgtaggttttcttcagtctgtttatcaggagacagtacagaatgggactctgcctttttcccccagtcgttctgatgttttgctgccaaaatagatatacctgcaatgtcttgtttgtctttatttggaaatagtagacagtattgatatggagtggatagtggagtacacatagaaaaaaggcagtttaatgacaatttatgtatagtgttgaagtaaatattagcaaggaaattggtaatatcataaaattaccaagtttttacataccatattgataggatctgtgcagacaattccaatgagaataaaaacctttatggcatacttaagtgtaggattgcaaaagaatctgttccgtatatgttacttacttccccattctttaaggactgatactgaatttatttgcaaagcaataacaaaataagagctcttggcccctagttttagaactttttatgggttctcttaatgttatttcaagttgtaaaaaatggcatttgcatctgtaaaaggaaacaattaggatttgtaacttggaatttgccaaggttgtcatgtgcttagtaagtcgataaaatattaaccttttttacttgtgtccaatatgccatttttctaaggattatgaggtatttcatgtctaatacaaaagttacaaaatgctgactaaagtaagtatctttttctgtgtataaatgtgtgaataatagccactcctttctcctagaagatgggcttcatgggattgtgagctgcactgcttgtggacaacaggtcaatcattttcaaaaagattccatttatagacacccttcattgcaagttcttatttgtaaggtatgtaatgatctgttgatatttcataccgtaaatatttgaatgcttaccatataccaggcctttgagggcacagtcttgaagaaagatgaaaatggtatctgcccttggaagacttctactatagtggggaaaatagacgtacaaagcctaagtgtcatgataggggagatactgtgattatgggagcacaccggaagcctgtgtaaataggatttggatggctttctagtggaaagctgtatgtgaaatatgaataagaatcagcctggtaagtgagattggttcatcatgttctgggaagaggcaacatagtattcagatactggtagttgagggagagcttggtgtgtttgaaaatctcaagagtggatgtgtgtaatgtttgtgttttataatctttccccttatatatcctacttccccaaatgtaaactatctatgtggagcagggttttgacataacttggagatgatagaattaaaaatgttttttatgtgttgattataattttaacagtctgtgccacttttttgttagtaataccttggagttaattttaaatatctataaatgtgggcctggcatggtggctcatgcttgtaatcctagcactttgggatgctgaggcaggtggatctcctgaggtcaggagttcgagaccagcctggctaacatggtgaaaccccgtgtctactaaaaatacaaaaaattagccgggcatggtggcgggtccctgtaatcccagctacttgggagactgaggcaggagaatcgcttgaacccgggaggtggaggttgcagcgagtcgagatcgcgccattgtactccagcctggacaacaagagggaaatttcgtctcagtaactacctacctacctataaatgtcaaggttatggttttcttaactcatattcctgctaagattaatcctatgttagtttgtttcccaataaaaagctgcctttgaaatgcagtggcaggccatgttttccttggaattctagctctagatcttttcttgcatgaatttttgatagattcagacatgcttaaatgaactgtactttgttctttagcaatttgtatccctcctttccttgaattcagttcagccaggggcctatctagggtatgtattagagagtttcattttaaattgtgacagtagaatctaatattgctggatttgtgacatgtatttgcctttctgttttcttatctatgtgattgtcttttttcaagaaccagtctgttgagcctaggccatttcactaatcggtagtttgtatcagtgagcaccttttccctttctgcagtcccactggaaagactttgaagtcagtcaaacttggatttgaataacagctttgcctcttactagttgtatgactttagatttatttacatattaatgaaagttagccttttctctcataatatgtcctaccttgcatggtaggtatttggtatttaaagataatatagattaattgtttagctgtatacatagtagctgtttgtatatggtggctattaaaattgttaagtacccaaatctaatacatttttatgtagagctttagtagctagatgtatgagaccagaaattagctttactaaaatcttttgtaaacttttttttttttttttttttttttttgagacggagtcttgctctgtcgcccaggctggagtacagtggcgcgatcttggctcacgacaacgtccacctcctgggtcaagtgattctcctgcctcagcctctcgagtagctgggattacaggtgtccactaccacacctggctaatttttgtatttttagtagagacggggttttaccctgttggccaggctggtcttgaactcctgacctcaagtgatccacccatctcagcctcccaaagtgctgggattacaggcatgagccaccaaacacccagccaaaaatcttttatacacttttaaataaggaatagtggtacttgagtgtatggaaatctgtttcaaggcattaattcttgagatagttagatgtctggaaaatacagacattgggtagtgggtagcagtgtttattttatttatttatttatttttgaggcggagtgtcactctgttgcccaggctggagtgcaatggcgtgatcttggctcactgcaacctccgcctcagggttcaagtgagtctcctgcctcaacctttagaatagctgggattacaggcgcttgccaccacgcccggctaatttttgtatttttagtagagactgggtttcgccatgttggccaggctggtcttgaactcctgacctcaggtgatccaccctcctcgtcctcccagagtgctgggattataggcatgagccactgtacccggctgcagtagtgcagtgtttttgctttgagtctctgaaacatgcacacatactcccttttttaaaaaaaaattgtttgtatttttaaaatttttgtgggttcatggtaggtgtatatatttatggcatacatgagatgttttaatactggcgtgcaatgtaaaataagcacattgtggaaaatggggtatccatcccctcaagcatttatcctttgagttacaagcaatctaattacattctttaagttatttaaaaatgtacaattaagttgctattgactgtagtcaccctattgtgctattaaatagtaggtcttattctttgtatttttttgtactcattaaccatccccacctcctccctatcccctcactacctttcccagcttcttgtaactgtccttcatgacatccttcattagttcatccatgagttcaattgttttgatttttagatcccacttataagtgacaacatgcagtgtttgtctttctgtgcctggcttatttcacttaacataatgatctccagttccttccatgttgttgcaaatgacaggatctcattcttttttatggctgaatagtactccattgtgtatatgtaccgcattttatttatttacttatctgttgatgggcacttaggttgcttccaaatctttgctattgtaaacagtggcccaacaatcataggagtgccagtatctctttgatatactcatttcctttcttttgtgtatatactcagcaggtggattgctggatcatacggtatctcaatttttagtttttttgaggaatctcccaactgttttctatagtgattgtactcatttacattcctaccaacagtatacaagggttcccttttctccacatccttgccagcatttgttattgcctgtcttttggatataagccattttaactggggtgagatgatatcttattatagttttgattaacatttctctgataatcaatgatggtgagcagcttttcatatgcctgtttgtcatttgtatgtcttctttggagaaatgtccagtctaatcttttgcccattttttgattggattatttgattttttcctatagaattgttggagctctttatatattgtggttattaatccattgtcagatgggcactttgcaaaatgttctcccattctgtgggttgtcttttcattttgttgattgtatcctttgctgtgcagaagctttttaacttgatgtgatctcatttgccaatttttgctttggttgcctgagcttgtgtaatatgctcaataaatctttgcccacaccagtgtcctggagattttccccagtgtttttaattacttaaaaaaataaagtttttgtcctttatgaatgttatcaatttcgaattaaatttccccttcctcttttcttttaatagaattgctttaagtattacatgagtgatgatattagccgtgactcagatggaatggatgaacaatgtaggtaggtaatatagatgagctaacattcagtgtttcctacttttgggaggaattgttacataatcatttatgaggtttgtctttcatagtatcgtcattgatgtctttaatgaaaggttgttcttttccataaaaccctggatttatgtctagtttaagtttctaataaagagtaagcagatgacctaaattaccactaaaattactggcagtaaaatttaaattgcattataacaaagagattaaaatgagttttgttgggaataatgtttatttttatttttttacatatcttttcagtttcctgaaagaagggaataatgttttaatctttaaaacatttcaggtggtgtgcggaaggtggaaacttgatttgttgtgacttttgccataatgctttctgcaagaaatgcattctacgcaaccttggtcgaaaggagttgtccacaataatggatgaaaacaaccaatggtattgctacatttgtcacccagagcctttgttggacttggtcactgcatgtaacagcgtatttgagaatttagaacagttgttgcagcaaaataagaagaagataaaagttgacagtgaaaagagtaataaagtatatgaacatacatccagattttctccaaagaagactagttcaaattgtaatggagaagaaaagaaattagatgattcctgttctggctctgtaacctactcttattccgcactaattgtgcccaaagagatgattaagaaggcaaaaaaactgattgagaccacagccaacatgaactccagttatgttaaatttttaaagcaggcaacagataattcagaaatcagttctgctacaaaattacgtcagcttaaggcttttaagtctgtgttggctgatattaagaaggctcatcttgcattggaagaagacttaaattccgagtttcgagcgatggatgctgtaaacaaagagaaaaataccaaagagcataaagtcatagatgctaagtttgaaacaaaagcacgaaaaggagaaaaaccttgtgctttggaaaagaaggatatttcaaagtcagaagctaaactttcaagaaaacaggtagatagtgagcacatgcatcagaatgttccaacagaggaacaaagaacaaataaaagtaccggtggtgaacataagaaatctgatagaaaagaagaacctcaatatgaacctgccaacacttctgaagatttagacatggatattgtgtctgttccttcctcagttccagaagacatttttgagaatcttgagactgctatggaagttcagagttcagttgatcatcaaggggatggcagcagtggaactgaacaagaagtggagagttcatctgtaaaattaaatatttcttcaaaagacaacagaggaggtattaaatcaaaaactacagctaaagtaacaaaagaattatatgttaaactcactcctgtttccctttctaattccccaattaaaggtgctgattgtcaggaagttccacaagataaagatggctataaaagttgtggtctgaaccccaagttagagaaatgtggacttggacaggaaaacagtgataatgagcatttggttgaaaatgaagtttcattacttttagaggaatctgatcttcgaagatccccacgtgtaaagactacacccttgaggcgaccgacagaaactaaccctgtaacatctaattcagatgaagaatgtaatgaaacagttaaggagaaacaaaaactatcagttccagtgagaaaaaaggataagcgtaattcttctgacagtgctatagataatcctaagcctaataaattgccaaaatctaagcaatcagagactgtggatcaaaattcagattctgatgaaatgctagcaatcctcaaagaggtgagcaggatgagtcacagttcttcttcagatactgatattaatgaaattcatacaaaccataagactttgtatgatttaaagactcaggcggggaaagatgataaaggaaaaaggaaacgaaaaagttctacatctggctcagattttgatactaaaaagggcaaatcagctaagagctctataatttctaaaaagaaacgacaaacccagtctgagtcttctaattatgactcagaattagaaaaagagataaagagcatgagtaaaattggtgctgccagaaccaccaaaaaaagaattccaaatacaaaagattttgactcttctgaagatgagaaacacagcaaaaaaggaatggataatcaagggcacaaaaatttgaagacctcacaagaaggatcatctgatgatgctgaaagaaaacaagagagagagactttctcttcagcagaaggcacagttgataaagacacgaccatcatggaattaagagatcgacttcctaagaagcagcaagcaagtgcttccactgatggtgtcgataagctttctgggaaagaggagagttttacttctttggaagttagaaaagttgctgaaactaaagaaaagagcaagcatctcaaaaccaaaacatgtaaaaaagtacaggatggcttatctgatattgcagagaaattcctaaagaaagaccagagcgatgaaacttctgaagatgataaaaagcagagcaaaaagggaactgaagaaaaaaagaaaccttcagactttaagaaaaaagtaattaaaatggaacaacagtatgaatcttcatctgatggcactgaaaagttacctgagcgagaagaaatttgtcattttcctaagggcataaaacaaattaagaatggaacaactgatggagaaaagaaaagtaaaaaaataagagataaaacttctaaaaagaaggatgaattatctgattatgctgagaagtcaacagggaaaggagatagttgtgactcttcagaggataaaaagagtaagaatggagcatatggtagagagaagaaaaggtgcaagttgcttggaaagagttcaaggaagagacaagattgttcatcatctgatactgagaaatattccatgaaagaagatggttgtaactcttctgataagagactgaaaagaatagaattgagggaaagaagaaatttaagttcaaagagaaatactaaggaaatacaaagtggctcatcatcatctgatgctgaggaaagttctgaagataataaaaagaagaagcaaagaacttcatctaaaaagaaggcagtcattgtcaaggagaaaaagagaaactccctaagaacaagcactaaaaggaagcaagctgacattacatcctcatcttcttctgatatagaagatgatgatcagaattctataggtgagggaagcagcgatgaacagaaaattaagcctgtgactgaaaatttagtgctgtcttcacatactggattttgccaatcttcaggtatgcaaaaataaataaaaaattcataatttgtacttccccctcttgagttactacattgtttaatttcctctgaagctaatcaaatttagggttactacttaggagaataccacttaaaaattatttaggagtttattaaaaaaagtttccctatttatttttatgctgccattggaagatattttgaacattgctagtattcagtatcagggatctcaaatttgttgagtaaatgacaaaatttctttatcaatgtttagtgcttttctctggagtaatgagcagaaggaaaagcggactggtgccagtggttcagtagctatttagttatataatggaagtgagtgcttggtactggtatgacatggtgtgtcaaaattttaactgccatgcatatggctttttaagtttgaacagataactttgtgtctcatgaaatcccctttaattatttttaatttacctcattaaaaccctttgttgatgcttattaactagtttctaatgacatgaacagatgtttttcttttaaaaacactgtcaaaatgaaggaagaaaatccaaacattagctggattagcctaccctgatgaggtagagtactaggaacattaaagtttgggtcagctggtgaatgaaaatatttttatgaattaattaaaatctttaaaatttatgaaaaataattttaaaaataagtttttattattgaagttattttaaaaatcagttgtataataaatgtgtattggtcatttgtctttttttttagtcagtaagacctgtcagttctatggatactcagaatttatttaaaaatgtttataaagtgggttttacataaaattgtatttccaacataggtagaatttaaaaatttttccttccagttcttatgttacagttttcaatttatcccaattggattttaatggaattaatttgaatcttggctattttttaaattttaatttttaattttgtagagatgaggtcttgctatgttacccaggctgatcttgaactcctggcatcaagcaatccttccacctcggccttccaaagtgttggaattacaggcatgagctactgtgcccagcaaaatcttgttttttaataaaactttacatttcttttatggagtacttatgacttgacttgaaaaccacatgtgatatgcagtgtgtgtgtttcaattgaatgctctgctatatcagatgactagatggagctctgtttgtgtggctattgtaacttcaagttcacagtttcttacctgaaattcttggggtctgttgtgtttcagaatttgcaactttttggtttttagaaaaataatagagagaagttactatatattttataaaagctccagtggggcctgatgcagcaccagataatcaaacacatagtatttctgcagcaaaacatttgaagattcacatttaaaggaataagcagtttagaccaggttttgctgccagattgtctttggtaccctcttacagaaactttccattttgagagtgttttagatttcaaaattatatataagggattgtggacttatattaaaaatacagaatctaatatttactttgatgtcaaatcaatgttttagttgttaggttagctgtgaaaatccttattaaggattagagtttaagaataataaattgtgtttaaaaattagttaaaatccattaaaaattatatgtcactgagctaattttatttctggttttatttatttggatcttctctctttttttcttagtctggctatttttaaactttggaaaattggtttctgtgattaaacagtttcactggtgaaatcagtatgtttgatttcaagtattttactacttttcttaagatctcacttgatttattgatacctatgaaagtttctgttatgcacctctcatgttgagaattattaatatttagtgtaataattaatatgaattcattaggccttaagaagggatggtgatatatggcaaatactcaattgatgcatctcttgataattacttatctcagcactgatctagatcactgtgttccattttgatttatttaactttgatctgaaggacaaataggctgatggggagtaaactttttctcaggtgtgtatcaagagaaactttgagaattcgtcacttcagcaaattccaatccttcaactgcttggtgaaataagccttgttgagattttctttaccctggatatttttgggggctaagctgattatttgggatgaaataagaaagaagataaatttgttagggaatttaacctgtgaaaaattgggccttgtcaatagaaacaagtagaatagaatatgagtgccttgaaaataagcgctgtaaaaagttctgtttttaaagataagtttgcgtgtgagccagtgttatgatattccttcagaatttacttacatgcttatgtaagcatgctgaatttatgtactcctctgtctaacttaattttaggtcacagttttagaaggttaaaagaaaaaccctgccccctattgagtttagaggattccagtttattcgcagtatttgggtatcatattacagctacagtattttcctagaaattggggcttggtaatggcatgaataaccaagatgaagaacatggtcctaggagattgcagtttaatgcaagacagacatagagaaatcattaaaaaaagtaacagaagaaagatataaaactagaatggggcctgtaatcccagcactttgggaggccaaggtgggtggattatctgaggtcagtagttcaaaaccagcctggccaacatggtgaaaccccatctctactaaaaatacaaaaaaattagccaggtgtagtggcgcacacctgtaatcccagctacttgggaggctgaggcaggagaatcgcttgaacccaggagatggagattgcagtgagccacgatcgcgccactgcacttgagcctgggcgacagagcgagactccgtctcaaaacagaaacagcaacaaacacaacaaactataatggggctacacaataaatggcaagtgaactacttaaatatttggggaaatatttagaagaatagttggcatttgaacttcaaaggataggtcaaattttgaaaggtgtagtaaagagggagtgacagtactgttactaattatatttcatttgaagattggtctgtttgaatgagatatttattgtgagtttgctgggatattatgaaatctcttctctctctctgtctgtctcttttttttttttttgagttgaagtctcactctgccacccaggctggagtgcagtggtgcaatctcggctcactgcaatccctgctcactgcaacctctgccttccgggttcaagcgattctcatgcctcaggctcctgggtagctgagattacaggtgcatgccaccacattggctaatttttgtattttcagtagagacagggtttctccatgttggccaggctggcctcgagctcctgacctcaagtgatccgcctgcctcagcctctcaaaatgctggcattacaagcttgagccaccacgcctggccttatttagtgtatttctatcctgagcctgtaggtgtctgtttcctttatagattttttcctccatttcccttcaacattttattgtgaaaaacatttaagtatacaccaaagcatctaccattaatattatactgtattttcttgataacatatctatatatccttctgtctatccatcagtatatcttttttttgcctttttagctttttattttgcataattataaatccacagaaatttgtaaaaaaaaaaaaaaatacagggaggtctcagataacctttacttagtttccctcaagggtaatatcttgtaactctagtacagtgtcaaaaccagaaaactgaagatttattcagatttcaccagtttcacatgcactcatttgtgtgtgtataagtatagttcagtgcagttgtaccacgtgtgtatctttgtataatcaccaccacaaccgatatatcaaaccagttccattatcacaaggctcccttgtgatactgctgtccttacctccattcctgacatctggcaactagtaatctgttctttatcactgtaattttgctattttgaaatggaatcatgaagtatataaccttttgagattggcttttttcacttagtataatacccttaaaatctttgatgcatttcagattaaacggtagacatcagcatacttctcctgaaacacttaagcatgcatagtattaacctacagtttaatatttcagtttttcttttgaagtaaaatttatatagaatgaaatgcccaaatcttaacctctttagattttttttttttttttgagagagttgttacccaggctggagtgccgtggtgcgatcttggcttactgaaacctccgcctcccaggttcaagtgattctcctgcctcagcctccctagtagctgggattacaggcacacaccaccatggctggttaatttttgtgtttttagtagagacgggattttgccatgttggccaggctggtctggaactcctgacctcaggtgatccgcttgccttggcttcccaaagtgctgggattacaggcgtgcgccacctcacccggccctctttagatttttaatcaaaatatagaaatgcagctttttataagaaaataagttttactgtactgaactgtatctctgggtaactcaggtcacaaataccatacacattcaactgcattttaaaattacttgctactaccaaaatattaatactgtttttgctattcctcgaagatacagcaccagttaacgtcaaaattaaaatggaccagtacgaaggttattgtggcaagaaacttatgctaatatgatggctgttgatacagaattgttactgagaagggtggactttaaaagccttgtgccctgggaaggaactctgaaatatataaggtccagctatttatcattttactgctggcacttcacaaataacctgttatgttttctataagaatgctttttactcatattttggagtccagagtttagaccccacttagtttgctttaaagtttttggctttcagttttattttacatggttttaattatatagcttatttaaagctaattttaagtacacttttttccctcaaggagatgaagccttatctaaatcagtgcctgtcacagtggatgatgatgatgacgacaatgatcctgagaataggtatgattccatctgtaaggactttaaaaagattataacacaccctaggcatgggcacaaacagcagcaacggaacagcaagcaggttgtaaaaaccaggagtgcctgccttagaaagactcgctcacagtcttcctgcaagtttgaaagaaaggccagaaaatgggctaaaactcagaaaccttaagagaaagtaatatcattatttacacacctagcatagggtgtgttataaatacagaactgtcaattttatgttgctatgtaaactgcagtaatttttttggaataatttattttgacagattattgatgaaagtaaatcatatctcagtaaattggtaacaacagacatctcctctatatttgactattgttaattgccatccaatatggtggtcctatttattaaggcctgttgagaagaaacaaaaagagagattactcagatatttaagattaagaaattgctttcaaaataagtgtcagtttacaaggtatctagactgagttagagtttaaccagttttcaaataaaatagaaatacacggtatgagagcatttactttaataagacttaataggtttaaatgtcaacagtgtagcctatacagatatacttaagtaaggggtggctgggtgaagaaaaaaaaagacactatcagtgtagtgaagaataaggaaaacaacagtattaaagactatagctataatgtttcaacataacttttaaacacttcctggacaatagcataccccatgctcataatcttcaacaagaagacagcatggtatagtgcatggaattttggaataatgggcataagggtatctgatttctaacatttttaacaactgtctgtgtcatcatgggcaagtgactttactttttgtcaaaaatttactatatttaagaagaaaaagttgggcgaaattttctgtaattctagtaccaaaaaatccatgatagatttgagatgatttcattaaagagcactacattaaccattcatttattcctaatagtaagttctaacattaagaaaacataaaaatatacatgtaattttctgtcataattttgtaagaaattaactgacttagtaaatgccctgggttcagctgttagtttcgctcttttgtatcttgctgatgctgttaggtttctctgtttcaaaggtcagcattctgctaattaacagaagaatgtttttattaaggtgaatgaacagttttattttacagttttgaatagagcttaattgtggacacaaatattcagattctgcttgcctacttttttaaattaaaaaatgtatatccatttattttatgggataggtggtaggttccagaatggagtgataagggcatacaatttattcatcagggattttacattatatcatcacagccagatactgaaagcatttaaaattttactcttttttaagatgctttaatttttcttcatttatatttgctatttgattttctatacatcatgaggcctcagatgttactcaaaggctaataatgttttaaacattctatatcttaatttaactgtgaatgatttactttaatttcatatttaaccaccaaataagagtgttgttaaggtataatttttttgtgtgtgttagagcttgtcaaaatataaatatcattttcaacttttaagttacctgatcgtatctctctgtaactggcaagtattttattggaaagtatctttaattccaccttgaatttgtgattaaaaaatacaaccctgttgagtacttttgagaagaattgaattttatcttgagcatgtctttctatactcagtttaatttgtttttataaaatatacaatttattaacttgtttaatattcactataccaaagaggtatctaatacccatgggttatgtagtcatgatggggatacaaatactttcttgcactattttagtatagattatatatttgagcatatttgaatatgcactaagcaacttaaaaaattcatttgcagatcacgattaagtcttagaattatttttctaacttcctaatttttgagtaggttgtattttggtagacagcatattgtaattgtatgtaaatttgtacacaattgtgtgtaaattgtgtataaatcttatatgctttgtctttttagcagtattgtaatacattttcagtgttggtgtttatgaagcgatagtgtattattgcaaatggttaactatttggatgcaataaatttttgtaaaccttttttcttgttcaagcatttaattttaataataatgttacttttttatatcatgagagttgacataatttgttattaaaatatagaggctagtttgtagccaaagaagttttgaaattttgaaatttaggacgtaaatacttttaattcccctaacatatatacttatatatatttgtgtgaaagttttacaacagatttaactactatttactttttctgttttaaagctatgatggcttttgggggcatttaaaaaacttagtcatatcctgaatattttagtaaatgtgaatacatttctgttttagcatgctattatgtagcgtcactcatatttgaaagtaaatgtataatattatgagacagtggtctaacctataaattaatttctatttaattggatttacttaatgaacaaggacagaatattatagattgatcaacacttgtatgtttctggtttagctttttataaaaaaaagtagactaatcatatattttgaattttatataactgaaaatttagagcttaggctttatgtagtttctcaatggcagaataataataccaaataggttgtcaggttttcacatttatacacgtaattttaaagtaatatacttgaaagtgccattagggtagggtttcattggcctttcaaatacctgttagttggattttaaattggttctttctctgaaaagacatctattcatataatttatttcaattcaataattagcctggcattgaaaatacaccataattcctttatatgttcaatataactggggatattttgaccaaacattttctaataatatcatatattttaatttaatatctgtactgggaatgagcctcaagtaatacgatagtagtgtgttcaagttttaacagtattagttttgaggatcattaaactaggcttgtctttagagattgcatactgaacaatcactgaagagaccatttatcccaaaaaagaattatcttttgaaatttctttattcgcttattttgcaggatgtgagaaatatttacaattgagcttttgagagcaaaagaccaaagtgctaggtttttctaaataagcattctttctccctgacaactttgactaagagctgagatttctacatggatgtctgctcccctaacaaacacatttactttattgttgaaatgtgcttaattgggtctagtaatactccacattttttctcataatttctctgtgggtgcgactaaatgctttttttttcatagaagcgaaatttgatgtggagattgctaaaaaaaattgtcccattgttatatttaattatattgggactagaccatagcattttaaatttccaactgttgttgtatcatttgatgataattttgtgtttcaaactagaaaatatgctaatgatttttttttttcctactggcttggtgtgggtatgctgttgatgacggctctgtattgttaatccagcatattttcggaggaaactaatgatttctggatgttatttatgcctaagaagatatttaatgattgtttacctgatttcagcacaattaatggcatggatgtatcacaagtcccttaatcgtttgatgttcactttgctttcattttaaacactttttcaaatgtctgtctcctacacatgttgtctattctctatgcaaatttgctaaatttggaataatttttttctgtgattttttttttgtggtagttctgtttcgttagcaaaactgctttgattctcctttattgtacttgaaaaacaaaggtggcgttttaaattaagtattttacttgtttttccatttgagtaagggttttaaatatctagcaattttacggtaatttttttttcaatttcctttgtctgtatagcacaggtaagtattgcaagtcatttaagtataacacaggtgtccagccagtagataggatctacttgtagatatctgaactggctgtagttgttactggctttcttttttctactagaattcccagtcaggaaagacatatgatgtgtagtggtgacctttgtccttctatggtcaagatttaaacattataaccagtgtttctttcttgttctctgttctttggtgatattgggactttcagaaaataagaaataggtcttcctcaaaaaagaaaaaaaagaaaaagagaaaaaggaagagtttggatttctagtgttaggaaaagtgattcatttttctgacttaatatcctttgtctttaactttgaaatttcaaaataaaattttgaaatttgagatgagtaaattctgtgttttcatttttcaagtataaaaatattgaactagttatttaatatgatcaaatttcccatattaatttgaatatattttttcttgttaaaatgcctctaaaactggtttagatttttgtataaaattagggaatacacatgtaataattcaggcctattgaaacataagtctgtatgaattattaataactgtgggttcttaatttcatagtttttattgttctacctccaagatttttttaaaaagtcatttgatattaattttcctggtaccctcaccaaaaaggatacagagctacttttcattaactacccacattgtaggatttgcgactaaaaaaaaatatttcaaaccattgtttagctttttgattatttggtgacttcattattatctcgtgaattccaccattttggggtacagatcattatgccttagttttatatatatatatatatatatatatatatttttttttttttttttttttgagacagagtctcactctgtcacccaggctggagtgcagaggcatgatctcggctcactgcagcctccacttccctgtttcaagcaattctcctgcctcagcctcctgagtagctgagattacaggcacccgccagcacacctggctaatttttgaatttttagtagagatgagatttcaccatgttggccaggctgctctcgaactcctgacctcaagtgatccacccgcctcagcctcccaaagtgctgggattacaggcatgagccaccgtgcctggccagtcatattttttaatagaaaacttaagatactaattttgaacctgagttgaaatatatactaatatgaattttgaagaattccatattccataactttttttttttttttgagacagagtctcgcgttgtcacccaggctggagtgcagtggcatgatctccgctcactgcaacctccgcctcctgggtacaggtgattcacttgcctcagcctcccaagtagctgggactacaggtgcctgccaccatgcccggctaatttttgtatttttagtagagatggggttttgcaatgttggccaggctggtctcaaactcctgacctcaggttatttgcctgccttggcctcccaaattgctgggattacaggcgtgagccatcgtgcccggccacatgttttgttttttaattcctatcctttaaatatatgacatttattaaaacaaagcctcacaccctactaaaatatttaacattccttggctatactcctttgaattattttatatatcaaactttaaaatatggtgtgatgctttagtactacatatacttaggtacctctaaagagcatgcatttaaacccattatcttatttataattctgtaaattaagtactctattatgatattgtacacaaaaaccaatttttaagcaaattttatcaccttgtttatggatgcccagtattttggccttctaaaaatatatttttttccagcaattttcttcaaacctgttctcagaacctcttaaaagataaaatggtcattgtagaatgtatctcagatgacctatcgtgcattttagagtgcatactggattaaatatgtttaaaactccttttatcatctttaaaaactcaagctggttgcagtggctcacacttgcaatcccaatgctttgggaggctgaggtgggaggatcacttgaggccaggagtttaagaccagcctgggcaacgtagtgataccttgtctctactaaaaagaaaaaattagccgggcatggtggtacatgcctgtagttccagctactcaggataccgaggcagaatgattgctttagcccgggagttcaaggttacaaggatatgtgtttgtgccactacattctagcctgggcaacagagcaagactgtctctaaaataaaattaaaaaaaaaattaaagcttgagttcttgcatttctaaatacataaatttaaaatatgcgaaatacacttatttttaaaaatgggggtcagcgcggtggctcatgcctgtaatcccagcactttgggaggctgaggtggatggatcacctgaggtcaggagtttgagaccatcctggtcaacatggtgaaagcctgtttctaataaaactacaacaattagctgggtgtggtggcacacacctgtagtcctacgtactcgggaggctgaggcaggagaattgcttgaacctgggaagcagaggttgcagtgagcctccctcactccaggttgagattgtgctactgcacttcagcctgggtgacagaacaagactttgtctggaaaaaaaaaaaaaaggcatcatctgtatttgcccaggcactcattagcatacaagtattaacaagtagagggtatagtgctggcacagtaaaattaatagcagattgggatttaggatcttaggttctactcctgactttgccactagttagctttgtttctttggctgagtcatttcctatatctaagcctgtttcctcatctgtagaatgacaaagctgtactctgaggtttgtccttctggctctaacattttgtattgcttttgttaatggctcgaaagctccctggtgcaggaggtccttctcttgattgcattttaagaaactcaacatttcgaattattgatttacctatcagcaagaggtggtttactttcctttcctgtttgagcgtttaaacaagcgacattactcatttcctttctagataggattggagttaataaaggctttcttggctttctcctatgtttttttttttttttccccgattgcttgtttgtcattgtgttgttgggctcacttcttattattttatttgtgctttcttttagtaatggtgttatcttggtgttcattatgtactttggaagacttagtatatgtgggttttggggtcctatttattttctcatgcgccagttccgatcattgtttgtttgtgggtttttacccttcctcccatattgttttgctttctccccctctcccttccctccctttcaggaaaatggaggagtggctccattacttctggctctgcccaggttttctgccacaagagtggcacggcctgtgcctctaatgcttctgatagagtcgtgactgctttggatgctacacctgccccaagatgtaatattgagcattgagattccaggggcagtacatcgtcctggaaagcctcaagaaaggaaacttcagagcaaacagaatcaactagggatcatgactatacatccagcatgatccagcatgggtccagccgaggcctccaaaatgatgctttgccagcctcagctggttctcaagtgatgatatccttgaagtctctgtggcccgtgactccagagttaaggtagtggagtttccctttaaagcatctcacagcaggctttgtagatgggacacatctcacttcaacatgcttgctggctactcaggttgaaggtcagcctcagcccttaggtccgttaaattaagttctaattttgaaatgtaggttattatgttataggctaggtttatggtagactgggtctttgacatattggacttcagtaataacttatgcaaaatgattcaacttattctttttagggcttaatttacatagctataaattaggttttcctttggacaaaaggtgttagagggcaaaaataaaacctttagccaggtagtctccatcactctgtatataatttgtgatttggagaaaaatgacctgaagtttgtaattttttggcttctgaatgtactatgattgttctatatgttatgatcttactgaaagttgtcgctaagttgtacttctacagtatgtggatctgatttcactttatatgatttattaataggtatacaattgtattttatctcatgtacatcatatttcttagtctaatgacaatccagaacttgagaatgcattaagtaggtttatgtattgtgactttccgttttttagtagacatattctttggagactgggatttgaaagaagaaaaattgtgtgatttcctacaattaacaaccaaatctttatagttaataggaattttttaaagactttttttgaacttgtaaacacaaactgaaatcaggttgttgaactaggctttcaagtaactagattaggaattgtatttttgttggctgtttagtgttcaacccaaatgatggtatgagatcttgtacttgcaagtaaactgtgtttttccatttctaatccagtattcaatgcttcacatattttatacacacacacacacacacacacacacacacacacacacacacacacatatttattcgtcccaaaattcattattcagattagtttgaggaagtttttctggtccatgagaaatgacagtgtagtattactaaagatggttttaatatataccaacagaaaaaaaaagtgctgtgccagacatagaaatttgctgctaacattttattttagtatcttctagtcttttttagggacatacaaattttagaagttttttttttttaaatagaactatattgtggtttataaattactttttcactgaatattaataaatattttctatcttaatcttatttagaatatcattttaatttctatctcttatggataatcatgtgaaaatactatttaatcagtttctgatattgaatgtttaaacgttttctcaccctttgctattgcagacaacattataataaacatacatgaattttttttttcttttgagacagagttttgttgctcaggttggagtgcaatggcatgatctcagctcactgcaacctccgcctcccgggttcaagcaattctcctgcctcagcctcctgagtagctgggattacaggcatgcgccaccacacccagctaattttcgtacttttagtagagacagggtttcgccatgttggccaggctagtctcgtacacctgacctcaggtgatctgcctgcctctgctttccaaagtgcagggattacaggcatgagccaccacacctggctgaaattttttttaaaaagatgattttagagaatttttccagaaagatgtatatcttcaatttaaagggtttccctttattctgaaactgtttcctaatttggggagggtatgttgtaaatagtctttattttataaatgatgaaagtaaatggaatttgggtttaaatttctttttttggcaaaatgaaaagttggcaaccctgtatttgtcccattttaagaaagcttacagtgtgcaaaccattgatctagaaatgtaagagcaaaactttatagctcaactttagtaagatttaaattggtgtgatctaatcttcactttattgaaatacaaatcagggcagaaatcctcagaaaagcaaacccatctgtggcttcctttagcaattgatgattctgtgtgttgtctaaatattcctgatccatctgtttgagggagaaagcaccaaaaggcatataataaacatttatggaagtgattgcctattttgcttcagtctatttagatgcctttgctatgcatctttgaatatgaatagtaatgaacaatctgtcaaataaaatttaggaggcagctaacatgcattaatatctcctgccattgaatgaattcttcattgaaatgtgggtgcgtgctaagaagtgtaaagaggggtttcaaatccagaaataacaaatgttccatcatctcagctacaagtttttgacttagagagtcagtcttgattgcagagaacatgtttatcccatacagattagctcatggcagactgtcaggatcatgccatcttctttttgaacttttctataagctattttcttgttaccgtgatttgtgaatttatattgaaaggatacccagacttatcaaaacatcttgtcttgcacaaaagctgtatgattgctttaatcttacattttcagttatttttcttgagtataaacatggagatttcctaggaatatattttattttaacatatgatggtaggagtaaaagtagtgttttcttatgcttttagtaattgatttttccattagcaaattggtctttgaggagcatcttgagaaattttgttgtgagtgaagcaactgcactattttttttaaagtaacccatttatggtaattcgtgttctttttaccatgtatgtaattaatagcactcatgtcccttctttcccctgtcttgaatattattagagattatttattgctgtaatacttaacatttgtgtatgctttcatctggttcacagcatttatgtagtacattgaaattaaggtccaaaactatcatcctctagtttgaagcaaggtgtcattatatagtggtttattacacattggttttccaagaatatattttgctgttgaataaaacctctcgtggagttttatcttggaatgccatttatctgaacaagttcatttactgttgttgacctgtctgactttgtagttgtaggatggtgtcagcaaagcaaatagaggattggaaggttatgcagcatcaaattgcaattggtaaaaatagtcaatagaatatgtccttcagagttttcaatatattgcagaattgtatagaattgagaaataataagtgtaaagaacatttttaaaagtttttgtttatagcttaggttaaaacatggttttgctagttgtttatttacaatataaaatctattggcacatttatttctattttgattcaaagaagtctgtttttatttttaatttggtgtatttcacccccagatatatagttctttttttattgttttttactctcaagaattgccaagaagatgcttttagaagaaattaaagccaatctttcctctgatgaggatggatcttcagatgatgagccagaagaagggaaaaaaagaactggaaaacaaaatgaagaaaacccaggagatgagggtgagctccccagagagaagtttataatgtcataatttgattccttgactaattcagtctttgaagaatatctgaccaagaaatatcttaatatggcccggcgtggtggctcacgcctataatctcaggactttgggaggccgaagcaggtggatcacttgaggttaagagtttgagaccagcctgaccaacatggtgaaaccctgtctctactaaaagtagctgggcgtgatagtgcgtgcctgtagtcccagctactcaggaggctgaggcaggagaatcacttgaacctgggaggcagaggttgcagtgagccgagatcacgctgctgcactccagcctgggtgacaaagcgagactccatctcaaaaagaagaagaagaagaagaagaaaaaaaatctcttaatacttgtatttagagttcatggaaatgtttaaaactttattaccatgacttctcttgaatatcttgtaataattatggaagttactctaattttgtcagttactgccaataaacagatgattttttttttttttttgagacagagttttgctcttgttgcccaggcaggggtgcaatagcgcaattttggctcactgcaacctctgcctcccgggttcaagcgattctcctgcctcagcctcccgagtagctggaattataggcatgcgccaccacaccctgctaattttgtatttttagtagagacggggtttctccatgttgatcaggctggtcttgaactcccgaactcaggtgatctgcccacctcggcctcccaaagagctgggattacaggtgtgagccactgcacccggccctaaacagatgattttcaaagcaaaatattttataccttacaaagggttctataaatatataggtgatatttagtcaatatttaataatagtaatatgtcaagtctgatgtgtgagattacctgataacaccaatgataccaaagtatgtgtctaactctgatttttttcataagttgcagtagttgtcaacaggcaaaatagatatacgaggcattttaaaggctgaagaaggttttattgatttatttccttcatttagaagcaaaaaatcaagtcaattctgaatcagattcagattctgaagaatctaagaagccaagatacagacataggcttttgcggcacaaattgactgtgagtgacggagaatctggagaagaaaaaaagacaaagcctaaagagcataaagaagtcaaaggcagaaacagaagaaagggtaagatgttttaattctgaatgtaaagaacatattggaccagacagtggcttatgcctgtaatcctagcactttgggaagctgaggtgggcagattgcttgagcccaggagtttaagaccagcctgggcaacatagggaaacctcatctttatgaaaaatagaagaaatagctgggtgtggtggtgtgcacctgtagtcccagctacttgggaggctgaggtgggaggatcacctgagccccggaggtcaaggctgtagtgagcagcgattgcaccactgcattgcagcctgggcgacagagtgagaccctgtctcaaaaacaaaagcaaaaacaaaaaaaatactggttttgtaaactaattatagtaatgaaatttaagtgtatggccaggcacggtggctcatacctgtaatcccagcactttgggaggccaagtcgggtggatcacaaggtcaggagattgagaccatcctggctaacacggtgaaaccccgtctctactaaaaatataagaaattagctgggtttggtggcacgcacctgtagtcccagctactctggaggctgaggcaggagaatcgcttgaacccaggaggcggaggttgcagcagtgagctgagattgcgccattgcagtccaacttgagcggcagagcgagactctttctccaagaaaaataaaaaaaaaaaaatttaagcatatctgctcaaacagttgaccacttatattaagcaaatgtcagtacactggcaacaagtatactatcacatgagattaaaattaataatttagagtgggaagataacccagaaactttagatgacacaaagaatatttttaacctttagattataaagagaaataaatatgatttaataaataaaacattatgtagaaagtataagattgcatacaactgcagaattagtgctttcctgtagaagggtagaaaatgaaattaatttgggtaaatttatgcaagcttatatgcagaacttgactggcatatagtcagagtagatttccatttcattaaaagcctgagtccttttgcattgagggcttacatgtttccagcagtatggtgggcattgaggatacaaaaatgaataaaaatgtatctcagtgattctgataggtaactaggtttggcagtcactggtttagtaagaattattgacctttgtattataaaaaaattatagcaccatgagggacattttgtgtaacgtaattatataatgtggcacaaagaagggcttctttagcttcttgaggggtaggagttaccccagagaaggcttcacaaagaaggcttttacccaacagattaaattcaaaatgtgggagcacgtagattgttgtgaagatttacaacacaagcagggaaaaaaattttaaaacctgtgtaaaatgttggcacatgatggatgggatacaattaatatagtataagctgctctatagataggagtagggaaaggaacaacaggggatgaagctgggcctgtaaaacagagaccagatactggagatctttgtaagcctgtgtttttcacactggagtactgggtggtataccaaggtgtacatctctttggtgtctctatttataatttgaggtttggggaaggtcattttatgttaaataatatatattgggtaattaaatgtgatatttgcctgcgaattttgggtaacaaaaagttcaaagaatttttttgttgttgctgtggtgggctttttgatgactaggggtaaattttgaagactgttgttagtacccaacccatggatggcagatgaactcttctttgccaactgggaataggaacgcatttttgcaagtgtttgggaaatataataggctctaaaggatgcagagccattgaaaagtttttttttttttttcaattactgtatttatttttgaactctggacctctggttatccacctacctcggcctcccaaagtgctgggattataggcgtgagccaccgtaccggccttatttttaaattttttgtataacagctatattgagatataactcacaaaccacacagttcaccatttacagtatacaatttagcagtttttagtataatcatagaggattaccaccactttaaaaaatgttttatttgaaatgtatgtacaaagaagtgcacattatcaataagtagacatcttgatgaaaacgtagggcacccagatcaaggaacaagatgttgattactaacacccaagaatcacaatctcagcatgaccacttttttccctattgaaagattttaatcaaagatatcatatgatcagattagttccttactattcagtgagaatgaaggcactgaatgtttggaaggtattgctgtagttgatgacaaatggggttgttggagaagaggaagattgacttgagtcttataggaggttgaattgttaggtcttcttaattggtatgaaagggaaaagtctacaatgagtgtcaggtttttagagttgtcatggtgtatgtacaatatcacagaaatagttgaggttattcagtggagttgtaatgttttacaaatggaaagctaaggacatagtcttggaatcctaaacatttatagggcttttgggcaagagttattcactaaagatgagggggagaagttcttgccacacacatatacaattaatatgtcatggacattttaatgttaataaataatagtacatcattttgtgactacttgtcttataaatttcttttttattattattatttttttatttttattatttatttatttatttattttgagtcggagtcttgctttgtcgcccaggccggagtgcagtggcgcgatctcggctcacactgcaagctctgcctcccgggttcatgccattctcctgcctcagcttccctagtagctgggactacaggcgcccaccaccatgcccggctaattttttatatttttagtagaaacagggtttcaccgtgttagccaggatggtctcgatctcctgacctcgtgatccacccgcctcggcctcccaaaagtgctgggattacaggcgtgagccactgcgcccagcttgtcttataaatttctttgcaatatggctgcaagctcttacagattctataaaggaactgtgtgatttagcatgttatatatcacaacatggattcctgtgcctcttcaacaaaaggggcaatattgattttgcttctgaagcttagttcaatatatagacccttttaatatatatgattacatttgagatttgctttattaaaacctgagttttctgtgatctgtgtttctacagcctgattctgtgggtaatttattacccaagtggttttgttgttgttgttttttgtttgtgtaggagagagtaaacttctaaaatctcatcatatttgtgtttctaatatggattgtgatcatagtggttgatatatagttgaagttgcatgattttctgagttttgtaaattctaatgttcctatattatttggaaatttgaattgagagatgggaaaaaatcagtagtgaatagtctgcttattaaatctagttgaattaaattgaaatgcattgaagaggtataagaacaaagtgcaacatgtgaactctaattttctcctaaattagaaaaatgttacaaaattattttagtgacaatttgaaattgtaaatattgccttcatattagatgatagtaatttttttttcagatgtgataatggtatttagttatgtagggcagtatccttatgcttaggggtaaagtgtcatccgcgcttaatatcacatggttcagtgtaagaaaagttgtgtctgcctgtgtgtgtgtgtgtgtgtgtgtgtgtgtgtgtgtgtgtgtgtagagagagaaagaaaaaaagcaaatgtggtaaactgctaacaataagtgaatttaggagaagggatacaagtgttcattcaataattctttcaaatttttggtagatttcaaaaattttaaaatgctgggtgaacaattaatactaggcttaaaattatacttaattacaggatttttttgtgtcagtgtgtgtgtttttggtattctcccagctttccagttgcttagctattctttttttttattattgtggtaaaatatatgtaacataaaatttaccattttacccatttttaagtgtatgattcagtgacattaagtacattcacatttttatacaaccataacttctgtctgtccctaaaacgtgtcgtcattccaaatggaatctctttaaccattaaacaataactctttgttcccctctcccccgacatttctttatagcatttatgttctcccatttatagcatttctgttagcatttatgttctctcattttttaaaaagctggaatagatctttgattctgatctcaggttatgatagatttttttaaaaaattattttgaaacaattcttgatttacagaaatgttacacaaatagtgcagagttctgtgtatctttcacctagcttccctgatttaataccctatcatagtaccatgatcaaaaccaggaaattaatattggtacaatactatcaactaagccgggggtttacaaactgcacctgtgggccaaatctgatcctctgcctgtttttataaataagcttttattgaaacacagccatattcattaatttactgttttcacatatgtacaatggcaaagttgagtagagatgagtagttgcaacagagaccatacggtccacaagtcaaaaatatttactatcaaactttttacataaaatgttttatgacctctgaagtaaactatagatcttattcagagattagttttcccactaatgttttctttctgctctatgattcaatccaggatctcacattgcatcgagttataatgtctccttaatctacttcagcctgtgacaattcctcagtctttactttgatgaccttgacacttgtggagtgttgattccttattttctcaactgttccttgatatatatttgtctaatgttttctcatgatcgaattgagattattatgcattttgacagaataccacagaagtgatgttgtgtcttcagtgcatgatatcaagaatagatgatgtcagtatgtctttttttttgagagaagacctcgctctgttgcccaggctggagtacagtggtgcgatcatggctcactgcagactcaacctcctgggctcaagtgatcctctcgtctcagcctcccaagtagctgggaccacaggtgtgtaccatcatgcctggctaatttttaaattttttttgtagagacagaatctccctatgttgcccaggctggtctcaaattcgtgggctcaagtgatcctctcaacttggcctcccaaagggctgggattacaggggtgagccaccatgcccagccgtcaatatgtcttattactctcacggttaacttttgttacttgcttaagttggtgtctgctggtatttttccactgtaaagaagaaaatattatttttctatctatatttagtattttgttgggagatactttgtgaccatgcatatatcctgtttcttatcatacttaagcccactaattttagtatgcatcttgggtgaagcagttagtactgtggtatttgcctagttgtaattttctatttatttcattacttccacatttagtaattgtaagggagatttgttttcccctatttatttattgcattatttatatcaatatgacttatagatttttattttaccagttataatcaaatagtatcatttattttattgctcaaattgttctagctttggttgttgggagctccttcaagttgaatcttgtgtcctttcaacatgtgcctgcccatgtttgaacactgctttgttttctggcactataagatgttgtaagcttatcttgtatttttttctgccctgcttcctctggccagaaagaggttttctcctggaattttatatgcttccattactgtgttaattgtgagaaaaagaaaattgaggattccacatgtagagcctgattttcctggtgttgtggctagaaatagggatttttcttcacagtcttgttgtcagtaccgtctgcatacctttggaatttagcctgccttctggtcaaaaccaggaaacaaagaaagaaaataaccatacgccctcacagctctctcccctccaccaattgtagaggggtcattattcaagttttgatttcagtctccaatctgcctattattgtttccctttccgagttcttcggttgtgtcatcattggtggagacaatctgtaatcttactccatcttggccagcctaccttgcttgttttgaatagccaaacttctttttcattaatttacctttggtaattacatatattttattgacaggtaatttattcttattctgtcaattcatatacaattgaatacttatattttaatgtacaaccacagttttataattacattagaaatacatctgaattttatgtatatcatgtaaagcattaactggtatattctatattatgtattatccattcacatatatacctctgatgttcttacaatgctctgttttaatgtcgagtcagtggtaaattaagtgaattaggtttctattgaaaaataattaataattttatgtattttttaaaattcaagtgagcagtgaagattcagaagattctgattttcaggaatcaggagttagtgaagaagttagtgaatccgaagatgaacagcggcccagaacaaggtattataattggtttttaaaaaattttaggaattaatctgaatgaccatgccttcaaatgatttatatggttactgttaccaataaagttaagttagtgtgatatataatattttgatttgaaactaattgttatacttaatagtttaaaaagaatctaagcatattttatgtgtagttgaattatgtattctaacctgggtagattttcagtctgcaaaaccactcgtgtctgcagtgttttattgttacgggggaaattgtaggataatagtaaagaggctttatagaaaaactgcctcagtctaactttgggcttttctactttctgtttgtataaataatctatgcttcagtttcctcatctgtaaagtgggggattacaatatacttgactgactattgtgggcattaaatgagacaatacgtgtacaaggtttataatagtacctacctggcaaatagtaagtgctcaatatataaattattggtctcagtagtactacagtaataatgatatgcttgttcttgtaacacgaacagtcactgatctagattacctgtaatttaaaatttggcttccttcttagtatggtatgttagataatactactactacaattttcttatttcccccagaataacataatctttctacagtttatcaaatgaacaatctgtgtgtgtttgtgtatgtatgtctacaaaggtgtctatctgcatttgtaagttttagaacattcgaggtttttttaggttaatacttaccaggttgtgcttagaatatagcaatatattatactttaagtcaatataaaatgaaaatgataagatatgatgagaggttttttttttttttaaaccaagatacaattcagcatgttatactgtggaatacagtggtcttcagaatatttgcaaagttgtgcaacaaacaccactctataatttctgaacatttccatcatccaagaaaacaaccctgtacttactagcagtcattttccattccccatgccctcgtactctaataaacactaaaatctactttctgtctctatggatttgcctgttctggatattttgcatgagttgattcatataatgtatatccttttatgaatggatttttttttcacttagcataatgttttcatggttcatccatgttgtagcctgtatcagtacttcattctttctttaatgattatttttaatagtggtaaaatgcacataacatttaccatcttaaccattttttttctttcatggtattactgggaatttttattttcatcttaacgatttttaagtgtatggcttagtagtgttaagtacattcactttttttgaaccaatctccaaaaccttttccccttgcaaaattgaaatgttactcattaaaccactctctttttcctcttccctgaagcccctggcaaccaccattctattttctgtctctatgaattttactactctaggaacctcatataagtggaatcatacagtatttgtcttttttgactggcttatttcacttagcatcatgtgctccagcttcatgtatgttgaggcatgtttcagaattttcttccttttaaagacttaatgttccattgtataccacgttttgtttatcaatttatttgttgatggacatttgatttgtaaccttttggctatcatgaataatgctgctttgaacatgggtgtagaaatatctcttcaagtccttgctttcatttcttttgggtatatacccagaaaaggaattgcatggtaattctatttttaattttttgacgaactgccataatgtttccatagcagctgcaccattttacatttccattaatagtgaacagggtttcactttctccacatccttactgacagtggttattttgtctggattaatgtagctttgtgtaccaatttctaagcccagaaatatttttctcaccaaaagttgttacttttttttttaaatctctgtgacctgttatgaagaaaacagtattcaaatttgtaatctgcttttttttagtgatgatgaatgttttttagtatgtctattggctgtttgtattttatactagaagaatagtcttaatgtccttttatgcatcttcttactcatataacaaacctcccctcaggatactgtaaaatgttgatcattggattaaaatgaagggttaggctgctgctggaatatccattttgaacctattgattttttttctgtttgtttttaggaatgcatacagaggtagaacagttttaaaatagtacataacttattgatggaagtttatcatgaaatattttattttgtgttttaaattttcgtcaggtctgcaaagaaagcagagttggaagaaaatcagcggagctat

SEQ ID NO: 15472 - DNA, 88602 bp, Homo sapiens
aaatggcggcggcagcggtgtcgctttgtttccgcggctcctgcggcggtggcagtggtagcggcctttgagctgtggggaggttccagcagcagctacagtgacgactaagactccagtgcatttctatcgtaaccgggcgcgggggagcgcagatcggcgcccagcaatcacagaagccgacaaggcgttcaagcgaaaacatgaccgctgagcccatgaggtaaaacgcaaccccgtctcatgggccccagcggtctgggcccaggcaccgtctgagtcgggtgtttgggaaggcgttcgcttggtgggttaggcctgtgtgttgcttagccgaaagaggcatcgttttctctttaggtgagaagggtttcggggtatcggcgcaaggctccgacgggggtgggggtggggatggggtggggggaggtggggggggcgcggcctagggtatggggcgcttcttgcaatctcccctaaacggtgacgcttggtcgggctcctctgtttattctttggtgcctgtgggattgagacctcgaagtcggaggcggtctttggtatcccggtcatttttgctaatctttgggcctagaaactgcgtggggaagaagcggggggagggtgagaagagggggaggggtgggcgggcgcgaggatgtgagatcccaggacgacttagaggcgtttaggttgctggagatgggaagcacccgggccctgcgggattttttttctgcagccccaggagacaagcctttttttgattgggttgtggtgcagttccaggtatttaggtatcttttctactccatatcctgaaggatatccttgggtttatttctaggcgaggggggacttaacacagggttttgcttccagaggaccctagtatactactttttgtgatgtccagccttaatgggacctcaagtgtttccccactttctgggcaaatttcgaggagtaattaggccctatctttatttacttatttattccatgaaggatgaagggcaggttaacgtgggctgatgcgaagtaagatttattgcaagggaaaatgcctggcaggcctcctcttaaccaatcaagcacgtttattaggttgaagctgtttttctgtgtgcttctgatttgcctcttgacgggtctgaaaatttgggtagtcaatatgaaatgtatacacttttacccaggtggctggctggcgtttcagtttgacatttgaattttcatcccacaatgtgaattaagtaatttttttactcggagatgcatccttggcgtccagtggcaaaataaaattacaaggagcatgggtcagaattgcatttcaagttggcgaaatgtgcctttgagtaactcttagattggcatatgtttttagagcaatttagctagaatgtagaattgggcaatgagcctatgatacgtatgtctgtatttctgcatgaacaagcagtagattatattttctttaccttggggaaagatatgcttcagttcttagattgtagatctctagttgtgtacacgattgtggccttggtttctgaatttgtcagtaggctcaaatacaacaaatctttatctgtggggtattaggcacgtaagtggtacccagtataacttgttggcctgtaattaccaggcactcatgttcatatgcatggatggtgtaccttacagttaaattatgacctctagattttactaagtttcacaaagtctacatttgaaactatagtttgaagtcggatcttctcagtttctttagaatgaacaaattacgtatatagaatttctgaatagaataattaattttacacaagggtcagtttttcttactagtcttggatttttgtagatcttgatgataagagtaataatcataactaagttgagtgcttattgtcgttctttataatcttgatgaattctcaaacctgtgaggtaagtacttggttttgcccattttaccgatgaggaggaaagtgagacatagatcaagaacttgaccgaagttatacagcttgtaattggtggagctggaattgaaccccatcttgacttcacagcttatgttcttaaccacaaggcattaatgcccccttcagctgccaggtctaacctgattatgaccatttaaatttagcccaagtgttacaatgaaagaagttcatattacctactctgatttgttgcaggtctatgattttgtagctgtttataatgttacattttttgtgtccaggtgtactatgtagtgagataactgaaatatttaatgctaggagagtcttaagctacatgaaaaacctctagtaaagaactgcatatatgcatgtagggaattaattaaaaagtgtgacactccctgatgatttactatgaaagagctccaagtaggtgttcagaactgtctcaggctgaagtgtcatcgatctcctaaaccataatcatggttaaaggagaatctgacaggtaatgcttgagttgaacccacagtaccaaatccctcttgagtcttttctaatgtgaggcagaaataatataagcattattgttaatattattttacacagtagttccagattttctctttatcaaatattttgtcaagcacttaaaaagcaggaacaaagactagttctaatttttacttgtgtttataaaaaaaagtaatattctaggattctgtggtggaaaaatggccagaagacaagaggaaggaaaataaaccgatgacctggctaaaacatacactgactaatcagtggctcagtctttaaaggttttgttgtttttaaaggatttttttggttgtttgtgttgtttgaaataagattgacttgcttctggcattataaaagataaggtcttttataatcaccaagctctcaatgtagtacttgggtacctgggtgtcactgctgattattttttaatttttaaatttatttttttgagacagagtctcactttgttgcccaggctggagtgaaggggcgtgatcttggcttactgccgcctccgcctcccaggttcaagtgattctcatgcctcagcctcccaagtaactgggattaacaggtgtgtgccaccacgcctggctaatttttgtatttttagtagagagggagtttcaccatattggctaggctggtcctgaactcctggactcaagtgatctacctgccttggcctcccaaagtgctgggattacaggtgtgatccaccgcgcctggctctctgctggttattcagggcccaagggctcttcagttatcaggtgatgtatgctgctaggactgggaccttcccttcagggcagcagattcccttctggcccaggatgtgtctagaattgtcatcctggagctagggcctggaatggaggcttcatgactgatgaactttaatttgttttctttatttttattttttttgagatggagtctcactctgttgcccaggctggagtgcaatggcaccatcttggctcactacaacctttgcctcctgggttcaagcgattctcctgcctcagcctcccaagtagctgggattacaggcaagtgccaccacacctggccaatttttgtatttttagtagagacggggtttcaccatgttggccagccaggctggtctcaaactcctgacctcaggtgatctgcccgcctctgcctcccaaagtgctgggattacaggtgtgagccactgcgcttggccttaatttatttgcatataaagatttcagtattgggagatttggtgaaatttgtcattctaatccttatggcaattgattacttgaaaagctgacagctatattaccttgttattgatcttaaatataaaaaggcagaagttgtctaaattgagagattttgaatgtcttagaaagtatctgttaaggtggtagtttacaagcagttacattgtaacctaattgttgaaaaatgttatctgtgaaatacttgcatttccactatgaaaagcatgaaaccaggcccttggagggggaggagatgcaaattttataaaggtttttaaaaagcatttaaatatcaatggcttggttatgtaatgggttggggtgaaaagaaagacatttgtgaccttaatttttatcaggcccagttttattattggccacccttggcatagttggccttgagctttcagttatgtattgtatttctagagataagataaatgtagtacttaaaataatatttaagtattgatgtaggtgtgtgaaataattgtttcataagtaattgtatgtgtctttttcacttttggggtctgaataaacttatgggttgggtaataggatacgggcaattcttgaatttacatgaagtgctttcccccagaccgtgaatgttcttttggatatcagaaactatttaaatagttgaagccagtgaaaactgatgcatagatcttcctttagaaatgttgaatataacagggcagtgaaaggagggtctaagcagtctgtctctaattttatcctaatgcttgtcttatgatcagcttggaagctgacatgcaagatgtttaacttctatttttccatctgtaaaatgggaataagctcaaatgggagtaaatatcaatatttatcaataatagatattgataaagtctaaaggtattctgaaggaggtaacatgtttgtaacaatggttcttaaaagagaaactaaagctctggggtcctagttttttttttttttttttttttttgagacagagtctcactatgttgcccaggctggagtacagtggcacgatctcaggtcactgcaaactccgccctccgggttcacgccattctcctgcctcagcctcccgagtagccgggactacaggcacctgccaccatgtgcggctaattgtttgtatttttagtacagacagggtttcaccgtgttggccaggatggtctcgatctcctgacctcgtgatttccacccgcttcggcctccaaagtgctaggattacaggtgtgagccaccgcgcccggctgttaatttttaagagtgaaaagaggtgctgcgactaaatggtttgagaactgcttgtatagaggaatgaacactgaactgtgagccaagccttggtttttcagttatagctctgttgcttgattgtatgactgtggacaaatcatttatctgttccaggcttctgctttgtcatttgcagaacgaacaagactagatggtctgtagcattaatttttttttgggacaaggtctcactgtcacccaagctgtagtgcagtgacactgaacatggctcactgtagccttgacctcctggctcaagcaatcctcctgcttcagcctcccatgtagctgggaccacaggtgtgtcatcatgccccgctaattttttgatttttttgtagaaacagtggtctcactttgttgcccagtctggtcttgaactcctggacttaagcgatcctcctgccttggcctcccaaagtgctgggattacaggtgtaaaccaccataccctgcctaaagttagtttttaaaaaattctgcttacaggccacgtgcagtggctcacgcctgtaatcccagcactttgggaggccgaggcaggtggatcatgaggtcaggagttcaagaccagcctggccaagatggtgaaaccccatctctactaaaaatacaaaaaaaaatcatctcggtgtggtggtgggcacctgtaatctcagctactagggaggctgagacagagaattgcttgaacccaggaggcggaggttgcagtgagctgagattgcgccactgcagcctgggcgacagggtgagagtctgtctcaaaaacaaaaacaaaaacaaataagcaaaaaattctgcttatatgagtgtttatcattttctcttatctgccttttgtgggttagggagaagggtagtggtgagataaagtttctttattcagtgtatttatatctttttgccttaaaacttacatggttaggttacaggtgttttgttgctgatacttgtcatagtatcatgtatacctggttgtataaacatttattggaaaggaaaaaacatttttgttggaaagtttggtaattattgtggcttaggatatgttctattttgaaagattgctatatccagtatatttctgcccttttatgattgaagatgtacgtctgaaaatacctatgttagttctagccggttgttctttttgcgctgggaagtctttgaattttgcactgtagctgctattttcagatcctgtctctgaaactttgtctctcagttttagcttgaagtagccatttcctgtatctgtagtccagcactcttgttaactgtcccatacaatatttgttaagaaattattgttctggcagtagtattcacatgtatatatcctgcactccatattttgggggaatgctttattagttgatcaaatacttaagtatcaatttggggccaggcatggcactgtgttagggttatgccaaaggtaataaaattcctgccatcttaaggcattcttagtcaagtgagggagattggtaagtaaatgagcaattagaaagcagtgctaaaatatggaaatatattgattgcgctagggatcagaaatgaaagaaagcctaatttgggggatgtctaggaaagttttgcaaaggagatgttaactgtattgagtcttgaatgagttagcagttaagggttgactgtgagagggcagtccagacagctattagtatggttaaagattagtcttattttccatatatcagaggaaataagacatgtacacgattagttttggtgcaagatataaagtgataaatgctgcatgaagtaaaagtaagttgttgtgtgagttcaaagtagaaagacatttctggtggggaccaaggaaagctttatagagagatagcatttgagccgggcgccgtggctcacacctgtaatcctagcactttgggaggctgaggcgggtggatcacgaggtcaggagatcgagaccatcctggctaacatggtgaaaacccgtctctactaaaaatacaaaaaaaaaaaaaaaaaaaaaaaaatccgggcatggtggcgggcgcctgtagtgccagctgctcgggaagttgaggcaggagaacttcgtgaacctgggaggcggagcttgcagtgggccgagatcgcgccactgcactctagtctgggcaacagagcgagactccgtttcaaaaaaaagaaaaaagagagatagcatttgaatctagtccttggaatataggtacagttttgacaaaggagactgtgggagaattccagatgtgaggagtagcagcttgagcaaaggaatgttgtgtatattagcattttctatttggaagaaggtcaacatcgaattttaaacttaatttctggacaaatactgtataactattgtgcctttttttttttttttgagacgtagtctcgctctgtcacccaggctggagtgcagtggcatgatcttggctcactgcaacctccgcttcccgggttcaagcgattctcctgcctcagcttcccgagtagcttggactacaggcgtgtgccaccatgcctagctaatttttgtatttttagtagagatgggatttcaccgtgttggccaggatggtcttgatctcctgacctcatgatccgcccgccttggcctcccaaagtgctgggattacaggcgtgagccaccgcgccctgcctattgtgcttttttttttttttttaagagacagggacttcctctgtcacccagcctggagtgcagtggggtgatcatagctcatagcttactgcatcctagaactcccgggctcaagtgatcctcccacctgagcctcctgagtagctgggaccacaggcatgtgccactatgcccagctactattgtgcattttgtatggtagcttttgtggcttgatgatcttgtaaaaggtacatgtgcctttgtgaatgggcctgataattttagttcagaattgtcaaaagtattatctacttttttttttttttttgagacagagtctcactctgtcacccgggctcagtggcaccatctcagcttactgcaacctccacctcctgggttcaagcgattcttctgcctcagcctccgagtagctgggactacaggtgtgagccaccatgcctggctagtttttgtatttttagtagagacggggtgtcaccatattggccaggctggtctcgaactcctagacctcgtgatctgcccacctcggcctcccaaagtgctgggattacaggcatgagccaccgcgcctggccagtattacctacttttaaataagattgtgtaggatttaatgcacagattttgaatcactgtgataaaaatgcatccttagttgtcttcattttgctcatttgaagtgctcagttgacttttgggtgggtaacatttgacttatagaatctaagataaaaaattatttctgagtaatactggatttgttattttgcttatttggattatattagttattttttggtttatttgatagcattccagatttagttttgctataatgcttgttttgaaaatgtggattttttccaaaagggttgatatttcagggaacaatttgaagcatacgacaaaatttgcatttgcttatgggggattttgtctgcagggtcagggatcagcatactgtggcctaccaaccagtggcctgttttttgtaaataaagttctttttttttgtttttgatctttgttttgttttgttttgttttgttgagacggagtcttgctctgtcgcccaggctggagtgcggtggtgtgatgtccgctcactgcaacctccgcctcttgggttcaagcgattctcatgcctcagcctcacgagtaggtgggatttcaggcatttgccaccacgcctggctgatttttgtattttttttttttttttttttttttttttttttagtagagacagggttttaccacattggcctggctggtcttgaactcctgacctcaggtgatccgcctgccttggcctcccaaagtgcagggattatagatgtgagccatgtaaataaagttctattggaatacacctatgtccatttatttacattgtctgtggctgcttttgcactgtagttgcagagttgaatagctgcagcagagacctagtagcccacaaagcctaaaatgtttactgtctggccctgtattgaaagagtttgctgattattgtgctagatgaatgcaggatactacacccctctaaaaagagctgcatagaaatacatgcatatagatgcacacacgtctgacatctaccagctacctcatttcaccacttgggttataaaccacacatatttacatctgttgtacaattttcaatccgatttcagataaccttccttctaccacttcacaataattcatgagctgcaacccttttgatgcccacttcacaagcaaacttcaggtctttttcaaagtaaagtgccacatttattgttatatttgagcatttattatttaacatgtcaaactgtgctaccatttttctttggtttctttgttttaaaaaaagtcactgatgaaatttttgaatgttgtgcttctaacctcatttttcctatgagttctatggtgttaattgcacaattttacatagtttggtggtttttaggaacccatatgttacattattgaggaactgactaattatcatcctgtaaaaagtactaattcattcaccaaacatttctggggtgatgtaaatattaagtgagttaaatgggcataaagcacttatgtctttattgttactcaaatattagttattactgattactattaccatgtgtcaggaactgtaataagtagtgcattgatgaacaagacagataagggacctgtctccatgaagcttacattgtatttttaaaaatctattaatatacattttggctagtaaccgagcccttgccccacagaaaagttgtgctgttacacaaaataatattttaagatccatccacaagtcaaagacatttcacttaaaacagctttctcagcagtgtctccttgatagggtataatattttattgaattattgtttttggctgggtgcagtggctcatgcctgtaatcccaccactttgggtggccaaggcaggtggttctcctgaggtcaggagttcaagaccagcctggccaacatggtgaaaccccgtctctactaaaaatacaaaaattagccgggcgtggtggcgcatgcctgtaatcccagctactcaggaggctgaggcaaaattgcttgaagccgggaggcagaggttggagtgagccgagatatcaccaccgcactccggcctgggcgacagaatgagattccgtttcaaaaataaataaataaataaataaataaataaataaagaattattgtttttaatttttgtttttttctgagataggctgttactctgtcactcaggctggagtgcattggtgcagtcatggctcactgcagcctccgcctccctggttgcaggtgatactcccacctcagcctcccgaatatctgggactataggtgcatgccaccatgctgagttaatttttgtatttttttgtggagatgagtttttgccatgttgcccaggctggtatcgaactcctggactcaagctatctgccctctttggcctcccaaagtgctgggattataggcatgagccaccaaacctggccatgtgattgtttttttgtaactgtaacctcaggagatgaatccgatctatctttagggagataaagagtaatcatcccttcctttttttactgtataaaaggttacaaaatataatttcagacttgtagaaaatttgtaaaaatagcacaaagattctcagatgtgcttcatccagatgcagcaaggggtaacattttaccatgtttactttatcatcctctattattatttttctgaattgtttcagagtaaattgcagacatgatgtccctttactcccaaatactttaatacatatttctcgaaactaggaatagtctgttacatgatcccagtatagttagcaaaattaaaaattagcattaaggctgagtgcggcctcccacacctgttatcccagcactttgggaggctgaggtgggaggattgtttgaggccaggaattcaagaccagtcttctcaacatagaccctgtctctacaaaacaaacaaacaaacaaacaaacaaacaaacaaaagtactaaattagccggtgtggagcatgcctggagtcccagctactcagaaagctagagtcaggaggatcacttgagcctagaagttccaggctgccatgaactatgatcatgccactgcagtctagtgtgaatgacagagtgagacccccatctcttaaaataaaagagagattagcattgatacaataccatttttttttttttgagacagagtctcacactgtcgcccaggctggagtgcggtggcgcgatcttggctcactgcaagctccgcctgctgggttcacgccattctcctgcctcagcctcccgagtagctgggtctacaggttcccgccatcacgcccagctaattttttgtatttttagtcgagacgggttttcaccgtgttagccaggatggtctcgatctcctgacctcatgatccgcctgcctcggcctcccaaagtgctgggattacaggcgtgagccactgcacccggccgatacaataccatttttaatctacagaccttattcacattttaccaattgcttcatgacatccttcatgatgaaagacaaaaagttcttgttttctgatctaccatctaattctagaacactcattatatttcattgtcatctggaacagctcaccttgccatttttttttttttgagacagttttgctcttgttgcccaggctggagtgcaatggcatagtcttggctcactgcaacctccatctcccaggttcaagtgattctcctacctcagccacccgagtaactgggactacagacatgccccaccacgcacggctaattttgtatttttagtagagatggggttgcaccatattggtcaggctggtcttgaactcctgacctcaggtggtctgcccgcctcggactcccaaagtgctgggattacagatgtgagccactgcgcccggcctcttctccatttttaaaagaacacaggccagttgatttgaatttgtctgatgtttccctttgattatatattttggtaggaacactatgaagtgatgttttgtccttcacagcacattttatcaggaggtgtataatgcctttgcttttactatgttttagaatgattttgctttgtttttttttttctgagacagagtcttgctctgtcgcccaggctggtgtgcagacgtgcgatctcggctcactgcagcctccgcctcctgggtccaggcgattctcctgcctcagcctcctgagtagctgggactacaggcgtgcaccaccatgcccagctaatttttatatttttagtagagacggggtttcactgtgttgatcaggatggtctcgatatcctgacttcgtgatccgcccgccttggcctttcaaagtgctgggattacaggcgtgagccatcgtgcctggccgattttgcttctcatgctaaaattattaatcagctcattctctgccattttatttagaggtttgaagtttggcttgattaatttctacagaattggggagagttttcccacctcccatttttcttgctttttccatttcctccttcctcagatacccccaaagttcaaaaccaaccaccccgattatgaattttcattttgtattctgaacatatagctaaaagcagagaattaagggtgaatgtttcatgttaaagtgattggacctgttgttaagcatatgaaataatatatttccttcaaaggctgactatactatagtgcatccaacatagcttgttgaatatctcagttcttttttttttttttttttttttttagctgaaatttgccacagggaaatatctctccagcctgggcaacatagtgagactctgtctcaaaaaaaaaaaaaaaattagccaggtgtggtggtgcacaactgtagtcctaaatacttgggaggctgaggagggaggatcctttgagcacaggagtctgaggctgcagtgagctatgattataccactgtactctagcctgggagacagagcaagaccccgtctctcaaaaaaaaaaaaaaattggtggtgaaatacacataccacaagatttagcattttaaccattaaaaaagtttgtttttggctgggtgtggtgactcacgcctttgggagtgatcccagcactttgggaggccgaggcggatggatcacgaggtcaagagatggagaccatcctgtccaaaatggtgaaaccctgtctctactaaaaatacaaaaaaaaaaactagctgggcatggtggtgtatgcctgaagtcccagctactcgggaggctgaggcaggagaattgcttgaacccagggggcagaggttgcagtgagccgagatggcgccactgcccgccagcctggagacagaacgagactctgtctcaaaaaaaagcttttttttttttttttttgagagaagggatctcgctatgtttcccaggctggtctcaaacttctggcctcaagcaatccttctgcttcggcctcccaaagtactgggattacaagagtgagccactgtacctggcctcatttttctattttgataaacacttttttttttttttttgagacggattcttgctgtgttgcccaggctggagtgcagtggcatgatcttggctcactgcacctctgcctcccgggttctctgcctcccgggttcaagcaattctgcctcagcctcctgagtagccgggactacaggcgtatgccaccgtgcccagctaattttttttgtagttttagtagagacgggttttccccatgttggtcaggatggtctcgaactcctgacctcaggtgatccgcccgcctcggcctcccacagtgctgggattacaggcgtgagccaccatgcctggctgataaacacttttaaggcttaacatgagctaagtattattttagaacagattgtctcaaccttggcactatagacattttgtccagaaaattttttgttagaggctgtcctgtgaatgcattttatccctgacctctacccactagataccagtaacacccctaccctgagttgtgacaagcaaaaatatttccagaaattgccagatgttccctgtgggcggtatgggtttgagaaccacttttctagataataggcatttgtagataatgaatactgagctaagtggaggagtaaatggttgaaatagactatgtggttaagtacagttacagagatataaaccaagagatgtggaagaatagcaaaaaatttccttagagagttgatagcaagtattttcccaagagagacagcaattctgagttgggtcattggggatggtggggggaaatgtgctgaggagggggaaatattctaggtggtggaacgggttatgtctagagatacggtagaggagcccttgggtgccttgagaaaaatgagataataagtatgattggagagaatatgggaggtagaattggaaagaaggatgctagttggggtcaggtttgagaaaggcttttttttttttttgagacggagtcttgccctgtcacccaggctggagtgcagtgcctcactcggctcactgcaacctccgccttctgggtttaagtgattcttctgcctcagcctcttgagtagctggcattacaggtgcgtgccaccacttccggctaattttgtatttttagtagagaccgggtttcaccatgttggccagactagtctcagaactcctgaccttgtgatccgccagcctcggcctcccaaagtgctgggattacaggcatgaaccaccacgcccggccgagaaaggctttttatgctatgctaaaatgtttcattttccccctttcattatagaaaatcaacaaatacttttaaagtctgtagagttatatgatcagctttttaaaagaatagtgatacagtgaaatggtaaaaatggtcaatggtgaatattaaactcaagaagataactctagcctgtaaagtaggaaaataggaagggatggagatttatataaaactaaaactagatgtcatatgttgcccttaaatcacatcaccctgtgtgtagacttcttcatcctcatttgtcaaaattctgacatattgtcaatactgatgaagattcttgatattcaaagcaggagtgaagtgggcaaaaatctgtattctaattttcattaccctaataatgtccttttaatttggagcagttctgtggcctctctttgtctgtcctgatcttgacatttttgaagagtatagaacaattattttttagaatgtatctctatttgggtttgtgtgatgcttctttatgattagatgaagggtatgcatttttggaagaaataacagaagtgatggtatgttgttttcagtgcctctgtaacaggagatgcatgacattggttggtcccattactgatgatggtaattttaatcacttgggtggtttccagtagatttttctatgtaaagtttatcatttttggccgggcatggtggctcacgcctgtaatgccagcactttgggaggctgaggcaagcagattacttgaggtcaggagtttgagaccagtctgaccaatgtggtgaaaccccatctctaaaaaaatacataaattagccaggcatggtggcatgcgtctgtaatcccagctgctcaggaggctgaggcaggagaatcacttgaaccctggaggtggaggttgcagtgagccgagattgtgccactgcacttcagcctgggtgacagagtgagactccgtgtcaaaaaaaaaaaaaagtttatcatttcccatttttattttgaaacagtcttgctctgttgcctaggctggagtgcattggcacaatctcagctcactgcagcctcaacctcctgggctcaagtgatcctcccacctcagtctcctcagtagcgtgttccaccacacccggctgctttttgtattttttggtagaggtggagtttcaccatgttgctcaggctggtctggaacccctgagctcaagggcactgatcacctcagcctcccaaagtgttgggattacaggtgtgagccaccacgcctggccctgaaaaatatttttaacggttacattatcatggagaattggatggtataaaacaatagcagttctcatatttgaaaataaattgatgtaatgaaacaaatgagaggatcaaataatattgtaaaaagaataaaaacccacatatggacaggtctgtggaaattgtattaaagcctacctctcccagattgtttccgtttgttgcaatccatttaagaacagtttttgggctgggcacggtggctcacgcctgtcatcccagcactttgggaggcccaggcaggtgtatcatgaggtcagatttcaagaccagcctggccaacatggtgaaaccctgtctctactaaaaatataaaaattagctgggcatggtggcatgcacttgtaatcccaggtactcgggaggctgaggcaggagaattgcttgaaccaggactcgggaggtggaggttgcagtgagccaagatagcaccactgcactccagcctggcctgggctacagggtgagactcagtctcaaaaaaaaaaaaaacaaacaaaaaacagtttgtgggaaaaaacaatccttgtgtatgacataatttgctgcttttcccatttagaaaatttaaaaaatacttatttgagatggggtctcactatgttgtccaggctagggtgcagtggctattcacaggtgtgaacatagtacactacagcctcgtactcctggccttagcatcttgagtagctgggactgcaggtgcacatcacagtgcctcgcttactttttccatttttgtctgttgatcctctctctcttcctttggggtaaaaattgtggcttgtgatggtggtttgtggggaaagaaaaagttggtaagctacaagctctgagcctttaatgtgtttttgttaaccatgcagacagacattagatacatagatacaacatagatgagttaaatttgaaagaaggcaccaaactttgttactttaaagcaggatttctcaaagggacactgttgacattgatttcagaagtgagattttcatggtttttaatgttattattataatggtatggatagtgttttgccctctaagaagtagctaggagtgtttccatagatgcatttagtttatatcacttatgtattctgtctctattttgtaagaaaattgcctatgaacagaattttttctgtatgtggatttaatgtcttcttctaaaggaaacatgggtgtggttcacatttccttagttttgagtagcatggcttaagttgtgatccaattttaaaaaatcagttgaataaataaatagaaaataaaaggataatttctgtactaaaaaagtcagctggacagttaaaacatctccttttattcgtaagtttttcaataaaaattgttaaaagcagtattcatttgtgtaatgatataatctttgttattgttttatgtgcttttctaaaatgcaggaaacataaggtaaggagaagtctttccttaccctgggaccagatgtctatgaggactgttgacttttctgctataaacaggatgataaattaacagtggtgtgataggtaaagtagatttgttatgacatatcttccattaagcgataataacttgatttttacttagttgatgaaataaaataactttgaaaccttgggtaacatgaaattgaatcaaaatattttcaagttatggaacatagtgttattaatagaatggagtgttgaaaaagcactggattatgctttctgtaacttttagttctgggtcttatgataactgtgaccctgagcctcagtgttttccttttaatctgtagtgatattttttagttcagtctctcattttaaactgcttttagctctaaaattttatctcagtgacctgttgagttatataacaatcgtatcaggtaacctagataagaagaggaaggcagtaacatttcagaaatacagtttggggttgggaatccttaagtgatccagacttctcctttggtccgaagatagtgtgaataaaacagctgagggatgtgggcatcaatatattgcagaggaaaaggttatttccaggagtggatttgcagctactcttaaatctattatgttggggctgggcactggggctcatggctgtaatcccagcactttgggaggctgaggcgggcggatcacctgaggtcaggagttcaagaccagcctggccaacgtggtgaaaccctgtctctacaaaaatacaaaattttgccgagcatgatggcgggtgcctataattccagctacttgggaggctgaggtgagagaattgcttgaacccaggagtcggaggttgcagtgagctgagattgtgccattgcactcctgcctgggtgacagagcgagactctgtctcaaaaagaaaaaaaaaatctattatgttggatagatggtcttttccagaagcaaattttatagatggaaagcattttaattaatctagtaaaattctctcattttacaaatgaggctccctctacctctctccccctctccccctctccctctctccctctctccctctctccctctccccacggtctccctctccctctctttccacggtctccctctgatgccgagccgaagctggactgtactgctgccatctcggctcactgcaacctccctgcctgattctcctgcctcagcctgccgagtgcctgcgattgcaggcgcgcgccaccacacctgactggttttcgtatttttttggtggagatggggtttcgctgtgttggccgggctggtctccagctcctaaccgcgagtgatccgccagcctcggcctcccgaggtgccgggattgcagacggagtctcgttcactcagtgctcaatggtgcccaggctggagtgcagtggcgtgatctcggctcgctacaacctcacctcccagccacctgccttggcctcccaaagtgccgagattgcagcctctgcccggccgccaccccgtctgggaagtgaggagcgtctctgcctggccgcccatcgtctgggatgtgaggagcccctctgcctggctgcccagtctggaaagtgaggagcgtctctgcccggccgccatcccatctaggaagtgaggagcgccttttcccggccgccatcccatctaggaagtgaggagcgtctctgcccggccgctcatcgtctgagatgtggggagcgcctctgccccgccgccccgtctgggatgtgaggagcgcctctgcccggctgcgaccccgtctgggaggtgaggagcgtctctgcctggccgccccgtctgagaagtgaggagaccctctgcgtggcaaccgcctcgtctgagaattgaggagcccctccgcctggcagccgccccgtctgagaagtgaggagcccctctgccccgctgccaccccgtctgggaagtgaggagcgtctccgcccggcagccaccccgtccaggagggaggtgggggggtcagccccccgcccggccagccgccccgtcggggaggtgaggggcgcctctgcccggccgcccctgctgggaagtgaggagcccctctgcccggccaccaccccgtctgggaggtgtgcccagcggctcattgagaacgggccatgatgacagtggcggttttgtggaatagaaaggggggaaaggtggggaaaagattgagaaatcggatggttgccgtgtctgtgtagaaagaggtagacatgggagacttcattttgttctgtactaagaaaaattcttctgccttgggatcctgttgatctgtgaccttacccccaaccctgtgctctctgaaacatgtgctgtgtccactcagggttaaatggattaagggcggtgcaagatgtgctttgttaaacagatgcttgaaggcagcatgctcgttaagaatcatcaccactccctaatctcaagtacccagggacacaaacactgtggaaggccgcagggtcctctgcctaggaaaaccagagacctttgttcacttgtttatctgctgaccttccctccactattgtcctatgaccctgccaaatccccctctgcgagaaacacccaagaatgatcaataaaaaaaataaaaataaaaataaaaaaaattaaaaaaaaatgagaaaattgagctctcctgaggttgcagtttgcttaacagcatagatctaattagtaattaggactagaaccaaggttatctgactcccagttcaaggttcttggtacagtaccgtgtttttaactagtccattaggttgttttctgtgtattttataacacttctgtaagaaagtggaatatttttctctaaggtatgttaaaactcttgttcgagaaaatacagtaaaggatacctgttgtatcttaaagtgatttttatgtttttctgtcaatgccacaatctgaagaaagtaaattagctacacttctattgctgtgacaatagattatttagaatcttcttgattacttgtattattgttcccgtgcttcagagctgtttccttgctatttaaaatcattatggtatagcccagaggctaagggggttttctaagagtatgcaatttgtcattgacatagtttttttgtttgtttttgtttgttttgtttgtttttgagacagagtttttgctctgttgcccaggctggagtgcaatggtgtgatctcggctcactgcaacctccacctcctgggttaaagcaattctcctgcctcagcctcccgagtagctgggattacaggcacccaccaccacacctgactaatttttgtagaggcagggtttcaccatgtcggcgaggctggtcttgaactcttgacctcatgtgatccacctgcctcggcctgtgaggattacaggcatgagccaccgcaccctgccaacacagttgtttttgattggaaaagtttattttcctaatctcaaagtagcttgtatctgttctttattgtgaaatgcagtttctacattgaatttgtgtagtctgtagttttgactgttttaagttcaataactagcttagtagtatacttgttagaggtcagagtaggttaactactagaaagaacagtccttctgcttactgtactaggaggaagtctgtggtggagggaaaaaaggagtaaaacaattccagtcttctgtaaaatttgagtaatttctttctctactccttctacatgaaaaatacatcttatttgatttttgcatcacatgccttctatatgtgttggaatctggatcaccatttcttcattacttgtgggtttttgttgtgaaaaatgtggagtaagttagaagttgactgtagaataggtaacattctcttaaattctttgatcagagtgagcagagtccagaagcttggctcagacttagggaactcatgacacttctcttaatatcctaagttcatgacatgtctcttaataccctaagtgtacaatacaatagtagatcaaggaaggcagaggtatctggcagacttagaagtaactgttcataaaaacaaggatcagtatgtttctacaagataatgatttaaagttgagccaggattagttatacctttaatataaaaaattgaaatagcttatttaatctgttctaggctatagtatacggagctaggtattaaaacattctctatatatttaactcttttttttgagacagggtctcactctgtctcccaggctagagtacagtggcatgatcttggatcactgcagcctagacctcctgggcacaagtgattctcccaccttagcctccacagtagctgggactacaggcctttgccaccacacctggctcatttttgtattttttgttgagacggggtttcaccttgttgcccaggctggtcttaaacccctaagctcaagtgatccgcttgcctcagcctcccaaagtgctgggattacaggtgtgcaccactgcgcccaggctatttgacttttttattctgtaaaattgcaagcatattcagaaataagaaaatagtataacggggccgggtgtggtggctcacgcctgtaatcccagcactttgggaggctgaggcaggtagatcacgaggtcaggagttcgagaccagcctggccaacatggtgaaaccccgtctctactaaaaatacaaaaattagccaggcgtggtggtgggcgcctgtaatcctagctactcgggaggccgaggcaggagaatttcttgaaccagggaggcggaggttgcagtgagccgagatcgtgccactgcactccagcctgggtgacagagcaagactcattttttttttttttttttttaaaaaaaagaaaaaagaaaatagtataatgggttgggcccggtggctcacgcctgtaatccagcactttgggaggccaaggtgggcggatcacctgaggtcaggagttcaagaccagcctggccaacatggtgaactcttgtttctactaaaaacacaaaaattagctgggcatggtggcaggcacctgtaatcccagctacttgggaggctgagttaggagactcacttgaacctgggaggtggaggtttcagtgagccaagattgtgccattgcagtccagcctgggcaacaagagcgagactccatcccaaaaaaaacaaaaaacaaaagacaactatatatatatatataaaataacgaaaccccctaagtacctgtcacccagcttcaacaattatcatcttgcagttagttgaatttggttaacacttacccttcagtggattattctagactaaatttccaaacataatcatattgtattgaagtgttttttgaacaaactatactatggggtatttacctaaaatgaactatttgcaaaaagataagttgattttttttcttctggtgccagtacacatcataattgtagttaaaagctattatcctcacattaaagtttaatttttaacacattatgaaaatttaaaacttacagcaaagctttaaaaattttacactgaacaccaatattattaacatctagattctacctttaacattttactcttcttttttttttactcttcttgttttatcacatattgatccatctgtccaactctccattgatgtaacatttcattttattttcttattcatttcaaagtaaattacagatattagtatagttgaggttcagtttttaaagtcatattttcaactaattgtttttcctgttttgaaagactgttatatctgaagttccacattatgacaactcatagtctctatggttccagtgcttcccattttgaacttttctttcatgttctacgaacctttattaaaatatttagagctatgtacaagtaatatatacagtatttagctaaaactaagtagaatgaatgagggttttgcttgtgtgtttattgcagtctttaaaaaaaatctcttctagtgagtcaatgtgtatcttttttttttttttttttttttttgagacagagtcttgctctgtcgcccaggctggagtgcagtggcgtgatctctgctcactgcaaagctccacctcccggattcatgccattctcctgcctcagcctcccgagtagctgcgactacaggcgcctgccaccacgcctggctaattttttttgtattttttgtagagatggggtttcattatgttagccaggatggtcttgatctcctgacctcgtgatctgcccgcctcggcctcccaaaatgctgggattacaggcatgagccaccgcgcctggccaagtcattgcgtatcttaagatggtacactaaactaatatgcttgccattggtgacaacatagatgaacctggaggacattatggcaagtgaagttagccagacgtggaaaaaataatacttcatgacttcaacctatatgtggaatctaagaatgccaagtctgcaaaagaagagagtagaaaagtagttaaatgggtaggaaggtgggagaaatggggagatattggttaaaggttaccaagttggaatcacgtaggatgactaggtctagagatctaatgtacagcatgaacactatagttaataatactgtatcatgtactggaaagttgttaaaagagtagatttcaggtgttttcagcacacacagaaaaagataactatatgtggagatgggacattttgcttgaccatagtaatcatttcactatgtatatgtatatcaaaacattcatgttgtacactttattgattgattgattgagacagggtctctcgctgttgcctcagctggagtgcagaggcatgatcacagttcactgcctgcttgacctcccaggctcaagcgatcatcccacctcagccccccaagtagctgggactacaggtgtatgctaccatgcctggctaatttttatagtttttgtagagatgggttttgccgtgttgcccaggctggtattgaactcctgagctcaagcaatctgcccgcctctgcctcccaaagtgctaggattacagatatgagccactgcgcctggccataccctttaaatatatacataaaaagaagaatgcctttaaaaattttccatttaacaattactctcagggccaaaactcactgtttaagtattttgctcttttactttgatcttggtgttctatgtagtgctaaaatatactttcatctccatatgactgcttgtaacaaaaagctgttcaccacattatgaactccctgaatacacacaataatcatatagtaaatgcttgttgaataaacaagacaaaattcatcagtttttatccttacttaattttttgaacttttccttgaacttctgttatcaaacttaatacatgaacaacagaaagatgctacggatctatgtagtacaaagtaaaatatgaaatttacacactaaatatttctgtagcatattttcagaagtaagtaattgaatataaacagaagcaagcatattctatttttttattatttaagtgggaaatattttaaaatcttatgtcatatttgctttagatttcttttaaagaattaaaacattacagatagagttgaagcctcatgggttattttaatgttttctacataaacatgtttccatatacataaaccttatttagaattttttcagtttatttatttatttttattattatactttaagttttagggtacatgtgcacattgtgcaggttacatacgtatacatgtgccatgctggtgtgctgcacccactaacttgtcatctagcattaggtatatctcccaatgctatccctcccccctcccccctccccccaccccacaacagtccccagagtgtgatgttccccttcctgtgtccatgtgatctcattgttcagttcccacctatgaatgagaatatgtggtgtttggttttttgttcttgcgatagtttactgagaatgaaattttttcagttttatacgtttatgtaagtggcaccatacagtacatattattttgcaacttgccttttttttttttgtttgtttgctcaatgttgtttttaggattttgatgtaactccagatctgcactgtccaatacaatagccactaactatctgtggctattgagtactggaaatgtagctagtccacattgagatgtgctagaaatatatttgtacatggaatttcaaatatttagtattaaaaacatgtaaaatatctcactaaaagtttagtatccctaagaatctgaaatagaaaatgctccaaaacccaaaattttttgattactgacatgactctcaaaggaaatgctcaaaggtttaatgcaaatattccaaaatctgaaaaaatctgatatattgaccacatatggaactgataatagtttggatgtattggattaaataaaatgtaaaaattttaccagtggtttccttttttaaaatatggctactagaaaatttaaatatatatttgaaatgccttacattatatgtctgttgggcagcactgatctatattgcccacttttcattcctgtttatttattattattttatttttatttttattttttgagacagagtctcgctgggtcgcccaggctggagtgcagtggtgctatctttgctcactgcagctgctgcctcccaggtccaagcaattctcttgccttggcctcccaagcagctgcgattacagctgtgcaccaccacacttggctaatttttgtatttttagtagagacggggtttctctgtgttggccaggctggtctcgaactcctgacctcaagtgatccacctgccttggcctcccaaagtgctgggattacaggtgtgagtcactgctcccagccttcactcctgtttagtattaagttatatagataatagtttgctactggtggatagttgttgttttttttttttacgaatttggtgctactaaagactgttctcatgagcattcttaaacatgtctcctttgcacatatgctagagtttctttctccctaatggttcttctgatttatacttccactggcagtttgagaatgttcttgttctgcagttcttcatcctggtcgatgtttttgtgtagataactgtaatttaatacttaaagtcaaaagcataaggaagcattggtaattatttaagtgaatataaaatgtcagcttatttttctcagtgaatcttttgtaatagtcaactcacattgcctattttttattgtagtgcttctgatctgaataaataaatttaaaatttaacagccatgttatgtatcttattagtaggcagctgcagttatgcaaccaaagaatgtcccatctttaagttccattagcttgaaaaagaaatggcagctttacgtcatggaatactgtgctgccactaaaaatgatgttttagaagaatatttaatgatgcagaaaaatattcacagtatcttaatggaaagaaaagattataaagcagtaaccatttcgttttgttaaaatcaggtctatgttagctttttttttttgagatggaatctcgctctgtcacccaggctaaagtgcagtggcgtgatctcggctcactgcaacctccgcctcctgggttcaagtgatgctcctgcctcagcctccctagtagctgggattacaggagcatgccaccacacccggctaatttttttgtatttttagtagagatggggtttcaccatgttggccaggctggtcttgaactcctgacctcaagtgatccacccgccttggcctcccaaagtgctgggattacaggtgtgagccaccgtgcccggcgagcatttccttacatgcttatctctggatggtcagattgtaggtaacttctattttgcacttcacactttttttttttttcttgagatggagtttcgctcttgttgcccaggctagagtgcaatggcgtcatcttggcccactgcaaactccgtgtcccgggttcaagcgattctcctgcctcagcttccagagtagctgggattacaggcgcccgccaccacacctgcctaatttttagtatttttagtagagacagaggttcaccatgttggccaggctggtctcgaactcctgacctcaagtgatccactcgcctcggcctcccaaagtgctgggattacaggcgtgagccaccgtgcccagcctgtacttcacacttttaatatttcattttctgtagtggatttactattaccagggaaggggaatgcaaggaggagggaagagttcttaacctaaaattttcatagttggaatattattataggaaagaagagattgaatgaggtgtcactgttcccatgtttaaagataagtcaattgggaggccgaggcaggtgaatcacgaggtcaggagttcaagaccagcctggccaatatggagaaaccccatctctactaaaaatacaaaaattagctgagcgtggtggcaggggcctgtaatcccagctactcgggaggctgagggaggagaatggcttgaacccagagggtggaggttgcagtgagctgagatcgtgccactgcactccagcctgggcgacagagtgagactttgtctccaaaaaaaaaaaaaaagataatactttccttctattcaatttcaggcttttcttaagttacaaatggaaccagccaaactatgttattgcttacccattgtttttccagcgttagaggagtttttcaaagaatattttttgatttagagattattttatttattatctatttagagattattcatcatttagagattgccatttaatttcagtaagagttccatttgcatctgatattttttagtttcggagaaaggaaatggtggagaaatggattcatctccaatcctttggaataaaattcagacagtttaagctctagtctcaacttgatttaatttggaattgcatgatgtggtgtcagatttgggttcacatccagttctcttgctgtgtaaccttgggaaatttacccagcatctgagttgtttcttcatgtgtgcagtggagacaataccaagatgaagatttcatgagatgtctagtgtagacatctatttttcagagtggatgcatttaacagttggatgctgaatttataagagtatggatttcataaaaagagcataaatttcatgatatgatgtatatatcaaaagatataggtcgggtgcagtggttcatgcctgtagtcccagcactttgggaagttgaagcggatggatcacttgatgccaggagttcgagaccagcctggccaacatggtgaaacttcgtctctactaaaaatacaaaaattagccaggcgtggtggtgtgtgcctgtaatcccagctacttgggaggctgaggcaggagaattgcttgaacccaggaggcagtggttgcagtgagccgattttgtgccactgcactccagcctgagtgacagattgagactccatcttaaaaaaaaaaaaatgatggctgaataggaacagctctggtctgcagctcccagtgagaccaaaatgtagaaggcgggggatttcttcatttccaactgaggtacccagttcatctcattgggactggttaggcagtgggtgcagcccatggagggtagcagaagcagggtggggcgtcgcctctcccggaagtgcaaggagcgagagatctcccttccccaagccaaaggaacccgtgagtctatgctatccggcacagatactacacttttcccatgatttttgcagtccgcagacccggagattccttagtgtgccaactccaccagccctgggtttcaagcacaaaactgggcatctgggcagacagtgagctagctgcaggagttttttttttttccccctcttcataccccagtggtgcctggaaccccagtgagatagacccattcactcccctggaaagggggctgaagccagggagctaggtggtcttgcttagcgggtcccactcccacagaacccagcaagctaagaaccactggcttgaaattctcattgccaacacagcagtctgaagctgacctgtgaagattgagcttggtgaggggaggggcgtctgccattactgaggcttgagtaggcagttttcccctgacagcactaaggaggctgggaagttcagactgggcagaactcaccacagcgtggcaaagtggctatggccagactgcgtctctagattcttcctctctgggcagggcatctctgaaagaaaggcagcagccccagtcaggggcttatagataaaactcacatcttcctgggacagataacctgtgggaaggtgcagctgtgggcgcagcttcagcagacttaaatgttcctgcctgctaggtctgaagaaagcagtggatcctgacaaggaggattctcctagcacagcacttgagctctgctaggggacagactgcctcctcaagcgggtccctgaccccagtgcctcctgactgggagagacctcccagcaggggttgacagacacgtcacacaggagagctcccgtgggcatcaggctggtgcccttctgggacgaagctcccagaggaaggagcaggcagcaatatttgctgttctccagcctccgctggtgatacccaggcaaacagggtcaggagtggacctttagcaaattgcagcagacctgcataagaggggcctgttagatgaaaaactaacaaatagaaagcaataatatcaacatcaacaaaaaggacccccacacaaaaaccccatcaaaaggtcatcagcctcaaagatcaaaggtagataaatccacgaagatgaggaaaacccagtgcaaaaatgctggaaattccaaaaacccgaatgcctcttctccttcaaatgaacacagctcctctctagcaaggccgcaaaactggacggagaatgagtttgacgaattgacagaactaggcttcagaaggtgggtaataacaaactcctctgagctaaaggagcatgttctaatccaatggaaggaagccaaggaacttgataaaaggttacaagaactgctaactagaataaccagtttagaggacataaatgacctgatggagctgaaaaacacagcacaagaacttcgtgaagcatacacatgtatcaatagtcaaatcgctgaagcggaaaaaaggatatcagatattgaagatgaacttactgaaataaggcatgaagacaagattagagaaaaaaggttgaaaaggaacaaacaaagcctctgaaaaaatatgggactatgtgaaaagaccaaacctatgattgattggggtccctgaaagtgatggggagaatggacccaagttggaaaacacacttcagggtattatccaggagaacttccacagcctaccaagacaggccaacgttcaaatcaggaaatacagagaacaccacaaagatactccttgagaagaccaaccccaagacacataatcgtcagattctccaaggttgaaatgaaggaaaaaatgttaagggcagccagagagaaaggtcgggttacccacaaagggaagctcccagaggaaggatatctgggcagaaaccctacaagccagaagagagtgggggccaatagtcaacattcttaaagaaaaaacttttcaacccagaatttcacatccagccaaactaagcttcgtaagcgaaggaggaataaaatcctttacggacaatcaaatgctaagagattttgtcaccactagacctgccttataagagctcccgaaggaagcactaaatacagaaaggaaaaactggtactagccactgcaaaaacattccaaattgtaaagaccatcgacactataaagaaactgcatcaactaacggtcagaataaccagctagcatcataatgacaggatcaaattcacacataataatatgaaccttaaatgtaaaagggctaaatgccccaattaaaaggcacagactggcaaattggataaagagtcaagacccattggtgtgctgtattcagaagacccatctgatgtgcaaagacacacataggctcaaaataaagggttggaggaatattaaccaagcaaatggaaaaaacaaaaaaaaaaggggtgttgtaatcctagtctctgataaaacagactttaaaccaacaaagttcaaaaaaggacaaagaagggcattacataatggttaagggatcgatgcaacaagaagagctattttaaatgtatatgcttccaatacaggagcacccagattcataaagcaagttcttagagacctacaaagagacttagattcccacacaataatagtgggagactttaacaccacactgtcaatattagacagatcactgagacagaaaattaacaaaaatattcaggacgtgaactcagctctggaccaagcagacctaatagtaacctacagaactctctaccacagatcaacagaatatacgttcttctcagcacatcacacttattcactcaaaaccccacaactacatggaaactgaacaacctgctcctgaatgactgctggtaaataacgaaattaaggcagaaataaagaagttctttgaaaccaatgagaacaaagagacaacgtaccagaaatctctgggacacagataaagcagtgtttagaggggaatttatatcactaaatgcccccatcagaaagcaggaaagatctaaaatgaacaccctgatatcacaattaaaagaactagagaaaaagagcaaacaaattcaaaagccagcagaagacaagaaataactaagttcagagcagaactgaaggagatagagacatgaaaacctctccaaaaatcaatgaatcaaggagctggttttttgaaaagattaacaaaatagaccatgagccagactaataaagaagaaaagagagaagaattaaatagacacaataaagaatgataaaggggatatcaccactgatcccacagaaatacagactaccatcagataatattataaacacctctacgcaaataaactagaaaatctagaagaaatggataaattcctggaaacatataccctcccaaggctaaaccaggaagaagttgactccctgaatagaccaataacaagttctgaaattgaggcagtaattaatagcctaccaaccaaaaaaagcccaggagcagatggattcacagccgaatgataccagaggtacaaagaggagctggtaccattccctctgaaactattccaagcaatagaaaaagaaggattccttcctaactcattttatgaggcaagcatcatcctgataccaaaacctgtcagagacacaaccaaaaaaggaaatttcaggccaatatccctgatgaccatcgatgtgaaaatcctcaataaaatactggcaaacagaatccagcagcacatcaaaaagcttatccaccattatcaagtctgcttcatctctgtgatgcaaggctggttcaacatacgcaaatcaataaaagtaatcaatcacataaacggaaccagtgacaagaaccacatgattatctcaatggatgccgaaaaggccttcgataaaattcaacaccccttcatgctagaaactctcaataaattacgtattgatggaacatatttcaaaataataagagctatttatgacaacccatagccagtatcatactgaatgggcaaaagttggaagcattccttttgaaaaccagcacaagacaaggatgccctctctcaccactcctattcaacatagtgttggaagttctggctaggcaagagaaagaaataaaggttattcaaatagcaagacaggaaatcaaattttctctgtttgcagatgacatgattgtatatttagaaaaccccatcatctcaacccaaaaactccttgagctgataagcaacttcagcaaagtctcaggatacaaaatcagtgtgcaaaaatcataagcattcctatgtaccaataatagacaaacagccaaattatgaaggaactccctttcacaattactacaaagagaataaaatacctaggaatgcaacttacaaggggtgtgaagggcctcttcaaggagaactacaaaccactgcttgaggaaataaggacgcaaacaaatggaaaaacattccatgctcatggatgggaagaatcaatatcgtgaaaatggccatactgcccaaagtaatttacagagtcaatgctattcctatcaagctaccattgactttcttcacagaactaggaaaaactacgtagagccaaaacaatcctaagcaaaaagaacaaagctggaggcatcctgctacctgacctcaaactatactacaaggctccagtaaccaaaacagcatggtactggtaccaaaacagatatatagaacaatggaacagaaccgaggcctcagaaataacaccacacatctacaaccatctgatcttcaacaaatctgacaaagacaagcaatggggaaaggattccctgttttataaatggtgctgggaaaactggctagccatatgcagaaaacagaaactggaccccttctttagagcttatacaaaaattaactcaagatcgattaaagacttaaatgtaaaacctaaaaccataaaaaccctagaagaaaacctaggcaataccgttcaggacataggcatgggcaaagacttccatgactaaaacaccaaaagcaatggcaacaaaagccaaaattgacaaatgagatctaattaaagagcttccacacagcaaaaaaactatcattggagtgaacaggcagcctacagaatgtgagaaaatttttgcaatctatgcatctgacaaagggctaatatccagaatctacaaggaacttaaattacaagaagaaaacaactccatcaaaaagtgggtaaaggatatgaacagacatttctcaaaagaagacatttatgtggccaacaaatgtgaaaaaaagctcatcatcactggtcattagagaaatgcaaattaaaaccacaatgagataccatctcacgccagttagaatggcgattattaaaaaggcaggaaacaacagatgctggagaggatgtggagaaataggaacacttttacacttttggtggaagggtaaattagttcaaccattgtggaagacagtgtggctattcctcaaggatctagaaaccagaaatacaatttgacccagcaatcccattactgggtatatacccaaaggattataaatcattctactataaagacacatgtacctgtatgtttattgcagcactatttacaatagcaaagacttggaaccaactcaaatgcccatcaatgacagactggataaggaaaatggggcacatatacaccatgaaatactatgcagccataaaaaagattgagttcgtgtcttttgcaggtacatggatgaagctgtaagccatcattgtcagcagagtaacacagtaacagaaaaccaaacactgcacgttctcactcataagtgggagtcgaacagtgagaacacatgggcacagggaggggaacgttacacattggggcctgtcaggggttggggggcaaggggagggagtgcattaggacaaatataatgcatgtggggcttaaaacctagatgatgggttgataggtgcagcaaaccaccatggcacatctatacctgtgtaacaaacctgcatgttctgcacatgtatttcagatcgtaaagtaaaaaaaaaaagatatggaagttactatgcgcgttaataaaatatgtttatacctcctcccttaggtgtctattatgtagaacaagtttattacattctaatgataaagtaaacactctgttttcaaaggtggtgttatacgtttgtgtatcttttgccccgggcatgatgatttcatcgtttgtgtaataaatttaatactaccatagtctccccttattcacacgggataagttccaagaccccaatggatgcctgaaactgtggatagtactgaatcctatatacacttatgtttttttcctgtacactcatatttatgataaagtttaacttataaattgtgcacagtgagagactgacaataactataataaaatagaacaattataacaatatactgtaataaaatttatgtgaatttggtttcaaaatatcttattgtactgtactcacccttatgatgatgatgttagatgataaaatgcttatgtgatgtgatgaaggtaggtgaattatgttaggcattgtaatgcagcatgaagctactattgaccttctggtgttacatcagaaggaggatcatctgcttgggtggtcctgaatcatcacgtcctgatgatgtctgttgctggttgtcaggagcagacagtgtccatgactaatgggcaggcagcgtatatagcatgtatacactggacaaagggatgtctcatgtccacggctggacagagcaggagagtgcaagattttgtcacactactcagaatcgtgcagtttaaaacttaccaattgtttatttctggaattttccgtttaatatttttggactgcagttgaccacaggtaactgaattcatggaaagcaaaacaaccatggacaaagtgggattactgtattatttcagattttaattagcatttttcaaaactctgtctagctagtgcttgcattgtagaatttgtctgatttcatttttattgattagggaaataagctttatttttatctggagtgatttgtttctttgtgcttcctcaaaattgagtagtggctactgagtatatatcgaaaaggaaataaattattatgtcaaaaagatacctacatttgtatgttgattgtagcactgttcacaagattaaagatatggaatcaacctaagtgatgaagaaaattggtgtgtgtgtgtgtttgtgtgtatacatacacactgtggaataatactattcagccacaaaaaagaaaaaaaaatcatgtcttttgcagcaacatggatgggactggaggccattatcctaactgaaataactcagaaagtcaaatactacatgttctcacttacaggtgggaacttaaatggttacacatagaatagagtagaataatagacattggagactccaaaaggtgagagggtggcaggggggtgagggttgaaaaattacctattgagtactttgttcagtatttgggtgatgggtacactaaaatcccactttaccaccatgcaatatatgcatgtacgaaatctgcacttgtaccccctaaatatatacaaataaaagttttttaaaacacttagtaaatagcctgtcatagggaataattgaaaccatttcgtatctcactttaaaacctttaggctgggtgctgttgcttatgcctataatcctagcactctgggaggccgaggtgggtggatcacctgaggtcaggagttcgagaccagcctggccaacatggcgaaatcccatctctactaaaaatataaaaattagccagtcatggtggcacacgcctgtaatgccagctccttgggaggctgaggcgggaaaatcacttgaacccaggaggcggaggttacagtgagccgagatcacaccactgcactccagtctgggcaacagagcgagactccatctccaaaaaaaaaaataaaaataaaaataaaaaacctttttagttctgtttcaatgttatcttctttttatttaattatttttggaataagaaataatatttatatggtttgaacaccaaaaggtataaaagatatttttaaaggtataaagtataaaagttagaaatttcccccacttccctgttctctgttcccacagctgccagcagcttaccaccccccagcccaatcactgctactgatgcctaacctatctttccagagttctttgtgtgttcagtagcagttaaccacagatctttaatcattcccctttataccataaaaggtggcatgttatgtacacttgcctcccctttgctttttccacttaatgtgtcttgagaagctttccatatatcagtacatggaaaactttcttatattgttttattttaaatttatatacaataaatgcatggatcagaaaaataattgaatagtgggccccaaattaaatgattactctaatgatttgtagatgggtttagttaaagcactgggatatttagctacaggtataggaatgcatgattattttctgtcaggaaacctagattttgttcttctccccttctttatcaaaggtgaaatcagactcttatttaaaccaggattaagtattctttgcataataatatatatttgctttcccaagttattcttcaggaaagtcttgactctctagcaaactttgtttcttaaaatggaggttagcaggtgttggaaataaggtgagagttttaacacttaaaggaaactatataaagattagatatagtcagaaatttagaaaacattaggaaattcacagagagatggatcccccttttctaccctagattacccctgggctgcttaatggcttgtctttactattagattgtgagctccttgaggtcaggttttatctgttttttatttcaataccaagtgccaagaatatattcagcatttggtgtaaatattataaaatgagtaaatgaatgtgctcttgaatagaagttaactctgattttgggttaagtcccccgccccctttttttgagacagtctcactctatagctcaggctggagtgcagtagcgcagtctcagctcactgcaacccccttctccggggttcaagcaattcttatgcctcagcctcccaagtagctgggattacaggtgtgtgccaccacacccggctgatttttgtatttttagtagagatggggtttcaccatgttggccaggctggtcctgatctcctgaccttaggtgatctgcctgccttggcctctcaaagtgctgggattacaagtatgatctactgcgtctggctgattttgtgttaaaatcctttatgtcagttccagaagaggttaaatggaagttttcgaggcaagagatacttgtgaatttgacatgagtggcctttgttttgaaattttaatgctacacagatgctgtaaaaggattttttcaggccgggcgcggtggctcacgcctgtaatcccagcactttgggaggccgaagcgggtggatcacgaggttaggagatcgagaccatcctggccaacatggtgaaacctcatctctactaaaaatacaaaaattagccgggcgtggtggtgtgcgcctgtagtctcagctactcaggaggctgaggcaggagaattgcttgaacccgggaggtggaggttgcagtagagccgagatcgcgccactgcaactccagcctgggccacagagcaagactccatctcaaaaaaagggtttttcaaaaaatcatgtacaattagaaaattgtgtctcttaaatctatttgcttatgttattaatcccagattatgactgttctttcccctaaggcattagcctgttgaaagaaacagacctataggacttttgttgatgttaaagccagaccagaaatttagaaaatcaggatatttgccattttgataagaaaaccatttaatagttgaatataggaatttgcattttgagagtgtgtactaatttagattctccaggaatagaaccatcatctgaaaataaataagtttaaccagacggacaaggagtgatatgtagttttaggtggtaagactgtgatattgttaggttacatgtatctagggcaagatgctcaaatacaataagtatatacagactaggaactctagttgtctttttttaattaatgaaaagagggttttatgcttcatttctaaacattctcaaaggaatttatgttttgttgatgatctttttttatttatataaatttacgggggtacttgtgcactttttttttaaacatggatagattacagagccgtcaagtcaagcctttagagtttccatcacccaaataacacacattgtattcattaagtaatttctcatgatctcccacctcctgctctctcacctttccaagtctgttatctatcattccatgctctacgtccatgtgtacacatttttcagcatccacatgtgaatgagaacatgtgttattcccaccaacagtgtatgagtgttcccttttctctgcaacctcaccaacttgtgttattttttgtctttttagtaatagtcattctaactggggctggatgatacctcattgtgggtatttttaaaataaaaaaaaatttgtgtgtacataggtatatttatttatggggtacatgagataatattgatacagacatacaatgttcaataactacatcagggttgtatccatcaccaagcatttatcctttcttggtgttagaaacaatctagtttctaatctctaatagtttctaatctctagtagttatattaaaatgcataatgaattattattgactgtagtcaccccattgtgctatcaaatgctaggtcttattcattctatctaactatatttttatacatattagccatccccactgtgccaccatccccattagtgccctggcccccactacccgtcctagcctctggtaaccatcattctactctctatctctatgagttcaattgttttgatttttagataccacaaataagtgagaacatgtgaagtttgtttttctatgtctagattatttcacttaatataatgacctacagttccatccatgttgttgcaatgacaggatctcatacttttttaagggctgaataggactccattgtgtatgtgtaacacattttctttattcgtccgtctgttgatggacactcaggttacttccaaatcttggttattgtgaatagtgctgcagtaatcatgggagtgcagataactctttgatatactgatttcctttctttggggtacatatttagcagtggaattgctggattatatggtagctctctagtttttttttttttttttttttttcatttttgagacagggtctcactctgttgcccaggctggaatgcagtggcggaggttcacttcagcctcaacctcgcaggcttaggggatccacccacttcagtcttccaagtagctgggactataggcgcataccaccatgcccagctaggtttttgttgttgttgttgttgttgttgaggcagagtctcactctgtcacccaggctggagtgcagtggtgcgatctcggctcactgcaacctctgcctcctcggttcaagccattctcctgccttagcctcccaagcagctgggattacaggcgcccaccaccatgcctggctaacccagctagtttttaattgttcgtagagatggggtttcaccatgttgtctagactggtctcgaactcctcgactcaagtgatcctcctgcgttggtgtctcaaagtgctgggattgcaggcacaaggcaccgtgcctggtcagaatttttttttaagggtttctcctttgtaaatttcttattcatatcttgaattgattttctgagtttcttgtattggttttcagacttttcttgcatctcagtgacccttaaaatcaatattttgaatattttatctgggattttgtggatttcattttggttaagatctgttgctgcagaatcgtgttcctttgacagtgtcatattaccttggtttctgatgtttcctttgtcttttcattgatttctgtgcatgtgctgtaacagtcacttcttatctttgaatttactttcatggtgaggggagatttcttcctgaagatgtgactataatgttggttgggccttgcttctgggtgcgtgcagtagtgaagtctctgtatgatttattttgagacagctctgttgcccaggctggagtgcagtggcacattcatagcttgcttcagcctcaaagtcctgggcataagtgatccttctgcctcagcctcctgagtacctaggactacaggcgtgtgccaccatgcctggctaattttcaattttcttttagagatgggggtctcattatattgcccaggctggtcttgaactcctggtctcaagcaatcctctctccttggcctcccaaaatgttaggattacaggcatgaaccaccgtgcccagcctctgtatgatttctttggctataaatagcattaatggtgtctgtggtttccttgatgtcttagcttgagtttatttgtggaggctgaagttgcgctggggattggaatgcctaataggcctgtctttaggtttcaatggtagtgatggtgggctaagcatgtctatccatgtgccctggggcagtgtgtgctggtaactgtgttggcagttccaggcaggctgattcttgggcttctgagtgactttctcagatgcctgttgtaatggtgtaccaggtgggtgagctggctcttgagctcctgggcaactggcatggcatagtttatggtggtagtagttttgttgagatactcttgtgggtcccaagcactttgcatttgtgttagcagtggttacaatgagatccaggccagtaaggtggtacttgcaggcatgaggcagctgaggcggtactggtagggtgttatccctgacctctgtcccctgggagaagtactctggtgtttcagagtgtttcaggtagtgggtttggttgtggaatcccctggtaacctggatcctgcactgtttctcagccaggtcaaagcctggtagagctggactgggaaagcttgcactcaggcccccacagtggtgtaatgtcatgataggcggggtggaatgatcttcaggctgctggcaaaatgcttgggtgagggatgagtgccactgctgagatcctgccatggggaagttgggcctggtcccaggagtgagttgtgttcctttcatgccccagtccaggcggagttccttcctcttgtccctgctgttcagtcagaactctgcagttcttgcctagtccctaaatcatcccagggtcgggtcatataagccccatccagctcaagacttaagcctccagggcaattaatcgtgctcaaatcctgggggtggtgtttgcttctagcactggtggtggctgcatcccacaccaggcagagccaccccatccccgcccctactcacactctgcctctccaaacagcagcccaagtttccctaatggctaggactggccctgttgcttccccgtactgctcacagttatgagctgagatcctgcatcgtgtcttgttacagctgcttaggtttcaaaaatggcatgggacacagaatgtgttccctccctgaaacagttctttctcacagtcttccagtcattccctaaattaattagattcagggcttaagagggtcagggtgctctactgaggactggattgtatggtagtggaccacagaaaaatactcaccctctcccatattggggaatcacttctggttccctgtgggtcccagccacacaggctctctgttttccttttgcttcctagattttggtttttgctgtcgcttttctgttgaactcctgtgttccctctgggataatatatccaaagtgtcattgtctacacaattttagctcttgtacctggatgaggcacgcttgaaattcttgcagtcatccatcttttcctgatcttgtttcttctgccccattccccaggttcctccagggtctcacagttcccctgtatgtgggaaaggcagttttctttctgcccaatcctgcttctcctttgtccacccagatgaggtttccgctagaattgctacttaaagtggttctgtggaacattttgtagcagagaaaatcagggctgagggagcaccataaaggttagaaaagattagaacattaggttagaaaatctgaactactctacctgtcttgattaggaggattagagttgatgttggatgggtttgttggtttattttccacttatctatcagaatgaagaacttactgccttttcttcttagttggtctaatatttatcactttaattatttttaagtgtacaattcagtggcattaaatatatttataatgtatcatgatcattactacctatgcccaaaactttttcatcatccccaacaaaactctatatccaaaaaaaaataaaaccctctatatgtacatggaacaattaagttgggcccctatcttgcaccatataaaacagttaaatgcatcaaagatcttaacgttaacagctaaaattataaaactcttagcagaaaacatttgggctgattttcatgacctgggatttggcaatgatttcataaacataatgtagaaagcacaggcagcaaaagaataagtaagttggacttcattaaaaatttaaaaatttttttacatcagaggtcactatcggctggatgtggtggctcacacctgtaatcccagcactttgagaggctgaggcgggtggatcacttgaggtcaggagttcgagaccagcctgaccaacatggtgaaaccctgtctctactaaaaatacaaaaattagctgggcatggtggcgcgcacctgtagtcccagctacttgagaggctgtggcaggagaatcacttgagcatgggaggtggaggttgtagtgagctgagatcgtgccactgcactagaacctgggcgagagcgcaagactccatctcaaaacaaacaaacaaacaaaatgaagcaatcccccccccaaaaaaaaggtcactatcaagagaataaaaagaaagacaactcagaatgggagaaaatatttgcaaatcatatgactgatgagggtttaatatccagaatgtgtaaagaacttttactgagcagcgaaaagaaaacccaatgaagaaatgaacaaaggccttcaagaaatgaacaaaggccttcaatagccatgactttacttttttaaatttaaatttaaattttttgagacaaagtcttactctcttgcttgggctggagtgcagtggtgtgactgtggctcactgcagccttgatctcccagactcaagtgattctcctacctcagtctctggagtagctaggatgacagactcacactaccacatgtgactttgtgtgtgtgtgtgtgtgtgtgtgtgtagagacagggtctcactatgttgctcaggctggtcttgacctcctgggctcaagtgagcctctcacttttatttttatttgtagtagagatgagatcttgctaatgttccccaagctggtctcgaactcctgagctcaagcaatcctaccttcctcggcctcccaaagggctgggattataggcgtgattcactgtgcctggcctagtttctttgttttaatttttttcctccccatttgtcttttgagtttccctgagaatctgtcttgctgctgtctcagttgtcattcactgttattacactggaaccctattgatgtagtggtaaggaattagggaggggaagtgttttgtaatctcatgattaaatgtcatttcttttttttttaattggtcctgagtccctgaattgtgactctcagaagtgtttcttagcccttgccctcccacttagatgagacaggaaggctataagcctcgggggttttctaattgtctttcctcttggtagataatggtgtgagcatatttgaatatagtttctttcctctcctcctgctcaaggcacaaggaaattttcctcaaatatttgcagtgaaaacatactaaaacccttgtaggattcctggaggtaaaacctaggaaagtgtaggggcccctctaagactgggatgtcaggatttttaaactctcaaactaatccatatttggcctccagaagttgtcagtttctacttgagtgtttctgttctaggaaagctgtgatattctgtatctgtctttctagttttttttggtggtggtttgccttgtgacctcagtttttggattgatctaagataaattactgattttcagttttctcagcgttttttcttgtcaggatagaagtgaggacctccaaaatccttacatattatagctgcctggtgagttttgtttgtttctttttttaaaaattttttttttttttttttttttttgggatggagttttgcgcttcttccccaggctggagtgcagtggcgcaatctcggctcactaaaacctctgcctcccaggttcaagcaattctcctgcctcagcctcccaagtagctgaaattacaggtgcccgccactatatctggctaattttttttatatttttgatagagatggggtttcgtcatgttggccaggctggtcttgaaatcctgacctcaggtgatctacccacctcggcctcccaaagtgctgggattacaagtatgagccaccttgcctggcccgttttttcttacttttagtaaaaataacctcacgtaaactgtcataggtgtctgtgggcttatttttgatgttctcctttgttggaaattcttgtgaaataccttccaggtcttagtctttgtgaggatcaggttctgctttcaattggatgttttaagaattagttttaaaataatttgtttttcttattattagcaccctatgtttagttgctgtacttatttggatagtgtggtaagcacagtggcttaggcatgagaaatataactagagatctcataattttatgtgtttataaagtgttttatttaaaaattaaataattgcaaatgagtggataaagaaactgatatatatatatctgattatatatatatatatctgattatgtatatatatctgattatatatatatgatggaatactacccggctataagaatgaatgaattaatggcatttgcagtaacctggatgggattggagactattattctaagtgaagtaactcaggaatggaaaaccaaacatcgttatgttctcgctcataagtaggagctaagctataaggatgcaaaggcataagaatgacacagtggcttttggggactcagagggaaagggtaggaaggagatgagggataaaagactacaaattgggttcatgtgtactgcttgggagatgggtgcaacaaaatctcagaaattaccactaaagaatttactcgtgtaaccaaataccacgtattccccagaagcctgtggaaataaaaaattaaaaaaattgcaaatgtaaataagacagtaacaaagatggcaaagaacaaagatgaaaaagtatgctgtattacctgaaagtgcttttatggatatcttagcttatccttcgtccatttaaatattgttagttttagccgggaacatgcctgtaatcccagcaccttgggaagctgaggcgggcagaccacttgagaccaggagtttgagaccagccaggccaacatggtgaaacccgtctctactgaaaatataaaaattagccgggcgttggggcgcatacctgtaatcccagctatttaggaggctgaggcaggacaatcacttgaacctgggaggcggaggttgcagtgagacgagattgtgccactgaactccagcatgggtgacagagtaagaccctgtctccaaaaaaaaaaaaaaaaaaaaaagacacaaaagagaaacaaaaaaaacatattgttagttttgatgattatctactagggtaagtacttttctactcattaaattccattagtgactgtgccttgatttccctgaaaggatgcagtatagagtaggcttttgattggagatagacttcctgattttccacttagtatttaggagtgaaaattattattattattatttattgttttttttttttttggagacagggtgtcactgtatcgcctaggctggagtgcagtggcttgatcctgactcactgtagccttgacttcctagggtcaagcaatcttcccacctcagcctcctgagtagctgggactacaggcacgtgccaccacagccggctaatttaaaaaaattctgtagagatgggatctcactatgttgttcaggcttgtctcaaactcttgggctcaaatcatcttcccacctcagcctccctaagtgctgggattataggtgtgagccactgcacccagccggaagtgcaaattatttaactcctttattttattcagcaaataaatgtctttctgagcctcagtttcctgtaataaggttcttataagttttaaatgaggtcagtgtgcattaaatgtacatgttagaatttggtaaggttagtaagaaaaccaaagacatgtggaccctttacaaaaaattccagcatttaccctaagagatgctttttaagtggttgaaatttggtggcatggaggaaatgtatatgggctcgtatcacatttgggagtaaaattaaggcatgaaatttaaacaaaaaataaaattgtgggtacatagtaggtgtatatatttatgggatttatgagattctgagacaggcatgaaatgtgtactaatcacatcatgtaaaatgggctgtccatcccctcaagcatgtatcctttgagttgaaaaacaatccaattttattctttcaggtattaaaaaatgtacaattaatttaatacagtaaataatacattaatttgatctcaaactcctgacctcaaatgattaattagattaattaatgtattatctattatttattatatacaccctgttgtgccatcaaatactaggccccccccccccttttttttttttggagacagagtcttgccctgtcgcctaagctggagtgcaatggtgcgatcttggctcactgtaacctccgcctcctgggttcaaatgattctgctgcctcagcctcccgagtagctgggattacaggcgcccaccaccaagcccagctaatttttgtatttttagtagagacggggtttcaccatgttggccaggctgctatcgaactcctgaccgcgtggttcgcccgccgcggcctcctaaagtgctgggagtacaggtgtgagccactgcgcctggccaaatactaggtcttattcatgctttccaactgtttttttttttgtacccattaaacgtcaccacatcttgccccccctcgcacttctcttttctttctactctgtgtctccatgagtttgttttgatttttagattccacaaataagtgagaatatgcaatgttggtctttctgtgcctggcttatttcacttagcataataacctctagttccatccatgttgttgcaaatgacgggatctcattcttttttatggctgaatagtagtccattttgtgtaactaccacattttctttatccattcatctcttttgatggatacttaggttgcatccaaacctggctattgggaacagtgctgtaataaacatgggaatgcaggtatccctttgatatgctgatttgctttatttctggtgtatacccaagcagctggattgctggatcatatggtagctcaatttttagttttataaggaacctccaaactgttcttcgtagtggttgtcctatttcacgttgttgccaactgtgtatgaggattttcttttctttacatcattgccaacatttgttattgcctgtcttttggatataagccatttcaactcaggcaagatggtatctcatggtagctttgatttgcatttctctgatgatcagtgatgtagaatgctttttcatatgcctatttgcaatttgtatgtcttcttttgagaaatgtgtatccacattttttgcccatttttgattggattattagatttttattctgtagagttgtttgagctacttacatattctggttattaatcgcttgttagatggatagtttgcaaatactttctcccattctttgggttgtttgttcactttgttgattgtttcttttgttatgcaaaagctttttaacttgatgtgatcccatttgtcaagttttgtttggttacctgtgcttgtggggtattgttcaagaaaattttgcccagactaatggcctagagagtttccccaatgttttcttgtagaggattcataaattgaagttttagataaaattctttaatccattttgattttatttatgtatagagcaagagataggagtctagtttctttttctttttttttttttgaggtggagtttcggctcttgttgcccatactggagtgcaatggcacggtctcagctcactgcaacctccgtctcccaggttcaagcgattctcctgcctcagcctcccgagtagctgggattacaagagcccaccaccatgcccgtctgatttttgtatttatttatttttatttatttatttatttatttatttagttttttgagacggagtcttgctctgtcacccaggctggagtgcagtggcacgatctcggctcactgcaagctccgcctcccgggttcacgccattctccagcctcagcctcccgagtagctgggattacaagagcccaccaccatgcccgtctgatttttgtatttatttttatttatttatttatttatttatttatttatttatttagttttttgagacggagtcttgctctgtcacccaggctggagtgcagtggcacgatctcggctcactgcaagctccgcctcccgggttcacgccattctccagcctcagcctcccgagtagctgggactacaggcgtccgtcactgtgccggctaattttttgtatttttattagagacggggtttcaccgtagccagaatggtctcgatctcctgacctcgtgatccgcctgccttggcctcccaaagtgctgggattacaggcgtgagtcattgcgccaggctaatttttgtatttttaatagagaccggatttcaccatgttggccaggctggccttgaactcctgacctcaggtggtctggccgtctcggcctcccaaactgctgagattacaggtatgagccactgcacccggcctggagtctagtttcattcttctgtatatggatatccagttttcccggcaccatttatttatttatttttatttattttatttttttttgagacagagtctcattccatcacccaggctggagtgcagtggtgtgatgtgggctcactgcaacctctgcctcccggattcaagcagttctcctgcctcagcctcccgagtagctgggattacaagctaatttttatattttgagtagagatggggtttcaccatgttggccaggctgatctcgaactcttgacctcaaatgatccacctgcctcggccccccaaattactgggattacaggcgtgagccaccgtgccgggccagcaccatttatttttattttattttacttatttttttgagagtgagtctccctatgttgcccaggctggagtgcagtggtgctatctcatctcactgcatgcagcctctgcctcctgcgttcaagcgattctcctgcctcagcctcccaagtagctgggattacaggcacccaccatgatgcccagctaatttttgtatttttagtagagacggggtttcaccatgttggccaggctggtctcaaactcctgacctcaggtgatccttccgccttggcctcccaaagtgctgggattacaggcatgagccaccatgcccagcctggagtctagtttcattcttccgtatatggatatccagttttcccggcaccgtttacttatttatatttatttattttattttttttgagacagagtctcatttcatcacccaggctggcgtgcagtggtgtgatctaggctcactgcaacctcttcctcctgggttcaagcaattctcctgcctcagcctcctgagtagctgggatgacaggtgtgtactaccaccatgcccaactaatttttgtatgtatgtatgtatgtatgtatgtatgtatgtatgtatgtatgtatgtatttgagacagaatcttgctcttttgtcgaggctggagtgcactggcacgatctcggctcactgcaacctccgcctcccaggttcaagcgattctcctgcctcagcctcctgaggagctgggattacaggtgcatgccaccacgcctggctaatttttttttcgtatttttagtagagatggagtttcaccatgttgcccaggctggtctcgaactcctgaccttgtgatctgctcacctcagcttcccaaagtgttgggattacaggtgtgagccagcgtgcctggccccagcaccttttattttatttattttatttatttttctgagagtgagtctcactgtgttgcccaggctggagtgcagtggtgctatctcccctcactgcaacctctgcctcctgggttcaagtgattcttctgcctcagccttccaagtagctgggattacaggtgcctgccaccatggctggctaattttttttttttttttttttttttttttagcatagatggggtttcaccctgttggccaggctggtctcaaactcctgacctcaagtgatccgtctgctttagccttccaaagttctgggattacagatgtgagccactgtgcctggccccagcatcatgtattgagcctttttcttttccccagcatatgttctcggcacctttctagaaatagaaaatgagttcaccgtagatgtgtggatttgtttctgagttctgtattctgtccattggtttatgtgtctgcttttatgccagaatcatgctgttttggttactataactctgtggtataatttgaagtctgataatgtgattcttccagttttgttctttctgcttagtatagttttgggaattctggaacttttgtagttccgtgtaagttttaggattgttttttctatttctgtgaagagtgtcattggtattttgatagggattgcattgaatctatagattgctttggatagtatggacagtttaacaatattgattcttccagtccatgaacatgaaatatctttacattttttggtgtcctcttcaatttcattcagtttgcttttcagattggtcactgtcgatgtttagaaatgctgctgatttttgtatattgattttttatactgacagtttactgaatttgtttatccgttctaatagtttttttgtagagtctgtaggtttttctaaatataagatcatatcatctgcaaataagggtaatttgacttcttcctttcccttatttctttctcttgtctggttgctgtagctaggacttccagtagtaccatgttgagtaactgctggaagtgggcattcttgtcgtgatctggatcttagaggaaaggcgttcagtttttcccctcagtttgataccagttgtgggtgtgttgtatatggcttttattatgttgaggtatgttcctcctaaacccatttttttgagggtttttatcatgaaggaatgttgaatattatcaaatagtttttaagcatcaattgatataatatggtttttgttcttcattctgttgatatgatgtatcacattgatttgcatatattgatcccctcttgcatccaagggataaactccacctggttacgatgaatgatctttttaatgtgtctgatttgctagtattttgttgaggatgtttgcagcaatatttatcagagatattggcctgtcattttctttttttgatgtgtttttgtcaggttttggtaacagggtaatactggcctcacagaatgtgtttggaagtattgcttccttttattttttggaatagtttgagtaggaatagtattgatgcaggaattttctcggcccctttgttggacttgtgacaggggcgaatgtttactcagcctgccgtgctcaaccccttgttggagggtgcatgtgagtgagtgagtgcgggacctggccagctggtgggggcactgacacagcagcaagccctgtgcagggaccacggccagaccaggcacaagcgagtgagtgtgggacccagctgttctgagcaccagcaggagcaggcctgtgcacagcacccaggttgatggggaggggggtggtgtctgtgaccccgaggcccctgagggggtgttaacagtgctcctttagttctgctgtctgctgatggctgtgtgttaacaagttggcctcttgccttgtcatgtggggtggctgccctccactggtgagggcaaagggctggtgtgacagtcttttttgggtacctgcactcagtgggtcctgagctcttgtctggcatccaagaagaatgaggttgagtggacacttgaaggatggtgaaggtgaagaattttattgagcagtgggaatggctcagtggagaggggagctggagaggggatgggaagggctgatctccctgaagtccggccgtttcttccctaagtcatgctgtctcctttcccaaagtttggccatcttctctccgaaattaagctgtttctctcctctctaccaactgaatctggggtctttataagcataggatcctctttataagcacaggatgggggcggggcaggctgtagaagttttggaaaaggcaacattctattggtaaagagacattattcaaacagaaccaatcgggagagagcggacaaacaggaatagaagttttcactttgggctgtgggtttcaggctttttggcttgaacgtggggtttcaccagggactgcccttgtcttcctagaatttctctgcctcctgcctctatcagtattagatcttctttaaatgtttggtagaattcagcagtgaagccatcaggtcccaggcttttatttactgggagaatttttattatggtgtcaatctcgttatttgttatagctgtgttcaggttgcagatttgttcatggttcaatcttggtagattgtgtctaggaatttgtccatttcttctaggttttccagttcattagcatatagtttttcatagtagccatgaatgaacctttttatttctgcagtattggttatcattgtaatgtctccattctcatctctggtttatatatttggatcttcttttttttttctttttttttttttactctggccaaaggtttttaaattttcttttaacttttacaaaaaccaacattttgttttattgatattttgtattattttctttatttcagtttcgtttgcttcactctgatctttattatttcttctaattttggggttggtttactcttgcttttcttattctttaagatgtgttgttaggttgtttatttgaagtatttcttcttttttcatgtaggcactcacagctataaacttcccttttagtaatgcttttgctgtatcccataggttttggtatgttgtgtttcagtatcatttgtttcaatgaattttccaattttcttcttaatttttgcattgacttactgatcattcaagaacatattgtttaatttacatgtatttgtatacttttcaaaatttctcattattgatttctagttttattccgttatcagaggagatgcttgatattatttcaatatttttaatgtcttaagacttgttttgttacttaacatatgttctatccttgagaataatccatgggctgaggagaagaatgtgtattctgcagcccttggatgaatttttctgtaaatatctattaggtccatttggcctctaatgcacattaagtctgatgcttcattgttggttttctttggaaggtctgtccaatgctgaaagtgggatattgaagtctccaagttttatcatattggggcctgtctctcccttttgctctaataatacttgctttatatatgtgagtgctccagtgttgggtgcatttatgtttaaaatggttacatcctcttgctgaattgactgctttatcattatatagtgaccctctttggcttttcctatagtttttgtcttgaaatctattttgtcttatattagtatagccacttctgcacttttttggtttccattggctttggaaaagatttctcgtaattctgtttgataaggacacatgttaggaggttttcaacacttcagtgagtagtaaacttgtaagtaaagcaggtatgaacagaatctcttgaattagtgaaaagtcaaaatcgttaattactgtttaatttaaaactgaaattataggtattaacaaataactatatgccttatactgtactttatttatttatttttccgagacggtcttgctctgttgcccaggctggagtgcggtgacgtgatcttggctcactgcagcctctgcctcccgggttcaagcaattttcatgcctcagcctaccgagtagctgggactacaggcatgcactggcacacccagctaagttttttgtatttttagtagagatgggatttcaccatgttgcccaggctggtctccaattcctgacctcaagtgatccacccaccttggcctcccaaagtgctgggattacaggcatgagccatcatgcccggccatataatgtactttaaacatgatgattttgaaactggaaacacacgcacatgtgagtaatttcttaaatggaattgaattaccttgaagaatcttagaaaaatgatgtttttaattttaaattagttttgcgtcatacatgtctttatttctcaaattttaaagaaaagtctatgaattaaagaaaataaaacttttcctgcatgaaagcaatgagtgtattatgtaccaaaaaggtagaagaaaaatatcttctgtaatattagctagatattacttactaaagatatttttggggtatatttattagcaatattttaatgcaattttaaacataattgtcatcatacttcatagacagtttatagcctgctatttttggttagcattgtagtatgagctattttccatattatttgaacttttaaaatttaatggttggtatgatattgtatgacttgtatgcatccttgtttacctagtctttattatacactttaattgattacagttttttttttttttttttgcttttgtgagcatctggcagataactttcttgagtaaagttattatgtagaaatattttctttgggccaggtgcggtggctcatgcctataatcccagcactttgggaggctgaggcaggtggaacatgaagtcaggagttcaagaccagcctggccaatatggtgaaaccccgtctatactaaaaatacaaaaatcagctgggcatggtggtgcatgcctgtagtcccaggtactcaggaggttgaggcaggagaattgcttgaacccgggaggtggagaggttgcagtgagccgagatcgaaccactgcactccagcctgggcgacagagcaagactccaactcaaaaaaaaaaaaagaaaagaaaagaaaagaaatactttcttactttctttgtatagataaagggagatagaattactagatcaaagtctcttgatggtttttgccaatttgttttgtaaatgtatgtatcaccacaggctatctatgagagtgtctatttcatggaaacttagcctacaatgaatagtcattttacccctaaatatttgataagttaaaaaatgctatcacatttaacatttcataggctttaagaagttgcagttttatattcatttcttcatgcattttgtgtactatttcaaaagtttctataggggaatgagagcaaagtaatgtgtttttcattatttattttgctaaccaaacatatttaattactaaccaaaaggatgatcctaattaagccaacacttggaattattttcatgtaaaatgtctgtgatagagataattgaatttaataatgaaaaaagtattacagaaatttgctcattaaactgagcttgttttcagctaatccttctgcgaagtgataatgactttttttttttttttttaaataaagatgggggctcgctatgttgaccaggctggtcttgaactcctggcctcaagtgatcctcccatctccgcctctcaaattgctaggaatacaggcatgagccaccacacttggtttaatagtggaatttttattacacttttttatggattcgaggagaggtggcattgtacataacacattctaccgctaattttccatctttcacttttctcattgtgctttccttcccattccgttcctggtgttgaaccaatgcatcatttgtaaatttgtagacagtctgagtttttctgccataatctgttgtttcttcagacttcttctctggtttataagaaaactgttgttttaaaactctcagttttgtattttttatttcttattatactttaagttctgggatatgtgagcagaacgtgcaagttttttacataagtatacatgtgccatggtggtttgctgcacccatcaacctatcatctccattgggtatttcttctaatgctatccctccccttgcccccaaccccccaacaggccccagtgtgatgttcccctccttgtgcccatatgttctcattgttcaactcccacttatgagtgagaacatgcagtgtttggttttctgttcctgtgttagtttgctgagagtgatggtttccagcttcatccatgtccctgcaaaatatatgaactgatcctttttttatggctgcatagtattccgtggtgtataggtgccacattttctttatccagtgtaccattgataggtatttgggttggttccaagtctttgctactgtgaatagtgctgcagtaaacatatgtgtgcatgtgtctttacagtagaatgatttataatcctttgggtatatacccagtaatgggattgctgggtcaaatggtatttctaattctagatcattgtggaatcgtcacactgtcttccacaatggttgaacgaatttatcctcccaccaacagtgtaaaagtgttcctatttctccacatcctctccagcatctgttgtttcctgacttcttaatgatcggcattctaattggcatgagatggtatctcattgtggttttgatttgcatttctctaatgaccagtgatgctgagctgtttttcatgtttgttggccatgtaaatgtcttctttggagaagtgtctattcatatcctatgcccactttttgatagggttatttgtttttttcttataaatttaagttctttgtagattctggatattagccctttgtcagatggataaaaaaacactatttttttaaaaaattttccaattcctcatcggtaaaaaagcagtaaaacattcatggtaatgatcatggcctatagttttttttttttttaagtgacattaggatttaaaactggtatgaaacctaatcatttattttagttagctaatatcaggatttagatttatttttttgacccaattgcagataggcagatcagatctcatagactgccatctgcctcaagctccttttgtagttatgtgaatgtgagcctgaaggctgaacccacttttctctaatggagatttttttttattacactttaagttctagggtacatgtgcacaacgtgcaggtttgttacatatgcatacatgtgccatgttggtgtgctgcacccattaactcgtcatttacattaggtatatctactaatgctatccctcccccctccccccaccccatgacaggccccggtgtgtgatgttccccttcctgtgtccaagtgttttcattgttgaattcccacctatgagtgagaacatgcggtgtttggttttttgtccttgcgatagtttgctgagaatgatggtttccagcttcatccatgtccctatataggacatgaactcatccttttttatggctgcatagtattccatggtgtgtatgtgccacattttcttaatccagtctgtcattgatggacatttgggttggttccaggtctttgctattgtgaatagtgctgcaataaacatacatgtgtgtgagtctttatagcagcatgattgataatcctttgggtatatacccagtaatggggtggctgggtcaaatggtatttctagttctagatccttgaggagtcaccacactgtcttccacaatggttgaactagtttacagtcccaccaacaatgtaaaagtgttcctatttctccacatcctctccagcatgtgttgtttcctgactttttaatgatcgccattctaactggcatgagatggtatctcattgtggttttgatttgcatttgtctgatgaccagtgatgatgagcatttttacatgtgtctttggctgcataaatgtcttcttttgagaagtgtctgttcatatcctttgcctactttttgatggggttgtttgatttttttcttgtaaatttgtttaagttctttgtagattctggatattagccctttgtcagatgagtagattgcaaaaattttctcccattctgtagtttgcctgttcactctgatggtagtttcttttgctgtgcagaagctcttgagtttaattagatcccatttgtcaattttggcttttgttgccattgcttttggtgttttagacatgaagtccttgcccatgcctatgtcctgaatggtattgcctaggttttcttctagggtttttatggttttaggtctgacgcttaagtctttaatccatcttgaattaatttttgtgtaaggtgtaaggaagggatccagtttcagctttctccatatggctagccagttttcccagcaccatttgttaaatagggaattctttccccattttttgtttttgtcaggtttgtcaaagatcaggtggttgtagatgtgtggtattatttctgagggctctgttttgttccattgttctatatctctgttttggtaccagtaccatgctgttttggttactgtagccttgtagtatagtttgaagtcaggtagcgtgatgcctccagctttgttctttttgcttaggattgttgtggcaatgcggtttaaccactctgaaaagatgtatttaaggacttttatctagactctatggtgaggtataacatagtgctggttgagtcagcttcaagtttttgtagagggaggaagagagtaacaaccatgtctggatttaataaaaagtttagcataagtaaatgtgtgctcttttgccttaagaaaatatttttcaatatataaaaaggattaatgagtgctgcctttcagatacttggtttggtgtgtttgaaacatcatttccaaagataggacatacacatttccagggatcatctctatgatatgactctagaaatgatgtagatttttaaaatcaatgtcagaacttatagacacaaatgtatgctttccttctaagtagtcactttgggagcccatatacataacagtggtgtcattcctgatgatatgttgggaactctcattttgtaaccagtttagaagtcatgcaagtaaataaatcttcaggattacttcagatttgggcaaaaaattagttttacccaacttgatcattttgcatttttcaccatatttgactctaagtgaaaactggctatttccaaaaatcatacccatcctgaggatgtgaagatatttttgggctgggcacggtagctcactcctgtaatcccagcagtttgggaggctgaggcagtagggttgtttgaggccagaatttgaagaccagcttggtcaacatagtgagactccctctctccaaaggaaaaaaaaaagtgaagttttttttttctttttcaaatgagtaggcagcattgtttagttatctgtttttttttcttttttttccactgttggacttctgtccattctctttatttgtttatttatttatttgagatggagttttgctctgttgtctaggccggagtgcagtggcgcgatcttggctcactgcagtctctccctcccggctcaagtgattctcctgcctcagcctcccaagtagctgggattacaggcatgcaccaccaggcccggctaattttgtgtttctaggggagacggggtttcaccatgttggccaggctggtctggaactcctgacctcaagtgatctgcctgtctagctcccaaagtgccggggttacaggtgtgagctaccgtgcctggcctgctgatcatactctcttgattttatttttgtactgtggtactgcggttgatggactgcactgatgttatccatatttttaaccttggtcacccacagtgtgaactcattaaatagctgactttgcaatttgattgctatgatttgggaatgagtgtggcagtcataattgtgcaggtttgctatcgtttcatttctagagaacttttctatggtgatctattgatgagataagatatagtatgacattatttattcctctttttgacttttggttctcaggaattttgggtgctgtgagttgacatgtagcatcatttcctcaggtctcattttctatctgagcacgattaaggacacagtgacctgatgataaatttttttgtacatctgactcttatctgaaagaatggttattggccaaatatggaaaccatacccacttggtacctttattctagaggcaaagtttgtttcaaaattttgtaaaacaaccctctccaccaaaagaaaacaaatacccacacaagatctctagttacggtgtctgttatatctcatttcttttccttccctaaatatactgagctattcttaactaaatacaggaaaattgtgcagaggaacacttactaagtgttcagtaaatgttttcatttttcttatgtgtatatctagaagtagaattgttgggtcattgagtaactgtttctgcgtaaatatctatacacgtgccatggtggtttgctgcacccatcaacccgtcatctacattacgtatttctcctaatgctatccctcccccaacccctaacaggccccagtgtgtgatgttcccctccctgtgtccatgtgttctcattgttcaactcccacttatgagtgagaacatgcagtatttggttttctgttcttgtgttagtttgctgagaatgatggtttccagctccatccatgtccctgcaaaggacataaacgcatccttttttatggctgcatagtattccatggggtatatgtgccacattttctttatccagtctatcactgatgggcatttgggttagttccaagtctttgctattgtgaatagtgctgcagtaaacatgtgtgcatgtgtctttatagtagaatgatttataatcctttgggtatatacccagtaatgggatggctgggtcaaatggtatttctagttctagatccttgaggaatcgccacactgtctgccacgatggttgaactaatttaccctcccatcaacagtgtaaaattgttcctatttctccacatcctctccagcatgtgttgttccctgactttttaatgttcgccattctaaccggcgtgaggtggtatctcattgtggtttttatttgcatttctctaatgaccagtgatgatgagttttttttcatatgtttgttggccacataaatgtcttcttttgagaaatgtctgttcatatcctttgcccactttttgttagggttgtttgcttttttcttgtaaatttgtttaagttctttgtagattctggatattagccctttgtcagatggatagatcacaaaaaagttctcccattctgtaggttgcctgttcactctgatgagatatatatatatattttttttttgctgtgcagaaggtctttagtttagttagatcccatttgtcaattttggcttttgttgtcattgcttttggtgttttagtcatgaagtctttgcccatgcctatgtcctgaatggtggtttgcctaggttttcttctagggtttttatggttttaggtcttatgtttaagtctttaatccatcttgagttaatttttatataatgtgtaaggaaggagtccagcttcagttttctgcatatggctagccagttttccaaacaccatttattaaatagggagtcctttctccattgcttgtttttgtcaggtttgtcaaagatcagatggttgtagatatgtggtgttatttctgaggcctcggttctgttccattgttctatatctctgttttggtaccagtaccatgctgttttggttactgtagccttgtagtatagtttgaagtcaggtagcatgatgcctccagctttgttctgtttgcttaggattgtcgtggccctgtggggtattttttggttccatatgaaatttaaagtagcttttttttccaattctgtgaagaaagtcagtggtagcttgatggggatagcattgaatgtatacattactttgggcagtatggccattttcatgatattgattcttcctatccatgagcatggaatgtttttccatttatttgagtcctctcttatttccttgagcagtggtttgtagttctccttgaagaggtccttcacatcccttgtaagttgtattcctaggtattttattgtctttgtagcagttgttaataggaattcactcatgatttggctctctatctgttattgttgtataagaatgcttgtgatttttgcacattgattttgtatcctgagacttcgctgaagttgcttgtcagcttaaggagattttgggctgagatggtggggttttctaaatatgcaatcatttcatctgcagacagagaatttgacttcctcttttccggattgaataccctttatttctttctgttgcctaaatgccctggccagaacttacaatactgtgttgaataggagtggtgagagtgggcatccttgtcttgtaccgggtttcaaagggaatgcttccagtttttgcccattcagtatgatgttggctgtggttttgtcataaatagctcttattattttgagatacgtttcatcggtacccagtttattgagagtttttagcgtgaaggagtgttgaattttattgaagtccttttctgcatctattgagataatcatgtggtttttgtcattggttctgtttatgtgatggattatgtttattgatttgcgtatgttgaaccagctgtgtatcacagggatgaagccgacttgatcgtggtggataagctttttgatgtgctgctggattcggcttgccagtattttattgaggatttttgcatcgatgttcatcagggatattggcctgaaattttctttatttgttgtgtctctgccaggttttggtatcaggatgatgctggcctcataaaatgagttagggaggattccctcgttttctattttttggaatagtttcagaaggaatggtaccagctcctctttgtacctctggtagaattcagctttgaatctgtctggtcctggacttattttgatcggtaggctattagttactgcctcaacttcagaactttttattggtttattcagggattcgacttcttccttgtttagtcttcggagggtgtatgtgtccaggcatttatccatttcctctagattttctagtttgtttgcatagaggtgcttatagtattctctgatggtagtttgtatttttgtgggatcagtggtgatatcccctttatcattttttattgcatctatttgattcttctctcttttgttctttattagtccggatagtggtctgttttgttgatcttctcaaaaaaacacctcctgaattcactgatagtttgaagggtttttcctgtctctatctctttgagttcttctctgatcttagttatttcttgtcttctcctagcttttgaagttgtttgctcttccttctctagttgttttaattatgatgttagggtgttgactttagatatttcctgctttctcttgtgggcatttagtgctataaatttccctgtacacactgctttaaatttgtcccagaaattctggtatgttgtctctttgttctcattggtttcaaagaacttctttatttctgccttaatttctttgtttacctagtagtcattcaggggcaggttgttcagtttccatgtagttgtgcggttttgaatgagtttcttaatcctgagttctaatttgattgcattatagtctgagagactgttatgatttccgttctttttcatttgcttaggagtgttttacttctaattatatggtcagttttagaataagcacgatgaggtgctgagaagaatgtatattctgttgctttggggtcaagagttctgtagatgtctgttaggtctgcttggtccagagctgagttcaagtgttgtatatccttgttaattttccgtcttgtcggtctgtctaatattgacagtgggttattaaaatctcccactattattgtgtgagagtctaagtctctttgtaggtctctaagaacttgctttatgttctgggtgctcccgtattgggtacatatatatttaggatagttagctcttctcgttgctttgatccctttaccattatgtaacacccttctttgtctgttttgatctttgttggtttaaagtctgttttatcagagactaggattgcagcccctggttttttttgctttccatttgcttggtaaatgtttctccatccctttattttgaacctatgtatgtctttaatttgtttttaaaattattatatccatcctacttagtataaattggtttcttgttgtggttttgatttgcatttccctgatatgactaatgatcttgagcattttttcatgtgcttattggccattggtatatattcttttgagaagtgtatatctaagtcttttccccatttaaaaaatagggttgtctttttgttgtttaattgtaagaagtctttatgtattctggttaccagaccctcatgagatacaggatttgaaaatcgttttctctcattgtgtttgctgtgttttcactttcttgatggtgccctttgacatgcaaaagttttgacttttattaaaaatggggctgggcatggtggctcacacttgtcatcccagtgctttgggaggctgaggtggaggatttcttgaggccaggagtttcagaccatcctgggcaacataactggaccccatctctacaaaaaattaaagaaaaaatttagctaagagtatagttgtgtgctgcacttcctcaactaagaacataggtgtgtgccacaggtactcaagatgctgaggcgggaggattgctttagcccaagagttttgagacctcagtgagtcaaggtcacgccactgtgctcaagcctgtgtgacagagcaagaggctaactctaaggaaaaaaaatggggtaaacttatactttccttatttaaagttttaactccttaaaaccctgttgaattacagatacatctattatataacttaagagttgatgctataggctgggcacagtggctcacgcctgtaatcccagcactttgggaggccgagatgggtggatcacgaggtcaggagatagagaccatcctggctaacacggtgaaacctcgtctctgctaaaaatacaaaaaaattagccgggcgtggtggcgggcgcctgtagtcccagctacttgggaggctgaggccggagaatggtgtgaacccgggaggcagagcttgcagtgagccaagatcacgccactgcactccagcctgggtgacagagcaagactccgtcttttaaaaaaaaaaaaaaaaaaaaagagttgatgctataaaacttagttaatgaaatatttccctgggcgatggagctcttgcaagtcctgttgtattttttgttcatctttatgccagtcagttagacagttcttctatgtcaagcagaggatggaataataaaccaaaacactgcttagggctttcagagagtaagtgttcagtaaatatattcgataaattactgaattatttttttaaatgatggaaaggaaaatcttgccctctctttttctgggtgttggctagtataaatctttcttgaagtgataatctacatctatgttttgatttctaaggatttcccaaatataagctatatataagtgagaggaaataataacttaggtgcctaatgataatatgacaagataagtacaagggtcagctatttgttgtgaaatagcaatggatataatttaaatatgaatacctttttgctgtttaatcccccaaattttcttttgatttcttttaaaattcttttgtggtaggtaggtttattgtttcttaagaattaacttaagggtagtattttctgatacatttttaagtaacatgaagtttaacttctgtttaaacacatcatatagagtacattgaaagacctcagtattttcgaaatgtttagtaagtaatatcagcagtttccttaaatgatattttaatcctaggtaagtgtacaggtaggttgtgttactcatatttttatattcttagtgaaatagaattcttttttttttttttttttgagacagggtctgactgttgccttggctagagtgcagtggcatgatcttggctcactgcaacctctgcctcacaaggctcaagccatcctcccacctcagcctcctgagtagctgagaccacaggcatgagccacccatgctctattatgagccaccacacctggcctaaaattcgttttctttaatattttttctttctacacccacaactgtaacatttcccttagtttttactttgaatgtgcatactcttacacgacttacagtatggctatattttcagtttgctagagctttacaattaatttaaaacatgaaaggctaattaagggaattctttaaattttgttttaatagtgaaagcaagttgaatacattggtgcagaagcttcatgacttccttgcacactcatcagaagaatctgaagaaacaagttctcctccacgacttgcaatgaatcaaaacacaggtaaattgaaaaagaatgtgctataccttctagtcttttttctattttttttttacacttatggaggtaaccatttattttattcagagagcagcttttaaaagagatttcagtttgtggaaaatgacagattagcaagctttatagaagcccctattatgtatcttagctatatctgatacaggagattttaattttggtaagtatgactatagaaagcttagaaaaggaagcatttatggttttatatgtaatggaaatgtgttatagaatggctagtgaatgttgactgtgaaaaaatagtattagaagaggcaggagtagtataggaatgttttgtcctagcaatcattcatgtattaggagttaaatttttatttttatttttgtgatggagtctcgctctgtcacccagtctggagttcaatggcatgatcttggctcactgcaacttccgcctcttgggctcaagctattctgctgcctcagcctcctgagtagctgggatcacaggcgtctgccaccatgtttggctaattttggtatttttagtagagactgggtttcaccctgttggccaagctggtctggaactcaagtgatctgccctcgttggcctcccgaagtgctaggataacaggcatgagccatcacacccaacataagagttaaatttttatgttgtttgataatatccctgagtagatttggtgtatttattttttaaaataaaaccacttaacacctcctctctacctccctgtctctctcttttaaaaagatatatatatatatatatatatatatttttttttttttttttttttttaaagagacgaggtcttgctttgtcacccagactggagtgtagtggtgtaatcatagctcactgcagcctcagacttcttgggcttaagcaatcttctcacctcaccctcccggtagctgggattacaggtgtgtgccaccatgcctggttaatttcaaaaaaaaaaaaaaaaaaaaaaaaaaaaaaaaaaatttttagagacatggtcttgctatgttgtccagactggtcttggacttcctggcctcaaatgattctcctgcctcagcctcctgagtagctgaaattataagcatgagccattgtacctggttcccttttttaaaaaacattttgtatcatgtgacagttagcattttcaggttttcaagggtaactacaatacacatgcacacagacacacacaatatgtacaaaaaaagtataagagagttatagtgaaaagttcaaccatatgtgtaattagagttctagaaggaataaagagacttggttaaaagtcctatttggagagatacgggctgagcattttttaaaaagtgatgaaaaacatcagactagagattcaagaagttttgtgaaccctgaacaggataaatataaagaaaactacagctaggcatgtcataaccaaactcctaaagaacataaaccgagagaaaaatatcttaagtagccagaggaaaaaaatacattattttcaaaggaataacagtaacactggcagctcacttaacaacagaaatgatagaaggcagatgacaatgaaattatttctttaaaatgtcaaagaaaagtgcagtcatgcatcacttaactatgggataggtttttttgagaaagcattgttgggtgattttgtcattgtgcaaacattatggagtgtccttacataggctactacacacctaggctatatgttatagcctgttgctcataggctacaaacctgtgcagcgtgttcttgtactgaatacggtaggtaatcggaacacaatggtaaatatttgtgtgtctaaacacatggaaacatagaaaaggtacagtaaaaatacagtattataatcttatgggaccaccgatgtatatgtggtcagtcattgagtgaaatgtctttatgcagcatgtgattgtaattgccagcatagaactgtatattcagtgaaaacatccttcataaatgaagggtggaataaggccatatctgggcaaacaaaaagtgagaacttgatgtcaacagacctacactggagtgaataactacactagaggaaattacaagttttctgaaatgagaaagaaaataatttgaaatggcaacaccaaaatacaggaagtaatgaataagaatgggaaagctaaataggtaggtaaactaaataacataaagttatttaagccacagtccctattcttatttcatcaattaccccagtagtgttcacagataagtttttcccccttaaattcaggatccagttcaagatttagtagtcctgtttctttggttttttaaaaatctgaagcagtttgtctgccttttgggactatgactttttttgaaatgtacaggtgtgttactttgtgaaatggccctcaggattatctgtttagttatggttagattcaggttatacatttttggcaggaatactacataaagtggtgttctgttctccatgcatcctgttacatggcacatgatgtgatttgcccctttactggtgatgttaacttaggttgtttggttatggttgtgtttgctaggtaaacccagtctaaagttatgatttattccattgtaactaataactaatttaatggggggcactttgagattactaaggtattctttttattatcaaaacttaatatgttttcttttgcaaatgaccacaaagtttgcagcttaaaacaacccaaatttgttattttacagttctgtaggttcggagtccggtgggccttgctggacccttctcgggctatcacaaggtcaaagtcaagatgttagtaggactaggttcctttctggagactgtagaaaaatccattcctaagctcattcaggttgttggcagaattcagttctttatgataatcggttagaggtccttctttctcactcactattggccaagaccccctcctagttcttttcaggtgtcttcatttcttctcacgtgatgccctccatcttcaaatccagcaacagcacatcaagtctctctcaagctttgaagctctctgacctagctttttgcttgctaattctgctgccacctgctaccagctggagacatttttctgtttttaaggattcatgtgattagattaggtccctctccctctcatctcctcctgattatctcttgagtttaagatcaactgtgccatattacataacacagttatgggagtgatatgtcatcacattgataatttctggggatttgcggtgtagaatcttgtgggccattcctagaaggtctgtttatcacagcatacatttgtgattcttagctgaataatttattcctatgatgggttcaaaatggtgatgttctaacttgtctttccttctatgtttattagttgatattttattgtaagggaggggttcatgttctaacctattcaattatttgtatcagtatatacttacaattttttccatgaatattctctgtcattatttattttgatcctgaaattgtatcagttttggctagtaggagcctcacctggatggctcctgctgacctttttacaaatccgcatcatttcttgaacactttctttctgtcccttcaaagtattcaaggcttgctttccattctctgttccccagccctacaatcagttattttttgcaagagttctgattccttttagtgggatatagtgtttagaaatcaagatcagggtgtgtgatgtgctcattgccaccaagatgtctttgtttccaagctctttcacagagaaagccaataatatgttttatattttcatgagttgatactgatacttttaattcaattccagtcttctttctagacttccccttttcatgtttttaacttctttctccaacagaaagaaacctggttcctattatccccaatttatttatttttatttatttattctttttgagatggagtctcactctgttgccaggctggagttcagtggcgtgatctcagatcactgcaacctttgcctcccaggttcaagcgattctcctgcctcagcctaccaagtagctgagactacagtcatgcgccaccatacccagctaatttttgtatttttagtagagacagggtttcaccatgttggccaggatggtcttgatctcttgacttcatgatccgcctgcctcgacctcccaaagtgctgggattacaagtgtgagccactgtgcccagcctatccccagtttatttatttatttttatttttatttttttgagatggagtctcgctgtgtcacacaggctggagtgcagtggcgccatctcagctcactgcaacctccgcctcctgggttcaagcgattctcctgtctcagcctcttaagtagctggaactacaggtgcacaccaccgtgcccagctaatttttgtatttttagtggagacggcgttttgccatctctggatggcaggctggtctggaactcctgaccttaggtgatccacctgcctcagcctcccaaagtgctctgattacaggcgtgagccaccaagcccggcctttccccagtttatttgtattcatttttctagtcctcattgtacccacagtttcagagttgttaaccatatcatcgcattaaagaaacgtaactatagttcagtatttctttaaagttctttttgtctttagaatgatgttacgttgtcggagtcctgtgttcactagttgaggaactccttcagtagtggtatctccagttggacaaacagatgtcactcacaaataccaattgtaaattctgggcagcatactgaaggctagatatcaacaaagtagataaactggaggggagtcaacacatggaagaagaagtggcaatggctgaattccccattgttaatcctttttgcttcagccaaggatcctcttagctccatctgtggcctttaagacttggataaaaatctacagtcttattggatgtgaaatcaaggaaaaaatttagggagaccacagcagctgtaacatgagtagagagatcccatctagaaaagagccacagaatgggaaaaccagattgcacgaaaactctcccaatagctctggtcctgttgcctaagtgcactccagattccaaccagcctggttaggactaaaagaacagaacaaaagctttgagttgtttggtactacagggtggaaagggtttggagtttcatttcaagtaagttaactatctgtttgtttggttggttggttttttttgagacaggttctttttctgttgcctaggctggtgtgcagtgatgccatctcagctcacagcaacttccacctcccgggttcaagtgattcttgtgcctcagctttctgaatagctgggattacaggcacctgccaccacgcccagctaatttttgtatttttagtagaggcagtgtttcaccatgttggccaggctggtcttgaactcatgacttcaggttatctgcctgcctcggcttcccaaagtgctgggattacaggcgtgagccaccacacccagcccagttgactttttatgttggccttgtatcctgtgaacttgcttaacgtacttattagttctaaatagtatttttccccctcttgtagattctttgggattttctacttagacagttatatcacctgcaaatagggatagttttattttttcctttccatctgtataccttttaatttcttttcttgcttcattatattagctaggattttctgtattttccagtattacattgaagaatgatgatgatagcagacatcctcttagtgttaccaattttagtgggaaaacattcagtctttcacagtgaaggatgtttgctttataggtttcttgtaaatgccctttatcaagttgaggaagttcccctctattcctagtttgctgagaatttttttaagcttaaatttctatttgatttctatttgtaattataaattcacatgcagttgtaataactaatatagagagagctcttatgcactttggcagtttccctcaatggtaacatataaaactagaatacaatatcacaaccaggaaattgacattgataaaatctattaatcaagattttgtcagttttactttgtgtgtgtgtgtgtgtgtgtgtgtgtgtgttaaagttctatacattttttttttacctgggttgattcatgcatctaccaccacagttgagatacagaatagttcatcaacacaggattcctcatcttggcattttataatcacacccacttccctccgcctacctctgcctatgcttaacacctggcaaccactaatctgtcttccattttgaaaattttgtcatttcaaatatgttaaataaatggagtttatagtaaataatcttttggggttggagtgttttcacttggcataattctgtggagattcattgaggttgttgtatgtatcaacaatcctttccttttaattgcagggtaatattccatggtatggatgtacagattgagtatccttaaccccagaatcagaaatctgaaatgttccaagatcggaaacttttgagtgctgacatgacactcaaaggaaatgctcattggaacatttgggattttcagattagggatgctgaatccctaatgtgaataaaccagaatagtgcaaatatgctagaatctgaaaaaatccaaaatttgaaacacttctggtcccatgcattttggataaggaatacgcaacctgtaccacagttgtatttgtattgttttttttttttttttattgaaatggagtcttgttttgtcacccaggctagagggcagtggcatgatcttgactcactgcaacctccgcctcccaggttcaagtgattctcctgcttcagcctccggagtagctgggattacaggcaagcgccaccacacccggctaatttttgtatttatagtagagacgaggtttcaccatgttggccaggctggtctcgaactcctgacctcaggtgatccacccacctcggcctcccaaagtgctgggattacaggtgtgagccaccgcgcctggcctgtaccacagtttgtttaaccatttatttgttaaagcaaatctgggccgattcctgatttcagttgttacaattaaagctggtggtgaatatttatatatacgtttttatatgaatttatgttttcatttctttgcaataaatgccaggagtgcattttgcagttcatatgatggttacacatttatttttattaaattaattaaactacatttacattttattttattttgggtagagacagagcctcactgtgttggccaggcttgttatgaactcctgacctcaggtaatcctcctgccttgtcctctggaggcccttggattacagacatgaatcactgcacctggtttgcattttttttttttttttactccattggactctatcagtgcttttatttatttattggtatttatttatttatttattttaacttttaggttcagtggtacctgtgaaggtttgtcacataggtaaggtagcatcactggggtttattgtttagattatttcatcacttaggtattaagcccagtacctaatagttatcttgtctactcttacatgttcatttttttaaaagaaactcctgaactgttatccagagtggttgtactgttttatattcccacagcaatgtatgagtgatccagtttctccacatccttgccaacactgggtgttaatactatttttaaattttagccatttgatatttatggtatctcattgtggttttaatttgcatttacttaatgagtaataaattctttttaaatagaaacaggatattgctctgttgcccaggctggagtgcagtggtgcaattatagctcactgcagcctcaaactcctaggctcaagtgatcctcctgcctcagcctctcgagtagctgagactgcctcagcctgtcgagtagccaagactacaggcacatgccaccatacccagctaattttttaatgttctgtagagacggggtctggctctgttgcccatgctggtctcagactcctggcctcaagcgatcttcccaccatggcctcccaaagtatttagattacaggcatcagccactgcatctggctggtaataaaacattaaacatctttattgaaatataatttacatgccatacaattaacccatttaaagtataaaattcagtggtttttagtatattgaatatttacacatatgtacaaccatcaccaccatcaattttaaaatatttttatcacctcaaaaagaaactccataccctttagctatcaccccctagctctaagaaatcactaatctagtttcttgttttgagttttttatttttatttttatttttattttttttttgagacagagtctcgttctgttgcccaggctggagtgcagtggctattttggcttactgcaacctctgcctcccaggttcaaatgatttttgtgccttggcctcccaagtagctgggattataggcgtgcgccaccacacctggctaatttttgtattttttagtagagacagggttttgccatgttggccgggctggtctcaaactcctggcctcaagtcatctgcccacctcaggttcccaaagtcctgggattgcaggcgtgagccactgcgcctggcctatttccctattttggactttcatatgaatggcatcatataatacgtgtttttgtggctgatttctttcatttagcgtaatgtattcaagatatctgttgtaacatgtcttagtactccattcctttttatggccacataatattccattatatgtgtataccatatttgtttatccatttatccattgatggacatttgtcttgttcccatgttttggctgttaggaataatgcggctgtaaatattggtgtacagttttttgtgtgtagccatatatttttgtttatcttgtgtatatacctaggaatctaattgctggatttatatggtaactatgttaaattgtttgaggaaatgtcaaactgttttccaaagtagagatactattttacttttccaccaggagtatataaagattgtgagttcttcacgtccatgccaaccattgttaataacagactttttgattctagccattctagtgcatgtgaagtagtatctcattgtgattttagttttcaactgcctgaagggtaatgatgttgaacatcatttcatgtgcttatttgtagtttgtatatattccttggagaaacttctattcaaaccctctgtccagtctttttctttttgacagggtcctgctctgtttcccaggctggagtgcagtggcatgatctcagctcacagcaccctcaacctccctggctcaaatgatcttcccacctcagcctcccgagtagctaagactatgggtgtgtgccacagtgcccagctaatttttgtttattttttatagagatggggtcttaatttgttgaccaagctggtcttgaactcttgtgcttaagcaattcacccgcctcggcctcccaaagtgctgggattacaggcgtgagccaccgtgcccagcccctttgcccatttttaaaatgggtatttatgctttcattgttgatttgtaagaattctttatatattctaaattttttattgtaaaatatgcataacataaaaattgccattttaactaattttaaatgtacagtcctgtaacgttaagtaaaattgttgtgcattcaccaccaccatccatgtctagtactttttcatcttccccaagtgaaactctgtacccatcacatactaactccccaatcttccctctccttagccttgcaaacaccattctacattctcttcctaggaatttgactactctaggaacttcatatacgtataatcctacaatatttgtccttctgacatattttacttagcacaatgtgttgaaggttatccatgttgtagtatatctcaaaatttcatttcttttgaagtctgaataccattccattgtatgtatataccacattttgtttatctattcatatttcaatggacacttggataagatatataatttggaaatattttcccctattctttgagttgtctttatttatttttagagacagggttttgctctgttgctcaggctggggtgcagtggcaagatcatagttcactgcagccttgaactcctgggtacaagcaatccttccatctcagcctcccaagtagatgagactatagttgtgtgccaccatgtctggctagtatttttttttttttattttttagagatgaggtcttaccatgtagcccaggctgagcttgaactcctggcctcaggcgatccaccttggcctcacaagtagctgggattacaggcgtgagacactgcacccagttgggttgtctttaattgaagcacaagttactaattttgatgaacttttatttatctgtttttccttttgttgctcattcttttggtgtctttaagaatccattaccaaattgaaggtaatgaagatttacccccatgttttcttctaaaagttttatagatttagttcttaaatttaggtctttgatctactttgagttaatgttttgtatatgttgcgaagtaggggtccagcttcattttttgtaggtttctaaccagttgtctcagcaccatttattgaaagacaattctttcttcattgaatggtcttgccacccttgtcagaaatcagtgggactgttgggcatggtggctcatgtctgtaatcccagcactttgggaggccgaggtgggaggggtactcgggcccaggagttccagaccagcctggacaacacagtgagactccatctctattaaaaaaaaaaaaagccaggcgtagtggtgtgtgcctgtagtcccagctacttaggaggctgaggcagaaggatcacttgagcccaggagactgaggctgcagtgagccatgattgtaccactgcaccctagcctgggtgacagagtgagatcctgtctccaaaaaaaaaattaaaaaaaaaatcagctggtcatagatatatgggtttatttctggactcttaattctgtttgtccttttaccagtactccacggtcttgattgcattgttttacagttttgtgcaaagttgcaccaaagttgttgtgtagttttgcaaaactggcaatcaagtctgtgcagtactggcaaaattaggaagtgtgagtcttcatacttttcatttttcaaaattatctgcctattctgaatgttttcaattccctatgaattttaactctttgttttttcttggtagagatgaggtttcactatgtttctgaggctgttcttaaacttctgtcctcaagtgatccttccaccttggcctcccaaagtgctgggattataggtctgagccaccatgcctggtccatatgaattttggaatgagcttgtcaatttttacaaagaagtcagctgggattctgacagagattgcagcgtgtctgtagattagtttgtggagtattggtgatggcagcggtgggccgtctggagtggctgctgccatcacactggctgcagcagggagacgtggccagggctgcacggtctatagagttggtgggagccaggggcaagcaggagccctgccccttccaagttggagctccctgggtcctgctgcagctgcctaagcatggctgtagacctgggcatccctgtgctcttgagtcttgggagcaggctggagccccaccctcccaggtgcaactgcagctggccaaaccgtggctgcagtcccaggcctctcattccatggagcaggcaggagacccaccctcccgggtgcagctgcagtctcccaaactgcggctacagaaccttgccttctgctccacgagcaggcaggagccctgggtgcagcaggagccccgggtgcagccgcagccacccaaaccatggctgcagatctggtcctcctgctttatggagcaggctggagtcccaccctcctgggcacagctatagctgcccaaattgtgggtatagacctgggcctcctgctttatggggcaggcaggagccctgccccactgggtgcagctgcagccacccaaatcatgggggggctgcagacccaggtgtctctgcactcttggggcctgggaaggccccccttgctctcataggcttgggagtgcctgctcctgctgcctggcttcaccctgctattggcacctgctctgatcttgtggcaaagttggggccgagcctgggtgctgtcgtagcctggccaggtatccacatgcttggggaactgctgacatgccagccttctgctgccttgaccccctctggactttgggtactgacaaacatagggaagctgaggcagggctgagggcagttcagcactggcctgcaggtgcccccttgcatctacagcctgggcaccatgaatggcagcaggaggtagacaggttcctcagtggaaggtggcaggtccctggtgaggacccaccttcaggccagggaaagcctgaaggctggaggttgggctgccagttgcatggatcagagtgggaacttgtggtgccttttctgggcctgcctgtggaccaattggcatgcacatcctcccctctgaggcccataaaaaccccaggctcagccagagctgaacagatgtcaggatgaccagctgcagagaggagcaacccactctagggcctcctctctgctgtgagctgcagaggtgacaagatgaccttcctgcaaagaggtgccacacattctagggcctcctctttgctgagagctgcagagacgatgggtcgactttcctgcagagaggtactactcatactagggcctcctctctactgagagctgcagagacgaaggagagatgatggggagatgatgggatgacctgcctgcaaagagaagccacccactctcaggcctcctctctcctgagagctgtgcagatgacgggataatcagctgctgagaggagctaccctctctgctgatagctgaacacttgtagtaacgacttgcctagcagagaagaaccaccctctctgctaggagctgaacacttgtagtaatgacttgcctagcagagaagaaccaccctctctgctaggagctgaacacttgttgggataccttgactgtggaaaggagctgccccctttgggtttcctctgagctgttctattgctcaataaagcccctctttatcttgcttactctccacttttctatgcacctcattcttcttgggtgcaggacaagaacttgggacctgccagatgaggctaaaatagctgtaacacaaacagggctgagacatgccccttgctcaccttgttgcaggtgaagagaaggaaagaagagctgcagccctctggggagcccagacctgggagctccccaagccagggctgtgactccctctttggggccctgcctgcggttcctggtgtctccaaacttctgggtgccaccgtgttccctggtgccagctgtggatgctgcttgtggtgttcatggtccagctgcagcctcacagagaaagagctgatgcccatgctggcacctggagctgcgtgccctgctgcagctgccaggatgtctgattgcgcagtgaccggaccccacacttgctcacataccccttgctgcttcatccagtcttccttggctatcataggacacaggccagtagcatgagccgagtgtagccggccaggccaaataggcgggacaagcccagcaggcctgagcaaaactctggcacaggtgccaccagccgcagatgtttctggccagaaaagtgacaccccaaagattctgtaacactggcatcataagaatgataaatcttatggcttggcctggtggctgaaggaattgtgtactttaaatgggtaaattatatggtgtgtaaattgtatctcaaggatgtttaatgttttatcactggcgaggtgcggtgacttatgcctgtaattccagcactttgggaggctgaggtgggaggattacttgaggacaggaatttgagaccagcctgggaaacatagccagaacccatctctacaaaacatttaaaaatcagccaggcatggtggcatgtgcctgtagtgccagctaatcaggatactgaggcaggaggatcacttgagcccaggaatttgaggcggcagtgagctataattgcaccactgcactccagcctgggcaatagggtgagactctgtccctagtaaaaaaaaaatgttatcttctaattcatgaacatgaagtgtttttccattgatttaggtctttaatttctttcaatagcgttttataattttcagagtatgttttgtacttctttttttttcaaattatttccttctaattctgttataaatggaattcttttcttaatttcattttgagattattcattgcaagtgtatagacataacattgatttttgtttattgtccttgtacccatcaatcttcctgaactaattttattcccatagttcttttattattattattattattttttgagatagtcttgctctgttccccaggctggggtgcagtggtgcgatcttggctcactgcaacctctgcctcccaggttcaagcaattctcttgcctcggcttaccgagtagctgggattacaggcacctgccaccacgcccagctaatttttgtatttttagtagagacagggttttgccatgttggccaggctggtcttgaactcctgacctctggtgatccgcctgcctcggcctcccaaagttttgggattacaggcgtgagccactgcgcccagcctattccaataattctttagtggattccttaggatcttctatgtatgagataatgtcacattctaataaggatagttttattttttatttttttttgagacagagtctcgctttgttgaccagggtggagtgcagtggcatgacctcagctcactgcaacctctaccccctgggttcaagtgactttcctacctcagcatccctaggagctgggattacagggatgcgccaccacacccggcaaatttctgtacttttagtagagatggggttttgccatgttggctaggctggtcttgaactccggacctcgggtgatccacccgcctcagcctcccaaagtgctgggattacaggcatcagccaccgcgcctggccctctaataggaatagtttcataccttcattttaaatactgatgactttcaatttttttttttaacatgcatgctctgagtagaatccgtagtgcaaagttgaatagaaatggtgagagcagatttccttgccttgttcctgatcttaagggtttcggaaagcattcagtctgtcgccattaagtatgatattacctacctgtgggtttttgtagattttaaaatttcctttcttccttaatttattagaaaaaagatttttttttttttttgagacggagttttgctcttgttgcccaggctggagtgcaatggcacaatctcggctcactgcagcctccacctcctggattcaagtgattttcctgtctcagcctcccgagtagctaggattgcaggtgcatgccaccacgcccagctaatttttgtatttttagtagcaacagggtttcatcatattggtcaagctggtctcgaactcctgacctcaggtgatctgcccacctcagcctcccaaagtgctaggattacaggtgtgagccaccacacctggccagaaaaaaaagatatttttaaagagctgttttaggttcatagcaaaattgagcaaaaagtacagtgagttcccatatgtccctgcttccacacatgcacagcatctcccactatcagcattccgtaagagagttgtacatttgttatataacgttgatgaacctacattgacatgtcattattaccccaaatgcatagtttatgttaaggttcactcttggtgttatacattttaaagatttttgacaaatatataatgacctgcattcaccattgtggtatcatacagaatagtttcactgccctaaaaagattcctgtgctgtgcctgtttcttcatccctttctcccctgtgagcactggcagccactgatctttttactttctccatagttttgcctttttcagattgtcatagttgtaatcatatgtatgtaacctttccagactggcttctttcacatagtaatctgcatttgtttcctccatgtctctttgtagcttgatagctaatttatttctagtgctgaataatattccattgtctggatgtactacagtttgtttatccattcatcttctaaaggacatcttggttgcttctaagttttggcagttatgaataaagctgcttataaagatatttatataagtaaatgaagatgtttacataaaataaagacatttataaatatctccatgcaggttattttgtggatgtatgttttcagcttctttggataaataccaaggagtgtgattgctgctttatatatggtatgcttagttttgtaagaaattgctgaactgttttcctgagtggctgtatcattttgcattcccaccagcaataaatgatagtttcttttgctccatatgcttctcagcagttttgatgtagtcagtgttctggattttggctattctaataggcatgcaggggtatattgttttaatttgcaattccctaatgacatgttgagcattttttcatgtgcttatttgcgtctgtatatcttttttggtgaggtgtctgttcacatatttctttttttttccttgctttaaaatcatgttgtttgttttattgttgagttttaagcattctttgtatagtttggataattgtcttttatcagatgtgtactttgtgaagattttctcccagtctctagcctgtcttctgatttgaagttttctaatatttttgtggacttttgcatctatattcataagtgatacttgcctgtagttttctctatttgtgatatattttttatatcagggcaatactgttttcataaaatgagttgggaaatgttgcctccttttctgttttttagaagagtttgtgaaggattggtattagtccttttttaaatgtttgttataattaagtggtgagaacatttgggccttttctttatgggtagctttttttattgctaatttaatctcatcaattgttacaggtctgttcacacctgtttcttcttgagtcagttttagtagtttgtgttttggaatttgttcatttcatgtaagttatttagttttttggcacacagttgttcatagtattcctttataatccgtttatttcagtaagattagtagtaatgtcctctttttcatttctgattctagtaacttgagtcttgtttcttttttttcttggtcagtctaccctaaagtttgttcatcttttcttcccccacaggtaagttgttacacaatccctagcagattccaactttcatggccaaggtcctctttgatcatctttttaaaaaattagtttttggccaggtgcctgtggctcacgcctgcaatctcagcactttgggaggccaaggtgggcagaccacttgaacccaggagttagagaccaggctgggcaacatgacaaaaccccatctccacaaaaaattagccaggtgtggtggtgcgcgcctgtagtcccagctacctgggaggcttagaggggaggatcacctgaacccgggaggttgaggctaaagtgaaccatgatagcacctctgcactccagtatggacaatggagtgagaccctatctctaaaaaaaaaggaggaaaaggaaaagaactactctttggttttattgattttttttttctattgcttttctatttcctatttcattagtttcatgaatttctgccataatctttattatttccttctccttgattttggtttagtttgctcttattttcccagtattttatggtaaaatgaaatatactttattggtagtatgttttttatttttagtgtaatagtttaaattttcttctgctgggaaatgtcttgcaatatttataaactacaacaggaaatgtttttataccaaagtaatctttacagagatttcatgctttataaggaggggttagtatgcaaaaggagagtgattctagtgaaagaacacttctaggaatattttaatgtgagtagtatgttaacaatactgccagacttcatagtgtgagaatgggtttgtggagttataggtattgatgttctgtttgataatgcatcgaagagataaataatgttctttatttcttcttttttagataaaatcagtggttctggaagtaactctgatatgatggaaaacagcaaggaagaggtaaggataattatttagagatatttgttagttacgattaaccaagtagagcatatgtctttagattgcttctggacacatgtatgtgtcgaaggctactgatacccagttgtcattatacttcagtttcgttgttttccagtttgagaacaggtgttcattgtttctgttattgttgtggttcacttcagtggtttacctaaagtcagacaactgaagacttccaacagatagatattaaactgtctttatattgccccaaaggtgtttgaggtggatgttaagggcatgaactccatggttgtgaaatctctcaaaacttggtatctagagtctgctaagcattattatagcaactcataacaaggtcctttgcctgatacacaggtccacaactgtggttttgggaattttttgacctactgtaaaaaaaaactgaatccagtaaaatatattgattatactggcaaaatgagggtaagtttagtatctcaaagcaagttgtagaagttacttcatgccatatgttagcttagagaagaatgaaacatatttagatccttgaaactccctacttctcttgagatctgattacttctgcatctttgttttgtctttgttgactggggccatgatcattttgcagcagtgtattccccgcagcatgccacagcaaccatgtaaaaaacgagaaatttaatcttcagccaaggaaacctggcagtaaatgagaattagttttaatttttatttttttgcatctgtgttccttatgtggtagagaattagtttttgaagttccttttagaaaaatattctaggcacataaatagcatctcattatatcactgtattgaagttgctatagggaaatagctaattgtagggatgccgtttcgagaattttattcacttttatatttatgtctcacatctagggaactagctcttcagaaaaatccaagtcttca

SEQ ID NO: 15473 - DNA, 101211 bp, Homo sapiens
aacaaaatggcggcggcagcggtgtcgctttgtttccgcggctcctgcggcggtggcagtggtagcggcctttgagctgtggggaggttccagcagcagctacagtgacgactaagactccagtgcatttctatcgtaaccgggcgcgggggagcgcagatcggcgcccagcaatcacagaagccgacaaggcgttcaagcgaaaacatgaccgctgagcccatgaggtaaaacgcaaccccgtctcatgggccccagcggtctgggcccaggcaccgtctgagtcgggtgtttgggaaggcgttcgcttggtgggttaggcctgtgtgttgcttagccgaaagaggcatcgttttctctttaggtgagaagggtttcggggtatcggcgcaaggctccgacgggggtgggggtggggatggggtggggggaggtggggggggcgcggcctagggtatggggcgcttcttgcaatctcccctaaacggtgacgcttggtcgggctcctctgtttattctttggtgcctgtgggattgagacctcgaagtcggaggcggtctttggtatcccggtcatttttgctaatctttgggcctagaaactgcgtggggaagaagcggggggagggtgagaagagggggaggggtgggcgggcgcgaggatgtgagatcccaggacgacttagaggcgtttaggttgctggagatgggaagcacccgggccctgcgggattttttttctgcagccccaggagacaagcctttttttgattgggttgtggtgcagttccaggtatttaggtatcttttctactccatatcctgaaggatatccttgggtttatttctaggcgaggggggacttaacacagggttttgcttccagaggaccctagtatactactttttgtgatgtccagccttaatgggacctcaagtgtttccccactttctgggcaaatttcgaggagtaattaggccctatctttatttacttatttattccatgaaggatgaagggcaggttaacgtgggctgatgcgaagtaagatttattgcaagggaaaatgcctggcaggcctcctcttaaccaatcaagcacgtttattaggttgaagctgtttttctgtgtgcttctgatttgcctcttgacgggtctgaaaatttgggtagtcaatatgaaatgtatacacttttacccaggtggctggctggcgtttcagtttgacatttgaattttcatcccacaatgtgaattaagtaatttttttactcggagatgcatccttggcgtccagtggcaaaataaaattacaaggagcatgggtcagaattgcatttcaagttggcgaaatgtgcctttgagtaactcttagattggcatatgtttttagagcaatttagctagaatgtagaattgggcaatgagcctatgatacgtatgtctgtatttctgcatgaacaagcagtagattatattttctttaccttggggaaagatatgcttcagttcttagattgtagatctctagttgtgtacacgattgtggccttggtttctgaatttgtcagtaggctcaaatacaacaaatctttatctgtggggtattaggcacgtaagtggtacccagtataacttgttggcctgtaattaccaggcactcatgttcatatgcatggatggtgtaccttacagttaaattatgacctctagattttactaagtttcacaaagtctacatttgaaactatagtttgaagtcggatcttctcagtttctttagaatgaacaaattacgtatatagaatttctgaatagaataattaattttacacaagggtcagtttttcttactagtcttggatttttgtagatcttgatgataagagtaataatcataactaagttgagtgcttattgtcgttctttataatcttgatgaattctcaaacctgtgaggtaagtacttggttttgcccattttaccgatgaggaggaaagtgagacatagatcaagaacttgaccgaagttatacagcttgtaattggtggagctggaattgaaccccatcttgacttcacagcttatgttcttaaccacaaggcattaatgcccccttcagctgccaggtctaacctgattatgaccatttaaatttagcccaagtgttacaatgaaagaagttcatattacctactctgatttgttgcaggtctatgattttgtagctgtttataatgttacattttttgtgtccaggtgtactatgtagtgagataactgaaatatttaatgctaggagagtcttaagctacatgaaaaacctctagtaaagaactgcatatatgcatgtagggaattaattaaaaagtgtgacactccctgatgatttactatgaaagagctccaagtaggtgttcagaactgtctcaggctgaagtgtcatcgatctcctaaaccataatcatggttaaaggagaatctgacaggtaatgcttgagttgaacccacagtaccaaatccctcttgagtcttttctaatgtgaggcagaaataatataagcattattgttaatattattttacacagtagttccagattttctctttatcaaatattttgtcaagcacttaaaaagcaggaacaaagactagttctaatttttacttgtgtttataaaaaaaagtaatattctaggattctgtggtggaaaaatggccagaagacaagaggaaggaaaataaaccgatgacctggctaaaacatacactgactaatcagtggctcagtctttaaaggttttgttgtttttaaaggatttttttggttgtttgtgttgtttgaaataagattgacttgcttctggcattataaaagataaggtcttttataatcaccaagctctcaatgtagtacttgggtacctgggtgtcactgctgattattttttaatttttaaatttatttttttgagacagagtctcactttgttgcccaggctggagtgaaggggcgtgatcttggcttactgccgcctccgcctcccaggttcaagtgattctcatgcctcagcctcccaagtaactgggattaacaggtgtgtgccaccacgcctggctaatttttgtatttttagtagagagggagtttcaccatattggctaggctggtcctgaactcctggactcaagtgatctacctgccttggcctcccaaagtgctgggattacaggtgtgatccaccgcgcctggctctctgctggttattcagggcccaagggctcttcagttatcaggtgatgtatgctgctaggactgggaccttcccttcagggcagcagattcccttctggcccaggatgtgtctagaattgtcatcctggagctagggcctggaatggaggcttcatgactgatgaactttaatttgttttctttatttttattttttttgagatggagtctcactctgttgcccaggctggagtgcaatggcaccatcttggctcactacaacctttgcctcctgggttcaagcgattctcctgcctcagcctcccaagtagctgggattacaggcaagtgccaccacacctggccaatttttgtatttttagtagagacggggtttcaccatgttggccagccaggctggtctcaaactcctgacctcaggtgatctgcccgcctctgcctcccaaagtgctgggattacaggtgtgagccactgcgcttggccttaatttatttgcatataaagatttcagtattgggagatttggtgaaatttgtcattctaatccttatggcaattgattacttgaaaagctgacagctatattaccttgttattgatcttaaatataaaaaggcagaagttgtctaaattgagagattttgaatgtcttagaaagtatctgttaaggtggtagtttacaagcagttacattgtaacctaattgttgaaaaatgttatctgtgaaatacttgcatttccactatgaaaagcatgaaaccaggcccttggagggggaggagatgcaaattttataaaggtttttaaaaagcatttaaatatcaatggcttggttatgtaatgggttggggtgaaaagaaagacatttgtgaccttaatttttatcaggcccagttttattattggccacccttggcatagttggccttgagctttcagttatgtattgtatttctagagataagataaatgtagtacttaaaataatatttaagtattgatgtaggtgtgtgaaataattgtttcataagtaattgtatgtgtctttttcacttttggggtctgaataaacttatgggttgggtaataggatacgggcaattcttgaatttacatgaagtgctttcccccagaccgtgaatgttcttttggatatcagaaactatttaaatagttgaagccagtgaaaactgatgcatagatcttcctttagaaatgttgaatataacagggcagtgaaaggagggtctaagcagtctgtctctaattttatcctaatgcttgtcttatgatcagcttggaagctgacatgcaagatgtttaacttctatttttccatctgtaaaatgggaataagctcaaatgggagtaaatatcaatatttatcaataatagatattgataaagtctaaaggtattctgaaggaggtaacatgtttgtaacaatggttcttaaaagagaaactaaagctctggggtcctagttttttttttttttttttttttttgagacagagtctcactatgttgcccaggctggagtacagtggcacgatctcaggtcactgcaaactccgccctccgggttcacgccattctcctgcctcagcctcccgagtagccgggactacaggcacctgccaccatgtgcggctaattgtttgtatttttagtacagacagggtttcaccgtgttggccaggatggtctcgatctcctgacctcgtgatttccacccgcttcggcctccaaagtgctaggattacaggtgtgagccaccgcgcccggctgttaatttttaagagtgaaaagaggtgctgcgactaaatggtttgagaactgcttgtatagaggaatgaacactgaactgtgagccaagccttggtttttcagttatagctctgttgcttgattgtatgactgtggacaaatcatttatctgttccaggcttctgctttgtcatttgcagaacgaacaagactagatggtctgtagcattaatttttttttgggacaaggtctcactgtcacccaagctgtagtgcagtgacactgaacatggctcactgtagccttgacctcctggctcaagcaatcctcctgcttcagcctcccatgtagctgggaccacaggtgtgtcatcatgccccgctaattttttgatttttttgtagaaacagtggtctcactttgttgcccagtctggtcttgaactcctggacttaagcgatcctcctgccttggcctcccaaagtgctgggattacaggtgtaaaccaccataccctgcctaaagttagtttttaaaaaattctgcttacaggccacgtgcagtggctcacgcctgtaatcccagcactttgggaggccgaggcaggtggatcatgaggtcaggagttcaagaccagcctggccaagatggtgaaaccccatctctactaaaaatacaaaaaaaaatcatctcggtgtggtggtgggcacctgtaatctcagctactagggaggctgagacagagaattgcttgaacccaggaggcggaggttgcagtgagctgagattgcgccactgcagcctgggcgacagggtgagagtctgtctcaaaaacaaaaacaaaaacaaataagcaaaaaattctgcttatatgagtgtttatcattttctcttatctgccttttgtgggttagggagaagggtagtggtgagataaagtttctttattcagtgtatttatatctttttgccttaaaacttacatggttaggttacaggtgttttgttgctgatacttgtcatagtatcatgtatacctggttgtataaacatttattggaaaggaaaaaacatttttgttggaaagtttggtaattattgtggcttaggatatgttctattttgaaagattgctatatccagtatatttctgcccttttatgattgaagatgtacgtctgaaaatacctatgttagttctagccggttgttctttttgcgctgggaagtctttgaattttgcactgtagctgctattttcagatcctgtctctgaaactttgtctctcagttttagcttgaagtagccatttcctgtatctgtagtccagcactcttgttaactgtcccatacaatatttgttaagaaattattgttctggcagtagtattcacatgtatatatcctgcactccatattttgggggaatgctttattagttgatcaaatacttaagtatcaatttggggccaggcatggcactgtgttagggttatgccaaaggtaataaaattcctgccatcttaaggcattcttagtcaagtgagggagattggtaagtaaatgagcaattagaaagcagtgctaaaatatggaaatatattgattgcgctagggatcagaaatgaaagaaagcctaatttgggggatgtctaggaaagttttgcaaaggagatgttaactgtattgagtcttgaatgagttagcagttaagggttgactgtgagagggcagtccagacagctattagtatggttaaagattagtcttattttccatatatcagaggaaataagacatgtacacgattagttttggtgcaagatataaagtgataaatgctgcatgaagtaaaagtaagttgttgtgtgagttcaaagtagaaagacatttctggtggggaccaaggaaagctttatagagagatagcatttgagccgggcgccgtggctcacacctgtaatcctagcactttgggaggctgaggcgggtggatcacgaggtcaggagatcgagaccatcctggctaacatggtgaaaacccgtctctactaaaaatacaaaaaaaaaaaaaaaaaaaaaaaaatccgggcatggtggcgggcgcctgtagtgccagctgctcgggaagttgaggcaggagaacttcgtgaacctgggaggcggagcttgcagtgggccgagatcgcgccactgcactctagtctgggcaacagagcgagactccgtttcaaaaaaaagaaaaaagagagatagcatttgaatctagtccttggaatataggtacagttttgacaaaggagactgtgggagaattccagatgtgaggagtagcagcttgagcaaaggaatgttgtgtatattagcattttctatttggaagaaggtcaacatcgaattttaaacttaatttctggacaaatactgtataactattgtgcctttttttttttttttgagacgtagtctcgctctgtcacccaggctggagtgcagtggcatgatcttggctcactgcaacctccgcttcccgggttcaagcgattctcctgcctcagcttcccgagtagcttggactacaggcgtgtgccaccatgcctagctaatttttgtatttttagtagagatgggatttcaccgtgttggccaggatggtcttgatctcctgacctcatgatccgcccgccttggcctcccaaagtgctgggattacaggcgtgagccaccgcgccctgcctattgtgcttttttttttttttttaagagacagggacttcctctgtcacccagcctggagtgcagtggggtgatcatagctcatagcttactgcatcctagaactcccgggctcaagtgatcctcccacctgagcctcctgagtagctgggaccacaggcatgtgccactatgcccagctactattgtgcattttgtatggtagcttttgtggcttgatgatcttgtaaaaggtacatgtgcctttgtgaatgggcctgataattttagttcagaattgtcaaaagtattatctacttttttttttttttttgagacagagtctcactctgtcacccgggctcagtggcaccatctcagcttactgcaacctccacctcctgggttcaagcgattcttctgcctcagcctccgagtagctgggactacaggtgtgagccaccatgcctggctagtttttgtatttttagtagagacggggtgtcaccatattggccaggctggtctcgaactcctagacctcgtgatctgcccacctcggcctcccaaagtgctgggattacaggcatgagccaccgcgcctggccagtattacctacttttaaataagattgtgtaggatttaatgcacagattttgaatcactgtgataaaaatgcatccttagttgtcttcattttgctcatttgaagtgctcagttgacttttgggtgggtaacatttgacttatagaatctaagataaaaaattatttctgagtaatactggatttgttattttgcttatttggattatattagttattttttggtttatttgatagcattccagatttagttttgctataatgcttgttttgaaaatgtggattttttccaaaagggttgatatttcagggaacaatttgaagcatacgacaaaatttgcatttgcttatgggggattttgtctgcagggtcagggatcagcatactgtggcctaccaaccagtggcctgttttttgtaaataaagttctttttttttgtttttgatctttgttttgttttgttttgttttgttgagacggagtcttgctctgtcgcccaggctggagtgcggtggtgtgatgtccgctcactgcaacctccgcctcttgggttcaagcgattctcatgcctcagcctcacgagtaggtgggatttcaggcatttgccaccacgcctggctgatttttgtattttttttttttttttttttttttttttttttagtagagacagggttttaccacattggcctggctggtcttgaactcctgacctcaggtgatccgcctgccttggcctcccaaagtgcagggattatagatgtgagccatgtaaataaagttctattggaatacacctatgtccatttatttacattgtctgtggctgcttttgcactgtagttgcagagttgaatagctgcagcagagacctagtagcccacaaagcctaaaatgtttactgtctggccctgtattgaaagagtttgctgattattgtgctagatgaatgcaggatactacacccctctaaaaagagctgcatagaaatacatgcatatagatgcacacacgtctgacatctaccagctacctcatttcaccacttgggttataaaccacacatatttacatctgttgtacaattttcaatccgatttcagataaccttccttctaccacttcacaataattcatgagctgcaacccttttgatgcccacttcacaagcaaacttcaggtctttttcaaagtaaagtgccacatttattgttatatttgagcatttattatttaacatgtcaaactgtgctaccatttttctttggtttctttgttttaaaaaaagtcactgatgaaatttttgaatgttgtgcttctaacctcatttttcctatgagttctatggtgttaattgcacaattttacatagtttggtggtttttaggaacccatatgttacattattgaggaactgactaattatcatcctgtaaaaagtactaattcattcaccaaacatttctggggtgatgtaaatattaagtgagttaaatgggcataaagcacttatgtctttattgttactcaaatattagttattactgattactattaccatgtgtcaggaactgtaataagtagtgcattgatgaacaagacagataagggacctgtctccatgaagcttacattgtatttttaaaaatctattaatatacattttggctagtaaccgagcccttgccccacagaaaagttgtgctgttacacaaaataatattttaagatccatccacaagtcaaagacatttcacttaaaacagctttctcagcagtgtctccttgatagggtataatattttattgaattattgtttttggctgggtgcagtggctcatgcctgtaatcccaccactttgggtggccaaggcaggtggttctcctgaggtcaggagttcaagaccagcctggccaacatggtgaaaccccgtctctactaaaaatacaaaaattagccgggcgtggtggcgcatgcctgtaatcccagctactcaggaggctgaggcaaaattgcttgaagccgggaggcagaggttggagtgagccgagatatcaccaccgcactccggcctgggcgacagaatgagattccgtttcaaaaataaataaataaataaataaataaataaataaagaattattgtttttaatttttgtttttttctgagataggctgttactctgtcactcaggctggagtgcattggtgcagtcatggctcactgcagcctccgcctccctggttgcaggtgatactcccacctcagcctcccgaatatctgggactataggtgcatgccaccatgctgagttaatttttgtatttttttgtggagatgagtttttgccatgttgcccaggctggtatcgaactcctggactcaagctatctgccctctttggcctcccaaagtgctgggattataggcatgagccaccaaacctggccatgtgattgtttttttgtaactgtaacctcaggagatgaatccgatctatctttagggagataaagagtaatcatcccttcctttttttactgtataaaaggttacaaaatataatttcagacttgtagaaaatttgtaaaaatagcacaaagattctcagatgtgcttcatccagatgcagcaaggggtaacattttaccatgtttactttatcatcctctattattatttttctgaattgtttcagagtaaattgcagacatgatgtccctttactcccaaatactttaatacatatttctcgaaactaggaatagtctgttacatgatcccagtatagttagcaaaattaaaaattagcattaaggctgagtgcggcctcccacacctgttatcccagcactttgggaggctgaggtgggaggattgtttgaggccaggaattcaagaccagtcttctcaacatagaccctgtctctacaaaacaaacaaacaaacaaacaaacaaacaaacaaaagtactaaattagccggtgtggagcatgcctggagtcccagctactcagaaagctagagtcaggaggatcacttgagcctagaagttccaggctgccatgaactatgatcatgccactgcagtctagtgtgaatgacagagtgagacccccatctcttaaaataaaagagagattagcattgatacaataccatttttttttttttgagacagagtctcacactgtcgcccaggctggagtgcggtggcgcgatcttggctcactgcaagctccgcctgctgggttcacgccattctcctgcctcagcctcccgagtagctgggtctacaggttcccgccatcacgcccagctaattttttgtatttttagtcgagacgggttttcaccgtgttagccaggatggtctcgatctcctgacctcatgatccgcctgcctcggcctcccaaagtgctgggattacaggcgtgagccactgcacccggccgatacaataccatttttaatctacagaccttattcacattttaccaattgcttcatgacatccttcatgatgaaagacaaaaagttcttgttttctgatctaccatctaattctagaacactcattatatttcattgtcatctggaacagctcaccttgccatttttttttttttgagacagttttgctcttgttgcccaggctggagtgcaatggcatagtcttggctcactgcaacctccatctcccaggttcaagtgattctcctacctcagccacccgagtaactgggactacagacatgccccaccacgcacggctaattttgtatttttagtagagatggggttgcaccatattggtcaggctggtcttgaactcctgacctcaggtggtctgcccgcctcggactcccaaagtgctgggattacagatgtgagccactgcgcccggcctcttctccatttttaaaagaacacaggccagttgatttgaatttgtctgatgtttccctttgattatatattttggtaggaacactatgaagtgatgttttgtccttcacagcacattttatcaggaggtgtataatgcctttgcttttactatgttttagaatgattttgctttgtttttttttttctgagacagagtcttgctctgtcgcccaggctggtgtgcagacgtgcgatctcggctcactgcagcctccgcctcctgggtccaggcgattctcctgcctcagcctcctgagtagctgggactacaggcgtgcaccaccatgcccagctaatttttatatttttagtagagacggggtttcactgtgttgatcaggatggtctcgatatcctgacttcgtgatccgcccgccttggcctttcaaagtgctgggattacaggcgtgagccatcgtgcctggccgattttgcttctcatgctaaaattattaatcagctcattctctgccattttatttagaggtttgaagtttggcttgattaatttctacagaattggggagagttttcccacctcccatttttcttgctttttccatttcctccttcctcagatacccccaaagttcaaaaccaaccaccccgattatgaattttcattttgtattctgaacatatagctaaaagcagagaattaagggtgaatgtttcatgttaaagtgattggacctgttgttaagcatatgaaataatatatttccttcaaaggctgactatactatagtgcatccaacatagcttgttgaatatctcagttcttttttttttttttttttttttttagctgaaatttgccacagggaaatatctctccagcctgggcaacatagtgagactctgtctcaaaaaaaaaaaaaaaattagccaggtgtggtggtgcacaactgtagtcctaaatacttgggaggctgaggagggaggatcctttgagcacaggagtctgaggctgcagtgagctatgattataccactgtactctagcctgggagacagagcaagaccccgtctctcaaaaaaaaaaaaaaattggtggtgaaatacacataccacaagatttagcattttaaccattaaaaaagtttgtttttggctgggtgtggtgactcacgcctttgggagtgatcccagcactttgggaggccgaggcggatggatcacgaggtcaagagatggagaccatcctgtccaaaatggtgaaaccctgtctctactaaaaatacaaaaaaaaaaactagctgggcatggtggtgtatgcctgaagtcccagctactcgggaggctgaggcaggagaattgcttgaacccagggggcagaggttgcagtgagccgagatggcgccactgcccgccagcctggagacagaacgagactctgtctcaaaaaaaagcttttttttttttttttttgagagaagggatctcgctatgtttcccaggctggtctcaaacttctggcctcaagcaatccttctgcttcggcctcccaaagtactgggattacaagagtgagccactgtacctggcctcatttttctattttgataaacacttttttttttttttttgagacggattcttgctgtgttgcccaggctggagtgcagtggcatgatcttggctcactgcacctctgcctcccgggttctctgcctcccgggttcaagcaattctgcctcagcctcctgagtagccgggactacaggcgtatgccaccgtgcccagctaattttttttgtagttttagtagagacgggttttccccatgttggtcaggatggtctcgaactcctgacctcaggtgatccgcccgcctcggcctcccacagtgctgggattacaggcgtgagccaccatgcctggctgataaacacttttaaggcttaacatgagctaagtattattttagaacagattgtctcaaccttggcactatagacattttgtccagaaaattttttgttagaggctgtcctgtgaatgcattttatccctgacctctacccactagataccagtaacacccctaccctgagttgtgacaagcaaaaatatttccagaaattgccagatgttccctgtgggcggtatgggtttgagaaccacttttctagataataggcatttgtagataatgaatactgagctaagtggaggagtaaatggttgaaatagactatgtggttaagtacagttacagagatataaaccaagagatgtggaagaatagcaaaaaatttccttagagagttgatagcaagtattttcccaagagagacagcaattctgagttgggtcattggggatggtggggggaaatgtgctgaggagggggaaatattctaggtggtggaacgggttatgtctagagatacggtagaggagcccttgggtgccttgagaaaaatgagataataagtatgattggagagaatatgggaggtagaattggaaagaaggatgctagttggggtcaggtttgagaaaggcttttttttttttttgagacggagtcttgccctgtcacccaggctggagtgcagtgcctcactcggctcactgcaacctccgccttctgggtttaagtgattcttctgcctcagcctcttgagtagctggcattacaggtgcgtgccaccacttccggctaattttgtatttttagtagagaccgggtttcaccatgttggccagactagtctcagaactcctgaccttgtgatccgccagcctcggcctcccaaagtgctgggattacaggcatgaaccaccacgcccggccgagaaaggctttttatgctatgctaaaatgtttcattttccccctttcattatagaaaatcaacaaatacttttaaagtctgtagagttatatgatcagctttttaaaagaatagtgatacagtgaaatggtaaaaatggtcaatggtgaatattaaactcaagaagataactctagcctgtaaagtaggaaaataggaagggatggagatttatataaaactaaaactagatgtcatatgttgcccttaaatcacatcaccctgtgtgtagacttcttcatcctcatttgtcaaaattctgacatattgtcaatactgatgaagattcttgatattcaaagcaggagtgaagtgggcaaaaatctgtattctaattttcattaccctaataatgtccttttaatttggagcagttctgtggcctctctttgtctgtcctgatcttgacatttttgaagagtatagaacaattattttttagaatgtatctctatttgggtttgtgtgatgcttctttatgattagatgaagggtatgcatttttggaagaaataacagaagtgatggtatgttgttttcagtgcctctgtaacaggagatgcatgacattggttggtcccattactgatgatggtaattttaatcacttgggtggtttccagtagatttttctatgtaaagtttatcatttttggccgggcatggtggctcacgcctgtaatgccagcactttgggaggctgaggcaagcagattacttgaggtcaggagtttgagaccagtctgaccaatgtggtgaaaccccatctctaaaaaaatacataaattagccaggcatggtggcatgcgtctgtaatcccagctgctcaggaggctgaggcaggagaatcacttgaaccctggaggtggaggttgcagtgagccgagattgtgccactgcacttcagcctgggtgacagagtgagactccgtgtcaaaaaaaaaaaaaagtttatcatttcccatttttattttgaaacagtcttgctctgttgcctaggctggagtgcattggcacaatctcagctcactgcagcctcaacctcctgggctcaagtgatcctcccacctcagtctcctcagtagcgtgttccaccacacccggctgctttttgtattttttggtagaggtggagtttcaccatgttgctcaggctggtctggaacccctgagctcaagggcactgatcacctcagcctcccaaagtgttgggattacaggtgtgagccaccacgcctggccctgaaaaatatttttaacggttacattatcatggagaattggatggtataaaacaatagcagttctcatatttgaaaataaattgatgtaatgaaacaaatgagaggatcaaataatattgtaaaaagaataaaaacccacatatggacaggtctgtggaaattgtattaaagcctacctctcccagattgtttccgtttgttgcaatccatttaagaacagtttttgggctgggcacggtggctcacgcctgtcatcccagcactttgggaggcccaggcaggtgtatcatgaggtcagatttcaagaccagcctggccaacatggtgaaaccctgtctctactaaaaatataaaaattagctgggcatggtggcatgcacttgtaatcccaggtactcgggaggctgaggcaggagaattgcttgaaccaggactcgggaggtggaggttgcagtgagccaagatagcaccactgcactccagcctggcctgggctacagggtgagactcagtctcaaaaaaaaaaaaaacaaacaaaaaacagtttgtgggaaaaaacaatccttgtgtatgacataatttgctgcttttcccatttagaaaatttaaaaaatacttatttgagatggggtctcactatgttgtccaggctagggtgcagtggctattcacaggtgtgaacatagtacactacagcctcgtactcctggccttagcatcttgagtagctgggactgcaggtgcacatcacagtgcctcgcttactttttccatttttgtctgttgatcctctctctcttcctttggggtaaaaattgtggcttgtgatggtggtttgtggggaaagaaaaagttggtaagctacaagctctgagcctttaatgtgtttttgttaaccatgcagacagacattagatacatagatacaacatagatgagttaaatttgaaagaaggcaccaaactttgttactttaaagcaggatttctcaaagggacactgttgacattgatttcagaagtgagattttcatggtttttaatgttattattataatggtatggatagtgttttgccctctaagaagtagctaggagtgtttccatagatgcatttagtttatatcacttatgtattctgtctctattttgtaagaaaattgcctatgaacagaattttttctgtatgtggatttaatgtcttcttctaaaggaaacatgggtgtggttcacatttccttagttttgagtagcatggcttaagttgtgatccaattttaaaaaatcagttgaataaataaatagaaaataaaaggataatttctgtactaaaaaagtcagctggacagttaaaacatctccttttattcgtaagtttttcaataaaaattgttaaaagcagtattcatttgtgtaatgatataatctttgttattgttttatgtgcttttctaaaatgcaggaaacataaggtaaggagaagtctttccttaccctgggaccagatgtctatgaggactgttgacttttctgctataaacaggatgataaattaacagtggtgtgataggtaaagtagatttgttatgacatatcttccattaagcgataataacttgatttttacttagttgatgaaataaaataactttgaaaccttgggtaacatgaaattgaatcaaaatattttcaagttatggaacatagtgttattaatagaatggagtgttgaaaaagcactggattatgctttctgtaacttttagttctgggtcttatgataactgtgaccctgagcctcagtgttttccttttaatctgtagtgatattttttagttcagtctctcattttaaactgcttttagctctaaaattttatctcagtgacctgttgagttatataacaatcgtatcaggtaacctagataagaagaggaaggcagtaacatttcagaaatacagtttggggttgggaatccttaagtgatccagacttctcctttggtccgaagatagtgtgaataaaacagctgagggatgtgggcatcaatatattgcagaggaaaaggttatttccaggagtggatttgcagctactcttaaatctattatgttggggctgggcactggggctcatggctgtaatcccagcactttgggaggctgaggcgggcggatcacctgaggtcaggagttcaagaccagcctggccaacgtggtgaaaccctgtctctacaaaaatacaaaattttgccgagcatgatggcgggtgcctataattccagctacttgggaggctgaggtgagagaattgcttgaacccaggagtcggaggttgcagtgagctgagattgtgccattgcactcctgcctgggtgacagagcgagactctgtctcaaaaagaaaaaaaaaatctattatgttggatagatggtcttttccagaagcaaattttatagatggaaagcattttaattaatctagtaaaattctctcattttacaaatgaggctccctctacctctctccccctctccccctctccctctctccctctctccctctctccctctccccacggtctccctctccctctctttccacggtctccctctgatgccgagccgaagctggactgtactgctgccatctcggctcactgcaacctccctgcctgattctcctgcctcagcctgccgagtgcctgcgattgcaggcgcgcgccaccacacctgactggttttcgtatttttttggtggagatggggtttcgctgtgttggccgggctggtctccagctcctaaccgcgagtgatccgccagcctcggcctcccgaggtgccgggattgcagacggagtctcgttcactcagtgctcaatggtgcccaggctggagtgcagtggcgtgatctcggctcgctacaacctcacctcccagccacctgccttggcctcccaaagtgccgagattgcagcctctgcccggccgccaccccgtctgggaagtgaggagcgtctctgcctggccgcccatcgtctgggatgtgaggagcccctctgcctggctgcccagtctggaaagtgaggagcgtctctgcccggccgccatcccatctaggaagtgaggagcgccttttcccggccgccatcccatctaggaagtgaggagcgtctctgcccggccgctcatcgtctgagatgtggggagcgcctctgccccgccgccccgtctgggatgtgaggagcgcctctgcccggctgcgaccccgtctgggaggtgaggagcgtctctgcctggccgccccgtctgagaagtgaggagaccctctgcgtggcaaccgcctcgtctgagaattgaggagcccctccgcctggcagccgccccgtctgagaagtgaggagcccctctgccccgctgccaccccgtctgggaagtgaggagcgtctccgcccggcagccaccccgtccaggagggaggtgggggggtcagccccccgcccggccagccgccccgtcggggaggtgaggggcgcctctgcccggccgcccctgctgggaagtgaggagcccctctgcccggccaccaccccgtctgggaggtgtgcccagcggctcattgagaacgggccatgatgacagtggcggttttgtggaatagaaaggggggaaaggtggggaaaagattgagaaatcggatggttgccgtgtctgtgtagaaagaggtagacatgggagacttcattttgttctgtactaagaaaaattcttctgccttgggatcctgttgatctgtgaccttacccccaaccctgtgctctctgaaacatgtgctgtgtccactcagggttaaatggattaagggcggtgcaagatgtgctttgttaaacagatgcttgaaggcagcatgctcgttaagaatcatcaccactccctaatctcaagtacccagggacacaaacactgtggaaggccgcagggtcctctgcctaggaaaaccagagacctttgttcacttgtttatctgctgaccttccctccactattgtcctatgaccctgccaaatccccctctgcgagaaacacccaagaatgatcaataaaaaaaataaaaataaaaataaaaaaaattaaaaaaaaatgagaaaattgagctctcctgaggttgcagtttgcttaacagcatagatctaattagtaattaggactagaaccaaggttatctgactcccagttcaaggttcttggtacagtaccgtgtttttaactagtccattaggttgttttctgtgtattttataacacttctgtaagaaagtggaatatttttctctaaggtatgttaaaactcttgttcgagaaaatacagtaaaggatacctgttgtatcttaaagtgatttttatgtttttctgtcaatgccacaatctgaagaaagtaaattagctacacttctattgctgtgacaatagattatttagaatcttcttgattacttgtattattgttcccgtgcttcagagctgtttccttgctatttaaaatcattatggtatagcccagaggctaagggggttttctaagagtatgcaatttgtcattgacatagtttttttgtttgtttttgtttgttttgtttgtttttgagacagagtttttgctctgttgcccaggctggagtgcaatggtgtgatctcggctcactgcaacctccacctcctgggttaaagcaattctcctgcctcagcctcccgagtagctgggattacaggcacccaccaccacacctgactaatttttgtagaggcagggtttcaccatgtcggcgaggctggtcttgaactcttgacctcatgtgatccacctgcctcggcctgtgaggattacaggcatgagccaccgcaccctgccaacacagttgtttttgattggaaaagtttattttcctaatctcaaagtagcttgtatctgttctttattgtgaaatgcagtttctacattgaatttgtgtagtctgtagttttgactgttttaagttcaataactagcttagtagtatacttgttagaggtcagagtaggttaactactagaaagaacagtccttctgcttactgtactaggaggaagtctgtggtggagggaaaaaaggagtaaaacaattccagtcttctgtaaaatttgagtaatttctttctctactccttctacatgaaaaatacatcttatttgatttttgcatcacatgccttctatatgtgttggaatctggatcaccatttcttcattacttgtgggtttttgttgtgaaaaatgtggagtaagttagaagttgactgtagaataggtaacattctcttaaattctttgatcagagtgagcagagtccagaagcttggctcagacttagggaactcatgacacttctcttaatatcctaagttcatgacatgtctcttaataccctaagtgtacaatacaatagtagatcaaggaaggcagaggtatctggcagacttagaagtaactgttcataaaaacaaggatcagtatgtttctacaagataatgatttaaagttgagccaggattagttatacctttaatataaaaaattgaaatagcttatttaatctgttctaggctatagtatacggagctaggtattaaaacattctctatatatttaactcttttttttgagacagggtctcactctgtctcccaggctagagtacagtggcatgatcttggatcactgcagcctagacctcctgggcacaagtgattctcccaccttagcctccacagtagctgggactacaggcctttgccaccacacctggctcatttttgtattttttgttgagacggggtttcaccttgttgcccaggctggtcttaaacccctaagctcaagtgatccgcttgcctcagcctcccaaagtgctgggattacaggtgtgcaccactgcgcccaggctatttgacttttttattctgtaaaattgcaagcatattcagaaataagaaaatagtataacggggccgggtgtggtggctcacgcctgtaatcccagcactttgggaggctgaggcaggtagatcacgaggtcaggagttcgagaccagcctggccaacatggtgaaaccccgtctctactaaaaatacaaaaattagccaggcgtggtggtgggcgcctgtaatcctagctactcgggaggccgaggcaggagaatttcttgaaccagggaggcggaggttgcagtgagccgagatcgtgccactgcactccagcctgggtgacagagcaagactcattttttttttttttttttttaaaaaaaagaaaaaagaaaatagtataatgggttgggcccggtggctcacgcctgtaatccagcactttgggaggccaaggtgggcggatcacctgaggtcaggagttcaagaccagcctggccaacatggtgaactcttgtttctactaaaaacacaaaaattagctgggcatggtggcaggcacctgtaatcccagctacttgggaggctgagttaggagactcacttgaacctgggaggtggaggtttcagtgagccaagattgtgccattgcagtccagcctgggcaacaagagcgagactccatcccaaaaaaaacaaaaaacaaaagacaactatatatatatatataaaataacgaaaccccctaagtacctgtcacccagcttcaacaattatcatcttgcagttagttgaatttggttaacacttacccttcagtggattattctagactaaatttccaaacataatcatattgtattgaagtgttttttgaacaaactatactatggggtatttacctaaaatgaactatttgcaaaaagataagttgattttttttcttctggtgccagtacacatcataattgtagttaaaagctattatcctcacattaaagtttaatttttaacacattatgaaaatttaaaacttacagcaaagctttaaaaattttacactgaacaccaatattattaacatctagattctacctttaacattttactcttcttttttttttactcttcttgttttatcacatattgatccatctgtccaactctccattgatgtaacatttcattttattttcttattcatttcaaagtaaattacagatattagtatagttgaggttcagtttttaaagtcatattttcaactaattgtttttcctgttttgaaagactgttatatctgaagttccacattatgacaactcatagtctctatggttccagtgcttcccattttgaacttttctttcatgttctacgaacctttattaaaatatttagagctatgtacaagtaatatatacagtatttagctaaaactaagtagaatgaatgagggttttgcttgtgtgtttattgcagtctttaaaaaaaatctcttctagtgagtcaatgtgtatcttttttttttttttttttttttttgagacagagtcttgctctgtcgcccaggctggagtgcagtggcgtgatctctgctcactgcaaagctccacctcccggattcatgccattctcctgcctcagcctcccgagtagctgcgactacaggcgcctgccaccacgcctggctaattttttttgtattttttgtagagatggggtttcattatgttagccaggatggtcttgatctcctgacctcgtgatctgcccgcctcggcctcccaaaatgctgggattacaggcatgagccaccgcgcctggccaagtcattgcgtatcttaagatggtacactaaactaatatgcttgccattggtgacaacatagatgaacctggaggacattatggcaagtgaagttagccagacgtggaaaaaataatacttcatgacttcaacctatatgtggaatctaagaatgccaagtctgcaaaagaagagagtagaaaagtagttaaatgggtaggaaggtgggagaaatggggagatattggttaaaggttaccaagttggaatcacgtaggatgactaggtctagagatctaatgtacagcatgaacactatagttaataatactgtatcatgtactggaaagttgttaaaagagtagatttcaggtgttttcagcacacacagaaaaagataactatatgtggagatgggacattttgcttgaccatagtaatcatttcactatgtatatgtatatcaaaacattcatgttgtacactttattgattgattgattgagacagggtctctcgctgttgcctcagctggagtgcagaggcatgatcacagttcactgcctgcttgacctcccaggctcaagcgatcatcccacctcagccccccaagtagctgggactacaggtgtatgctaccatgcctggctaatttttatagtttttgtagagatgggttttgccgtgttgcccaggctggtattgaactcctgagctcaagcaatctgcccgcctctgcctcccaaagtgctaggattacagatatgagccactgcgcctggccataccctttaaatatatacataaaaagaagaatgcctttaaaaattttccatttaacaattactctcagggccaaaactcactgtttaagtattttgctcttttactttgatcttggtgttctatgtagtgctaaaatatactttcatctccatatgactgcttgtaacaaaaagctgttcaccacattatgaactccctgaatacacacaataatcatatagtaaatgcttgttgaataaacaagacaaaattcatcagtttttatccttacttaattttttgaacttttccttgaacttctgttatcaaacttaatacatgaacaacagaaagatgctacggatctatgtagtacaaagtaaaatatgaaatttacacactaaatatttctgtagcatattttcagaagtaagtaattgaatataaacagaagcaagcatattctatttttttattatttaagtgggaaatattttaaaatcttatgtcatatttgctttagatttcttttaaagaattaaaacattacagatagagttgaagcctcatgggttattttaatgttttctacataaacatgtttccatatacataaaccttatttagaattttttcagtttatttatttatttttattattatactttaagttttagggtacatgtgcacattgtgcaggttacatacgtatacatgtgccatgctggtgtgctgcacccactaacttgtcatctagcattaggtatatctcccaatgctatccctcccccctcccccctccccccaccccacaacagtccccagagtgtgatgttccccttcctgtgtccatgtgatctcattgttcagttcccacctatgaatgagaatatgtggtgtttggttttttgttcttgcgatagtttactgagaatgaaattttttcagttttatacgtttatgtaagtggcaccatacagtacatattattttgcaacttgccttttttttttttgtttgtttgctcaatgttgtttttaggattttgatgtaactccagatctgcactgtccaatacaatagccactaactatctgtggctattgagtactggaaatgtagctagtccacattgagatgtgctagaaatatatttgtacatggaatttcaaatatttagtattaaaaacatgtaaaatatctcactaaaagtttagtatccctaagaatctgaaatagaaaatgctccaaaacccaaaattttttgattactgacatgactctcaaaggaaatgctcaaaggtttaatgcaaatattccaaaatctgaaaaaatctgatatattgaccacatatggaactgataatagtttggatgtattggattaaataaaatgtaaaaattttaccagtggtttccttttttaaaatatggctactagaaaatttaaatatatatttgaaatgccttacattatatgtctgttgggcagcactgatctatattgcccacttttcattcctgtttatttattattattttatttttatttttattttttgagacagagtctcgctgggtcgcccaggctggagtgcagtggtgctatctttgctcactgcagctgctgcctcccaggtccaagcaattctcttgccttggcctcccaagcagctgcgattacagctgtgcaccaccacacttggctaatttttgtatttttagtagagacggggtttctctgtgttggccaggctggtctcgaactcctgacctcaagtgatccacctgccttggcctcccaaagtgctgggattacaggtgtgagtcactgctcccagccttcactcctgtttagtattaagttatatagataatagtttgctactggtggatagttgttgttttttttttttacgaatttggtgctactaaagactgttctcatgagcattcttaaacatgtctcctttgcacatatgctagagtttctttctccctaatggttcttctgatttatacttccactggcagtttgagaatgttcttgttctgcagttcttcatcctggtcgatgtttttgtgtagataactgtaatttaatacttaaagtcaaaagcataaggaagcattggtaattatttaagtgaatataaaatgtcagcttatttttctcagtgaatcttttgtaatagtcaactcacattgcctattttttattgtagtgcttctgatctgaataaataaatttaaaatttaacagccatgttatgtatcttattagtaggcagctgcagttatgcaaccaaagaatgtcccatctttaagttccattagcttgaaaaagaaatggcagctttacgtcatggaatactgtgctgccactaaaaatgatgttttagaagaatatttaatgatgcagaaaaatattcacagtatcttaatggaaagaaaagattataaagcagtaaccatttcgttttgttaaaatcaggtctatgttagctttttttttttgagatggaatctcgctctgtcacccaggctaaagtgcagtggcgtgatctcggctcactgcaacctccgcctcctgggttcaagtgatgctcctgcctcagcctccctagtagctgggattacaggagcatgccaccacacccggctaatttttttgtatttttagtagagatggggtttcaccatgttggccaggctggtcttgaactcctgacctcaagtgatccacccgccttggcctcccaaagtgctgggattacaggtgtgagccaccgtgcccggcgagcatttccttacatgcttatctctggatggtcagattgtaggtaacttctattttgcacttcacactttttttttttttcttgagatggagtttcgctcttgttgcccaggctagagtgcaatggcgtcatcttggcccactgcaaactccgtgtcccgggttcaagcgattctcctgcctcagcttccagagtagctgggattacaggcgcccgccaccacacctgcctaatttttagtatttttagtagagacagaggttcaccatgttggccaggctggtctcgaactcctgacctcaagtgatccactcgcctcggcctcccaaagtgctgggattacaggcgtgagccaccgtgcccagcctgtacttcacacttttaatatttcattttctgtagtggatttactattaccagggaaggggaatgcaaggaggagggaagagttcttaacctaaaattttcatagttggaatattattataggaaagaagagattgaatgaggtgtcactgttcccatgtttaaagataagtcaattgggaggccgaggcaggtgaatcacgaggtcaggagttcaagaccagcctggccaatatggagaaaccccatctctactaaaaatacaaaaattagctgagcgtggtggcaggggcctgtaatcccagctactcgggaggctgagggaggagaatggcttgaacccagagggtggaggttgcagtgagctgagatcgtgccactgcactccagcctgggcgacagagtgagactttgtctccaaaaaaaaaaaaaaagataatactttccttctattcaatttcaggcttttcttaagttacaaatggaaccagccaaactatgttattgcttacccattgtttttccagcgttagaggagtttttcaaagaatattttttgatttagagattattttatttattatctatttagagattattcatcatttagagattgccatttaatttcagtaagagttccatttgcatctgatattttttagtttcggagaaaggaaatggtggagaaatggattcatctccaatcctttggaataaaattcagacagtttaagctctagtctcaacttgatttaatttggaattgcatgatgtggtgtcagatttgggttcacatccagttctcttgctgtgtaaccttgggaaatttacccagcatctgagttgtttcttcatgtgtgcagtggagacaataccaagatgaagatttcatgagatgtctagtgtagacatctatttttcagagtggatgcatttaacagttggatgctgaatttataagagtatggatttcataaaaagagcataaatttcatgatatgatgtatatatcaaaagatataggtcgggtgcagtggttcatgcctgtagtcccagcactttgggaagttgaagcggatggatcacttgatgccaggagttcgagaccagcctggccaacatggtgaaacttcgtctctactaaaaatacaaaaattagccaggcgtggtggtgtgtgcctgtaatcccagctacttgggaggctgaggcaggagaattgcttgaacccaggaggcagtggttgcagtgagccgattttgtgccactgcactccagcctgagtgacagattgagactccatcttaaaaaaaaaaaaatgatggctgaataggaacagctctggtctgcagctcccagtgagaccaaaatgtagaaggcgggggatttcttcatttccaactgaggtacccagttcatctcattgggactggttaggcagtgggtgcagcccatggagggtagcagaagcagggtggggcgtcgcctctcccggaagtgcaaggagcgagagatctcccttccccaagccaaaggaacccgtgagtctatgctatccggcacagatactacacttttcccatgatttttgcagtccgcagacccggagattccttagtgtgccaactccaccagccctgggtttcaagcacaaaactgggcatctgggcagacagtgagctagctgcaggagttttttttttttccccctcttcataccccagtggtgcctggaaccccagtgagatagacccattcactcccctggaaagggggctgaagccagggagctaggtggtcttgcttagcgggtcccactcccacagaacccagcaagctaagaaccactggcttgaaattctcattgccaacacagcagtctgaagctgacctgtgaagattgagcttggtgaggggaggggcgtctgccattactgaggcttgagtaggcagttttcccctgacagcactaaggaggctgggaagttcagactgggcagaactcaccacagcgtggcaaagtggctatggccagactgcgtctctagattcttcctctctgggcagggcatctctgaaagaaaggcagcagccccagtcaggggcttatagataaaactcacatcttcctgggacagataacctgtgggaaggtgcagctgtgggcgcagcttcagcagacttaaatgttcctgcctgctaggtctgaagaaagcagtggatcctgacaaggaggattctcctagcacagcacttgagctctgctaggggacagactgcctcctcaagcgggtccctgaccccagtgcctcctgactgggagagacctcccagcaggggttgacagacacgtcacacaggagagctcccgtgggcatcaggctggtgcccttctgggacgaagctcccagaggaaggagcaggcagcaatatttgctgttctccagcctccgctggtgatacccaggcaaacagggtcaggagtggacctttagcaaattgcagcagacctgcataagaggggcctgttagatgaaaaactaacaaatagaaagcaataatatcaacatcaacaaaaaggacccccacacaaaaaccccatcaaaaggtcatcagcctcaaagatcaaaggtagataaatccacgaagatgaggaaaacccagtgcaaaaatgctggaaattccaaaaacccgaatgcctcttctccttcaaatgaacacagctcctctctagcaaggccgcaaaactggacggagaatgagtttgacgaattgacagaactaggcttcagaaggtgggtaataacaaactcctctgagctaaaggagcatgttctaatccaatggaaggaagccaaggaacttgataaaaggttacaagaactgctaactagaataaccagtttagaggacataaatgacctgatggagctgaaaaacacagcacaagaacttcgtgaagcatacacatgtatcaatagtcaaatcgctgaagcggaaaaaaggatatcagatattgaagatgaacttactgaaataaggcatgaagacaagattagagaaaaaaggttgaaaaggaacaaacaaagcctctgaaaaaatatgggactatgtgaaaagaccaaacctatgattgattggggtccctgaaagtgatggggagaatggacccaagttggaaaacacacttcagggtattatccaggagaacttccacagcctaccaagacaggccaacgttcaaatcaggaaatacagagaacaccacaaagatactccttgagaagaccaaccccaagacacataatcgtcagattctccaaggttgaaatgaaggaaaaaatgttaagggcagccagagagaaaggtcgggttacccacaaagggaagctcccagaggaaggatatctgggcagaaaccctacaagccagaagagagtgggggccaatagtcaacattcttaaagaaaaaacttttcaacccagaatttcacatccagccaaactaagcttcgtaagcgaaggaggaataaaatcctttacggacaatcaaatgctaagagattttgtcaccactagacctgccttataagagctcccgaaggaagcactaaatacagaaaggaaaaactggtactagccactgcaaaaacattccaaattgtaaagaccatcgacactataaagaaactgcatcaactaacggtcagaataaccagctagcatcataatgacaggatcaaattcacacataataatatgaaccttaaatgtaaaagggctaaatgccccaattaaaaggcacagactggcaaattggataaagagtcaagacccattggtgtgctgtattcagaagacccatctgatgtgcaaagacacacataggctcaaaataaagggttggaggaatattaaccaagcaaatggaaaaaacaaaaaaaaaaggggtgttgtaatcctagtctctgataaaacagactttaaaccaacaaagttcaaaaaaggacaaagaagggcattacataatggttaagggatcgatgcaacaagaagagctattttaaatgtatatgcttccaatacaggagcacccagattcataaagcaagttcttagagacctacaaagagacttagattcccacacaataatagtgggagactttaacaccacactgtcaatattagacagatcactgagacagaaaattaacaaaaatattcaggacgtgaactcagctctggaccaagcagacctaatagtaacctacagaactctctaccacagatcaacagaatatacgttcttctcagcacatcacacttattcactcaaaaccccacaactacatggaaactgaacaacctgctcctgaatgactgctggtaaataacgaaattaaggcagaaataaagaagttctttgaaaccaatgagaacaaagagacaacgtaccagaaatctctgggacacagataaagcagtgtttagaggggaatttatatcactaaatgcccccatcagaaagcaggaaagatctaaaatgaacaccctgatatcacaattaaaagaactagagaaaaagagcaaacaaattcaaaagccagcagaagacaagaaataactaagttcagagcagaactgaaggagatagagacatgaaaacctctccaaaaatcaatgaatcaaggagctggttttttgaaaagattaacaaaatagaccatgagccagactaataaagaagaaaagagagaagaattaaatagacacaataaagaatgataaaggggatatcaccactgatcccacagaaatacagactaccatcagataatattataaacacctctacgcaaataaactagaaaatctagaagaaatggataaattcctggaaacatataccctcccaaggctaaaccaggaagaagttgactccctgaatagaccaataacaagttctgaaattgaggcagtaattaatagcctaccaaccaaaaaaagcccaggagcagatggattcacagccgaatgataccagaggtacaaagaggagctggtaccattccctctgaaactattccaagcaatagaaaaagaaggattccttcctaactcattttatgaggcaagcatcatcctgataccaaaacctgtcagagacacaaccaaaaaaggaaatttcaggccaatatccctgatgaccatcgatgtgaaaatcctcaataaaatactggcaaacagaatccagcagcacatcaaaaagcttatccaccattatcaagtctgcttcatctctgtgatgcaaggctggttcaacatacgcaaatcaataaaagtaatcaatcacataaacggaaccagtgacaagaaccacatgattatctcaatggatgccgaaaaggccttcgataaaattcaacaccccttcatgctagaaactctcaataaattacgtattgatggaacatatttcaaaataataagagctatttatgacaacccatagccagtatcatactgaatgggcaaaagttggaagcattccttttgaaaaccagcacaagacaaggatgccctctctcaccactcctattcaacatagtgttggaagttctggctaggcaagagaaagaaataaaggttattcaaatagcaagacaggaaatcaaattttctctgtttgcagatgacatgattgtatatttagaaaaccccatcatctcaacccaaaaactccttgagctgataagcaacttcagcaaagtctcaggatacaaaatcagtgtgcaaaaatcataagcattcctatgtaccaataatagacaaacagccaaattatgaaggaactccctttcacaattactacaaagagaataaaatacctaggaatgcaacttacaaggggtgtgaagggcctcttcaaggagaactacaaaccactgcttgaggaaataaggacgcaaacaaatggaaaaacattccatgctcatggatgggaagaatcaatatcgtgaaaatggccatactgcccaaagtaatttacagagtcaatgctattcctatcaagctaccattgactttcttcacagaactaggaaaaactacgtagagccaaaacaatcctaagcaaaaagaacaaagctggaggcatcctgctacctgacctcaaactatactacaaggctccagtaaccaaaacagcatggtactggtaccaaaacagatatatagaacaatggaacagaaccgaggcctcagaaataacaccacacatctacaaccatctgatcttcaacaaatctgacaaagacaagcaatggggaaaggattccctgttttataaatggtgctgggaaaactggctagccatatgcagaaaacagaaactggaccccttctttagagcttatacaaaaattaactcaagatcgattaaagacttaaatgtaaaacctaaaaccataaaaaccctagaagaaaacctaggcaataccgttcaggacataggcatgggcaaagacttccatgactaaaacaccaaaagcaatggcaacaaaagccaaaattgacaaatgagatctaattaaagagcttccacacagcaaaaaaactatcattggagtgaacaggcagcctacagaatgtgagaaaatttttgcaatctatgcatctgacaaagggctaatatccagaatctacaaggaacttaaattacaagaagaaaacaactccatcaaaaagtgggtaaaggatatgaacagacatttctcaaaagaagacatttatgtggccaacaaatgtgaaaaaaagctcatcatcactggtcattagagaaatgcaaattaaaaccacaatgagataccatctcacgccagttagaatggcgattattaaaaaggcaggaaacaacagatgctggagaggatgtggagaaataggaacacttttacacttttggtggaagggtaaattagttcaaccattgtggaagacagtgtggctattcctcaaggatctagaaaccagaaatacaatttgacccagcaatcccattactgggtatatacccaaaggattataaatcattctactataaagacacatgtacctgtatgtttattgcagcactatttacaatagcaaagacttggaaccaactcaaatgcccatcaatgacagactggataaggaaaatggggcacatatacaccatgaaatactatgcagccataaaaaagattgagttcgtgtcttttgcaggtacatggatgaagctgtaagccatcattgtcagcagagtaacacagtaacagaaaaccaaacactgcacgttctcactcataagtgggagtcgaacagtgagaacacatgggcacagggaggggaacgttacacattggggcctgtcaggggttggggggcaaggggagggagtgcattaggacaaatataatgcatgtggggcttaaaacctagatgatgggttgataggtgcagcaaaccaccatggcacatctatacctgtgtaacaaacctgcatgttctgcacatgtatttcagatcgtaaagtaaaaaaaaaaagatatggaagttactatgcgcgttaataaaatatgtttatacctcctcccttaggtgtctattatgtagaacaagtttattacattctaatgataaagtaaacactctgttttcaaaggtggtgttatacgtttgtgtatcttttgccccgggcatgatgatttcatcgtttgtgtaataaatttaatactaccatagtctccccttattcacacgggataagttccaagaccccaatggatgcctgaaactgtggatagtactgaatcctatatacacttatgtttttttcctgtacactcatatttatgataaagtttaacttataaattgtgcacagtgagagactgacaataactataataaaatagaacaattataacaatatactgtaataaaatttatgtgaatttggtttcaaaatatcttattgtactgtactcacccttatgatgatgatgttagatgataaaatgcttatgtgatgtgatgaaggtaggtgaattatgttaggcattgtaatgcagcatgaagctactattgaccttctggtgttacatcagaaggaggatcatctgcttgggtggtcctgaatcatcacgtcctgatgatgtctgttgctggttgtcaggagcagacagtgtccatgactaatgggcaggcagcgtatatagcatgtatacactggacaaagggatgtctcatgtccacggctggacagagcaggagagtgcaagattttgtcacactactcagaatcgtgcagtttaaaacttaccaattgtttatttctggaattttccgtttaatatttttggactgcagttgaccacaggtaactgaattcatggaaagcaaaacaaccatggacaaagtgggattactgtattatttcagattttaattagcatttttcaaaactctgtctagctagtgcttgcattgtagaatttgtctgatttcatttttattgattagggaaataagctttatttttatctggagtgatttgtttctttgtgcttcctcaaaattgagtagtggctactgagtatatatcgaaaaggaaataaattattatgtcaaaaagatacctacatttgtatgttgattgtagcactgttcacaagattaaagatatggaatcaacctaagtgatgaagaaaattggtgtgtgtgtgtgtttgtgtgtatacatacacactgtggaataatactattcagccacaaaaaagaaaaaaaaatcatgtcttttgcagcaacatggatgggactggaggccattatcctaactgaaataactcagaaagtcaaatactacatgttctcacttacaggtgggaacttaaatggttacacatagaatagagtagaataatagacattggagactccaaaaggtgagagggtggcaggggggtgagggttgaaaaattacctattgagtactttgttcagtatttgggtgatgggtacactaaaatcccactttaccaccatgcaatatatgcatgtacgaaatctgcacttgtaccccctaaatatatacaaataaaagttttttaaaacacttagtaaatagcctgtcatagggaataattgaaaccatttcgtatctcactttaaaacctttaggctgggtgctgttgcttatgcctataatcctagcactctgggaggccgaggtgggtggatcacctgaggtcaggagttcgagaccagcctggccaacatggcgaaatcccatctctactaaaaatataaaaattagccagtcatggtggcacacgcctgtaatgccagctccttgggaggctgaggcgggaaaatcacttgaacccaggaggcggaggttacagtgagccgagatcacaccactgcactccagtctgggcaacagagcgagactccatctccaaaaaaaaaaataaaaataaaaataaaaaacctttttagttctgtttcaatgttatcttctttttatttaattatttttggaataagaaataatatttatatggtttgaacaccaaaaggtataaaagatatttttaaaggtataaagtataaaagttagaaatttcccccacttccctgttctctgttcccacagctgccagcagcttaccaccccccagcccaatcactgctactgatgcctaacctatctttccagagttctttgtgtgttcagtagcagttaaccacagatctttaatcattcccctttataccataaaaggtggcatgttatgtacacttgcctcccctttgctttttccacttaatgtgtcttgagaagctttccatatatcagtacatggaaaactttcttatattgttttattttaaatttatatacaataaatgcatggatcagaaaaataattgaatagtgggccccaaattaaatgattactctaatgatttgtagatgggtttagttaaagcactgggatatttagctacaggtataggaatgcatgattattttctgtcaggaaacctagattttgttcttctccccttctttatcaaaggtgaaatcagactcttatttaaaccaggattaagtattctttgcataataatatatatttgctttcccaagttattcttcaggaaagtcttgactctctagcaaactttgtttcttaaaatggaggttagcaggtgttggaaataaggtgagagttttaacacttaaaggaaactatataaagattagatatagtcagaaatttagaaaacattaggaaattcacagagagatggatcccccttttctaccctagattacccctgggctgcttaatggcttgtctttactattagattgtgagctccttgaggtcaggttttatctgttttttatttcaataccaagtgccaagaatatattcagcatttggtgtaaatattataaaatgagtaaatgaatgtgctcttgaatagaagttaactctgattttgggttaagtcccccgccccctttttttgagacagtctcactctatagctcaggctggagtgcagtagcgcagtctcagctcactgcaacccccttctccggggttcaagcaattcttatgcctcagcctcccaagtagctgggattacaggtgtgtgccaccacacccggctgatttttgtatttttagtagagatggggtttcaccatgttggccaggctggtcctgatctcctgaccttaggtgatctgcctgccttggcctctcaaagtgctgggattacaagtatgatctactgcgtctggctgattttgtgttaaaatcctttatgtcagttccagaagaggttaaatggaagttttcgaggcaagagatacttgtgaatttgacatgagtggcctttgttttgaaattttaatgctacacagatgctgtaaaaggattttttcaggccgggcgcggtggctcacgcctgtaatcccagcactttgggaggccgaagcgggtggatcacgaggttaggagatcgagaccatcctggccaacatggtgaaacctcatctctactaaaaatacaaaaattagccgggcgtggtggtgtgcgcctgtagtctcagctactcaggaggctgaggcaggagaattgcttgaacccgggaggtggaggttgcagtagagccgagatcgcgccactgcaactccagcctgggccacagagcaagactccatctcaaaaaaagggtttttcaaaaaatcatgtacaattagaaaattgtgtctcttaaatctatttgcttatgttattaatcccagattatgactgttctttcccctaaggcattagcctgttgaaagaaacagacctataggacttttgttgatgttaaagccagaccagaaatttagaaaatcaggatatttgccattttgataagaaaaccatttaatagttgaatataggaatttgcattttgagagtgtgtactaatttagattctccaggaatagaaccatcatctgaaaataaataagtttaaccagacggacaaggagtgatatgtagttttaggtggtaagactgtgatattgttaggttacatgtatctagggcaagatgctcaaatacaataagtatatacagactaggaactctagttgtctttttttaattaatgaaaagagggttttatgcttcatttctaaacattctcaaaggaatttatgttttgttgatgatctttttttatttatataaatttacgggggtacttgtgcactttttttttaaacatggatagattacagagccgtcaagtcaagcctttagagtttccatcacccaaataacacacattgtattcattaagtaatttctcatgatctcccacctcctgctctctcacctttccaagtctgttatctatcattccatgctctacgtccatgtgtacacatttttcagcatccacatgtgaatgagaacatgtgttattcccaccaacagtgtatgagtgttcccttttctctgcaacctcaccaacttgtgttattttttgtctttttagtaatagtcattctaactggggctggatgatacctcattgtgggtatttttaaaataaaaaaaaatttgtgtgtacataggtatatttatttatggggtacatgagataatattgatacagacatacaatgttcaataactacatcagggttgtatccatcaccaagcatttatcctttcttggtgttagaaacaatctagtttctaatctctaatagtttctaatctctagtagttatattaaaatgcataatgaattattattgactgtagtcaccccattgtgctatcaaatgctaggtcttattcattctatctaactatatttttatacatattagccatccccactgtgccaccatccccattagtgccctggcccccactacccgtcctagcctctggtaaccatcattctactctctatctctatgagttcaattgttttgatttttagataccacaaataagtgagaacatgtgaagtttgtttttctatgtctagattatttcacttaatataatgacctacagttccatccatgttgttgcaatgacaggatctcatacttttttaagggctgaataggactccattgtgtatgtgtaacacattttctttattcgtccgtctgttgatggacactcaggttacttccaaatcttggttattgtgaatagtgctgcagtaatcatgggagtgcagataactctttgatatactgatttcctttctttggggtacatatttagcagtggaattgctggattatatggtagctctctagtttttttttttttttttttttttcatttttgagacagggtctcactctgttgcccaggctggaatgcagtggcggaggttcacttcagcctcaacctcgcaggcttaggggatccacccacttcagtcttccaagtagctgggactataggcgcataccaccatgcccagctaggtttttgttgttgttgttgttgttgttgaggcagagtctcactctgtcacccaggctggagtgcagtggtgcgatctcggctcactgcaacctctgcctcctcggttcaagccattctcctgccttagcctcccaagcagctgggattacaggcgcccaccaccatgcctggctaacccagctagtttttaattgttcgtagagatggggtttcaccatgttgtctagactggtctcgaactcctcgactcaagtgatcctcctgcgttggtgtctcaaagtgctgggattgcaggcacaaggcaccgtgcctggtcagaatttttttttaagggtttctcctttgtaaatttcttattcatatcttgaattgattttctgagtttcttgtattggttttcagacttttcttgcatctcagtgacccttaaaatcaatattttgaatattttatctgggattttgtggatttcattttggttaagatctgttgctgcagaatcgtgttcctttgacagtgtcatattaccttggtttctgatgtttcctttgtcttttcattgatttctgtgcatgtgctgtaacagtcacttcttatctttgaatttactttcatggtgaggggagatttcttcctgaagatgtgactataatgttggttgggccttgcttctgggtgcgtgcagtagtgaagtctctgtatgatttattttgagacagctctgttgcccaggctggagtgcagtggcacattcatagcttgcttcagcctcaaagtcctgggcataagtgatccttctgcctcagcctcctgagtacctaggactacaggcgtgtgccaccatgcctggctaattttcaattttcttttagagatgggggtctcattatattgcccaggctggtcttgaactcctggtctcaagcaatcctctctccttggcctcccaaaatgttaggattacaggcatgaaccaccgtgcccagcctctgtatgatttctttggctataaatagcattaatggtgtctgtggtttccttgatgtcttagcttgagtttatttgtggaggctgaagttgcgctggggattggaatgcctaataggcctgtctttaggtttcaatggtagtgatggtgggctaagcatgtctatccatgtgccctggggcagtgtgtgctggtaactgtgttggcagttccaggcaggctgattcttgggcttctgagtgactttctcagatgcctgttgtaatggtgtaccaggtgggtgagctggctcttgagctcctgggcaactggcatggcatagtttatggtggtagtagttttgttgagatactcttgtgggtcccaagcactttgcatttgtgttagcagtggttacaatgagatccaggccagtaaggtggtacttgcaggcatgaggcagctgaggcggtactggtagggtgttatccctgacctctgtcccctgggagaagtactctggtgtttcagagtgtttcaggtagtgggtttggttgtggaatcccctggtaacctggatcctgcactgtttctcagccaggtcaaagcctggtagagctggactgggaaagcttgcactcaggcccccacagtggtgtaatgtcatgataggcggggtggaatgatcttcaggctgctggcaaaatgcttgggtgagggatgagtgccactgctgagatcctgccatggggaagttgggcctggtcccaggagtgagttgtgttcctttcatgccccagtccaggcggagttccttcctcttgtccctgctgttcagtcagaactctgcagttcttgcctagtccctaaatcatcccagggtcgggtcatataagccccatccagctcaagacttaagcctccagggcaattaatcgtgctcaaatcctgggggtggtgtttgcttctagcactggtggtggctgcatcccacaccaggcagagccaccccatccccgcccctactcacactctgcctctccaaacagcagcccaagtttccctaatggctaggactggccctgttgcttccccgtactgctcacagttatgagctgagatcctgcatcgtgtcttgttacagctgcttaggtttcaaaaatggcatgggacacagaatgtgttccctccctgaaacagttctttctcacagtcttccagtcattccctaaattaattagattcagggcttaagagggtcagggtgctctactgaggactggattgtatggtagtggaccacagaaaaatactcaccctctcccatattggggaatcacttctggttccctgtgggtcccagccacacaggctctctgttttccttttgcttcctagattttggtttttgctgtcgcttttctgttgaactcctgtgttccctctgggataatatatccaaagtgtcattgtctacacaattttagctcttgtacctggatgaggcacgcttgaaattcttgcagtcatccatcttttcctgatcttgtttcttctgccccattccccaggttcctccagggtctcacagttcccctgtatgtgggaaaggcagttttctttctgcccaatcctgcttctcctttgtccacccagatgaggtttccgctagaattgctacttaaagtggttctgtggaacattttgtagcagagaaaatcagggctgagggagcaccataaaggttagaaaagattagaacattaggttagaaaatctgaactactctacctgtcttgattaggaggattagagttgatgttggatgggtttgttggtttattttccacttatctatcagaatgaagaacttactgccttttcttcttagttggtctaatatttatcactttaattatttttaagtgtacaattcagtggcattaaatatatttataatgtatcatgatcattactacctatgcccaaaactttttcatcatccccaacaaaactctatatccaaaaaaaaataaaaccctctatatgtacatggaacaattaagttgggcccctatcttgcaccatataaaacagttaaatgcatcaaagatcttaacgttaacagctaaaattataaaactcttagcagaaaacatttgggctgattttcatgacctgggatttggcaatgatttcataaacataatgtagaaagcacaggcagcaaaagaataagtaagttggacttcattaaaaatttaaaaatttttttacatcagaggtcactatcggctggatgtggtggctcacacctgtaatcccagcactttgagaggctgaggcgggtggatcacttgaggtcaggagttcgagaccagcctgaccaacatggtgaaaccctgtctctactaaaaatacaaaaattagctgggcatggtggcgcgcacctgtagtcccagctacttgagaggctgtggcaggagaatcacttgagcatgggaggtggaggttgtagtgagctgagatcgtgccactgcactagaacctgggcgagagcgcaagactccatctcaaaacaaacaaacaaacaaaatgaagcaatcccccccccaaaaaaaaggtcactatcaagagaataaaaagaaagacaactcagaatgggagaaaatatttgcaaatcatatgactgatgagggtttaatatccagaatgtgtaaagaacttttactgagcagcgaaaagaaaacccaatgaagaaatgaacaaaggccttcaagaaatgaacaaaggccttcaatagccatgactttacttttttaaatttaaatttaaattttttgagacaaagtcttactctcttgcttgggctggagtgcagtggtgtgactgtggctcactgcagccttgatctcccagactcaagtgattctcctacctcagtctctggagtagctaggatgacagactcacactaccacatgtgactttgtgtgtgtgtgtgtgtgtgtgtgtgtagagacagggtctcactatgttgctcaggctggtcttgacctcctgggctcaagtgagcctctcacttttatttttatttgtagtagagatgagatcttgctaatgttccccaagctggtctcgaactcctgagctcaagcaatcctaccttcctcggcctcccaaagggctgggattataggcgtgattcactgtgcctggcctagtttctttgttttaatttttttcctccccatttgtcttttgagtttccctgagaatctgtcttgctgctgtctcagttgtcattcactgttattacactggaaccctattgatgtagtggtaaggaattagggaggggaagtgttttgtaatctcatgattaaatgtcatttcttttttttttaattggtcctgagtccctgaattgtgactctcagaagtgtttcttagcccttgccctcccacttagatgagacaggaaggctataagcctcgggggttttctaattgtctttcctcttggtagataatggtgtgagcatatttgaatatagtttctttcctctcctcctgctcaaggcacaaggaaattttcctcaaatatttgcagtgaaaacatactaaaacccttgtaggattcctggaggtaaaacctaggaaagtgtaggggcccctctaagactgggatgtcaggatttttaaactctcaaactaatccatatttggcctccagaagttgtcagtttctacttgagtgtttctgttctaggaaagctgtgatattctgtatctgtctttctagttttttttggtggtggtttgccttgtgacctcagtttttggattgatctaagataaattactgattttcagttttctcagcgttttttcttgtcaggatagaagtgaggacctccaaaatccttacatattatagctgcctggtgagttttgtttgtttctttttttaaaaattttttttttttttttttttttttgggatggagttttgcgcttcttccccaggctggagtgcagtggcgcaatctcggctcactaaaacctctgcctcccaggttcaagcaattctcctgcctcagcctcccaagtagctgaaattacaggtgcccgccactatatctggctaattttttttatatttttgatagagatggggtttcgtcatgttggccaggctggtcttgaaatcctgacctcaggtgatctacccacctcggcctcccaaagtgctgggattacaagtatgagccaccttgcctggcccgttttttcttacttttagtaaaaataacctcacgtaaactgtcataggtgtctgtgggcttatttttgatgttctcctttgttggaaattcttgtgaaataccttccaggtcttagtctttgtgaggatcaggttctgctttcaattggatgttttaagaattagttttaaaataatttgtttttcttattattagcaccctatgtttagttgctgtacttatttggatagtgtggtaagcacagtggcttaggcatgagaaatataactagagatctcataattttatgtgtttataaagtgttttatttaaaaattaaataattgcaaatgagtggataaagaaactgatatatatatatctgattatatatatatatatctgattatgtatatatatctgattatatatatatgatggaatactacccggctataagaatgaatgaattaatggcatttgcagtaacctggatgggattggagactattattctaagtgaagtaactcaggaatggaaaaccaaacatcgttatgttctcgctcataagtaggagctaagctataaggatgcaaaggcataagaatgacacagtggcttttggggactcagagggaaagggtaggaaggagatgagggataaaagactacaaattgggttcatgtgtactgcttgggagatgggtgcaacaaaatctcagaaattaccactaaagaatttactcgtgtaaccaaataccacgtattccccagaagcctgtggaaataaaaaattaaaaaaattgcaaatgtaaataagacagtaacaaagatggcaaagaacaaagatgaaaaagtatgctgtattacctgaaagtgcttttatggatatcttagcttatccttcgtccatttaaatattgttagttttagccgggaacatgcctgtaatcccagcaccttgggaagctgaggcgggcagaccacttgagaccaggagtttgagaccagccaggccaacatggtgaaacccgtctctactgaaaatataaaaattagccgggcgttggggcgcatacctgtaatcccagctatttaggaggctgaggcaggacaatcacttgaacctgggaggcggaggttgcagtgagacgagattgtgccactgaactccagcatgggtgacagagtaagaccctgtctccaaaaaaaaaaaaaaaaaaaaaagacacaaaagagaaacaaaaaaaacatattgttagttttgatgattatctactagggtaagtacttttctactcattaaattccattagtgactgtgccttgatttccctgaaaggatgcagtatagagtaggcttttgattggagatagacttcctgattttccacttagtatttaggagtgaaaattattattattattatttattgttttttttttttttggagacagggtgtcactgtatcgcctaggctggagtgcagtggcttgatcctgactcactgtagccttgacttcctagggtcaagcaatcttcccacctcagcctcctgagtagctgggactacaggcacgtgccaccacagccggctaatttaaaaaaattctgtagagatgggatctcactatgttgttcaggcttgtctcaaactcttgggctcaaatcatcttcccacctcagcctccctaagtgctgggattataggtgtgagccactgcacccagccggaagtgcaaattatttaactcctttattttattcagcaaataaatgtctttctgagcctcagtttcctgtaataaggttcttataagttttaaatgaggtcagtgtgcattaaatgtacatgttagaatttggtaaggttagtaagaaaaccaaagacatgtggaccctttacaaaaaattccagcatttaccctaagagatgctttttaagtggttgaaatttggtggcatggaggaaatgtatatgggctcgtatcacatttgggagtaaaattaaggcatgaaatttaaacaaaaaataaaattgtgggtacatagtaggtgtatatatttatgggatttatgagattctgagacaggcatgaaatgtgtactaatcacatcatgtaaaatgggctgtccatcccctcaagcatgtatcctttgagttgaaaaacaatccaattttattctttcaggtattaaaaaatgtacaattaatttaatacagtaaataatacattaatttgatctcaaactcctgacctcaaatgattaattagattaattaatgtattatctattatttattatatacaccctgttgtgccatcaaatactaggccccccccccccttttttttttttggagacagagtcttgccctgtcgcctaagctggagtgcaatggtgcgatcttggctcactgtaacctccgcctcctgggttcaaatgattctgctgcctcagcctcccgagtagctgggattacaggcgcccaccaccaagcccagctaatttttgtatttttagtagagacggggtttcaccatgttggccaggctgctatcgaactcctgaccgcgtggttcgcccgccgcggcctcctaaagtgctgggagtacaggtgtgagccactgcgcctggccaaatactaggtcttattcatgctttccaactgtttttttttttgtacccattaaacgtcaccacatcttgccccccctcgcacttctcttttctttctactctgtgtctccatgagtttgttttgatttttagattccacaaataagtgagaatatgcaatgttggtctttctgtgcctggcttatttcacttagcataataacctctagttccatccatgttgttgcaaatgacgggatctcattcttttttatggctgaatagtagtccattttgtgtaactaccacattttctttatccattcatctcttttgatggatacttaggttgcatccaaacctggctattgggaacagtgctgtaataaacatgggaatgcaggtatccctttgatatgctgatttgctttatttctggtgtatacccaagcagctggattgctggatcatatggtagctcaatttttagttttataaggaacctccaaactgttcttcgtagtggttgtcctatttcacgttgttgccaactgtgtatgaggattttcttttctttacatcattgccaacatttgttattgcctgtcttttggatataagccatttcaactcaggcaagatggtatctcatggtagctttgatttgcatttctctgatgatcagtgatgtagaatgctttttcatatgcctatttgcaatttgtatgtcttcttttgagaaatgtgtatccacattttttgcccatttttgattggattattagatttttattctgtagagttgtttgagctacttacatattctggttattaatcgcttgttagatggatagtttgcaaatactttctcccattctttgggttgtttgttcactttgttgattgtttcttttgttatgcaaaagctttttaacttgatgtgatcccatttgtcaagttttgtttggttacctgtgcttgtggggtattgttcaagaaaattttgcccagactaatggcctagagagtttccccaatgttttcttgtagaggattcataaattgaagttttagataaaattctttaatccattttgattttatttatgtatagagcaagagataggagtctagtttctttttctttttttttttttgaggtggagtttcggctcttgttgcccatactggagtgcaatggcacggtctcagctcactgcaacctccgtctcccaggttcaagcgattctcctgcctcagcctcccgagtagctgggattacaagagcccaccaccatgcccgtctgatttttgtatttatttatttttatttatttatttatttatttatttagttttttgagacggagtcttgctctgtcacccaggctggagtgcagtggcacgatctcggctcactgcaagctccgcctcccgggttcacgccattctccagcctcagcctcccgagtagctgggattacaagagcccaccaccatgcccgtctgatttttgtatttatttttatttatttatttatttatttatttatttatttatttagttttttgagacggagtcttgctctgtcacccaggctggagtgcagtggcacgatctcggctcactgcaagctccgcctcccgggttcacgccattctccagcctcagcctcccgagtagctgggactacaggcgtccgtcactgtgccggctaattttttgtatttttattagagacggggtttcaccgtagccagaatggtctcgatctcctgacctcgtgatccgcctgccttggcctcccaaagtgctgggattacaggcgtgagtcattgcgccaggctaatttttgtatttttaatagagaccggatttcaccatgttggccaggctggccttgaactcctgacctcaggtggtctggccgtctcggcctcccaaactgctgagattacaggtatgagccactgcacccggcctggagtctagtttcattcttctgtatatggatatccagttttcccggcaccatttatttatttatttttatttattttatttttttttgagacagagtctcattccatcacccaggctggagtgcagtggtgtgatgtgggctcactgcaacctctgcctcccggattcaagcagttctcctgcctcagcctcccgagtagctgggattacaagctaatttttatattttgagtagagatggggtttcaccatgttggccaggctgatctcgaactcttgacctcaaatgatccacctgcctcggccccccaaattactgggattacaggcgtgagccaccgtgccgggccagcaccatttatttttattttattttacttatttttttgagagtgagtctccctatgttgcccaggctggagtgcagtggtgctatctcatctcactgcatgcagcctctgcctcctgcgttcaagcgattctcctgcctcagcctcccaagtagctgggattacaggcacccaccatgatgcccagctaatttttgtatttttagtagagacggggtttcaccatgttggccaggctggtctcaaactcctgacctcaggtgatccttccgccttggcctcccaaagtgctgggattacaggcatgagccaccatgcccagcctggagtctagtttcattcttccgtatatggatatccagttttcccggcaccgtttacttatttatatttatttattttattttttttgagacagagtctcatttcatcacccaggctggcgtgcagtggtgtgatctaggctcactgcaacctcttcctcctgggttcaagcaattctcctgcctcagcctcctgagtagctgggatgacaggtgtgtactaccaccatgcccaactaatttttgtatgtatgtatgtatgtatgtatgtatgtatgtatgtatgtatgtatgtatttgagacagaatcttgctcttttgtcgaggctggagtgcactggcacgatctcggctcactgcaacctccgcctcccaggttcaagcgattctcctgcctcagcctcctgaggagctgggattacaggtgcatgccaccacgcctggctaatttttttttcgtatttttagtagagatggagtttcaccatgttgcccaggctggtctcgaactcctgaccttgtgatctgctcacctcagcttcccaaagtgttgggattacaggtgtgagccagcgtgcctggccccagcaccttttattttatttattttatttatttttctgagagtgagtctcactgtgttgcccaggctggagtgcagtggtgctatctcccctcactgcaacctctgcctcctgggttcaagtgattcttctgcctcagccttccaagtagctgggattacaggtgcctgccaccatggctggctaattttttttttttttttttttttttttttagcatagatggggtttcaccctgttggccaggctggtctcaaactcctgacctcaagtgatccgtctgctttagccttccaaagttctgggattacagatgtgagccactgtgcctggccccagcatcatgtattgagcctttttcttttccccagcatatgttctcggcacctttctagaaatagaaaatgagttcaccgtagatgtgtggatttgtttctgagttctgtattctgtccattggtttatgtgtctgcttttatgccagaatcatgctgttttggttactataactctgtggtataatttgaagtctgataatgtgattcttccagttttgttctttctgcttagtatagttttgggaattctggaacttttgtagttccgtgtaagttttaggattgttttttctatttctgtgaagagtgtcattggtattttgatagggattgcattgaatctatagattgctttggatagtatggacagtttaacaatattgattcttccagtccatgaacatgaaatatctttacattttttggtgtcctcttcaatttcattcagtttgcttttcagattggtcactgtcgatgtttagaaatgctgctgatttttgtatattgattttttatactgacagtttactgaatttgtttatccgttctaatagtttttttgtagagtctgtaggtttttctaaatataagatcatatcatctgcaaataagggtaatttgacttcttcctttcccttatttctttctcttgtctggttgctgtagctaggacttccagtagtaccatgttgagtaactgctggaagtgggcattcttgtcgtgatctggatcttagaggaaaggcgttcagtttttcccctcagtttgataccagttgtgggtgtgttgtatatggcttttattatgttgaggtatgttcctcctaaacccatttttttgagggtttttatcatgaaggaatgttgaatattatcaaatagtttttaagcatcaattgatataatatggtttttgttcttcattctgttgatatgatgtatcacattgatttgcatatattgatcccctcttgcatccaagggataaactccacctggttacgatgaatgatctttttaatgtgtctgatttgctagtattttgttgaggatgtttgcagcaatatttatcagagatattggcctgtcattttctttttttgatgtgtttttgtcaggttttggtaacagggtaatactggcctcacagaatgtgtttggaagtattgcttccttttattttttggaatagtttgagtaggaatagtattgatgcaggaattttctcggcccctttgttggacttgtgacaggggcgaatgtttactcagcctgccgtgctcaaccccttgttggagggtgcatgtgagtgagtgagtgcgggacctggccagctggtgggggcactgacacagcagcaagccctgtgcagggaccacggccagaccaggcacaagcgagtgagtgtgggacccagctgttctgagcaccagcaggagcaggcctgtgcacagcacccaggttgatggggaggggggtggtgtctgtgaccccgaggcccctgagggggtgttaacagtgctcctttagttctgctgtctgctgatggctgtgtgttaacaagttggcctcttgccttgtcatgtggggtggctgccctccactggtgagggcaaagggctggtgtgacagtcttttttgggtacctgcactcagtgggtcctgagctcttgtctggcatccaagaagaatgaggttgagtggacacttgaaggatggtgaaggtgaagaattttattgagcagtgggaatggctcagtggagaggggagctggagaggggatgggaagggctgatctccctgaagtccggccgtttcttccctaagtcatgctgtctcctttcccaaagtttggccatcttctctccgaaattaagctgtttctctcctctctaccaactgaatctggggtctttataagcataggatcctctttataagcacaggatgggggcggggcaggctgtagaagttttggaaaaggcaacattctattggtaaagagacattattcaaacagaaccaatcgggagagagcggacaaacaggaatagaagttttcactttgggctgtgggtttcaggctttttggcttgaacgtggggtttcaccagggactgcccttgtcttcctagaatttctctgcctcctgcctctatcagtattagatcttctttaaatgtttggtagaattcagcagtgaagccatcaggtcccaggcttttatttactgggagaatttttattatggtgtcaatctcgttatttgttatagctgtgttcaggttgcagatttgttcatggttcaatcttggtagattgtgtctaggaatttgtccatttcttctaggttttccagttcattagcatatagtttttcatagtagccatgaatgaacctttttatttctgcagtattggttatcattgtaatgtctccattctcatctctggtttatatatttggatcttcttttttttttctttttttttttttactctggccaaaggtttttaaattttcttttaacttttacaaaaaccaacattttgttttattgatattttgtattattttctttatttcagtttcgtttgcttcactctgatctttattatttcttctaattttggggttggtttactcttgcttttcttattctttaagatgtgttgttaggttgtttatttgaagtatttcttcttttttcatgtaggcactcacagctataaacttcccttttagtaatgcttttgctgtatcccataggttttggtatgttgtgtttcagtatcatttgtttcaatgaattttccaattttcttcttaatttttgcattgacttactgatcattcaagaacatattgtttaatttacatgtatttgtatacttttcaaaatttctcattattgatttctagttttattccgttatcagaggagatgcttgatattatttcaatatttttaatgtcttaagacttgttttgttacttaacatatgttctatccttgagaataatccatgggctgaggagaagaatgtgtattctgcagcccttggatgaatttttctgtaaatatctattaggtccatttggcctctaatgcacattaagtctgatgcttcattgttggttttctttggaaggtctgtccaatgctgaaagtgggatattgaagtctccaagttttatcatattggggcctgtctctcccttttgctctaataatacttgctttatatatgtgagtgctccagtgttgggtgcatttatgtttaaaatggttacatcctcttgctgaattgactgctttatcattatatagtgaccctctttggcttttcctatagtttttgtcttgaaatctattttgtcttatattagtatagccacttctgcacttttttggtttccattggctttggaaaagatttctcgtaattctgtttgataaggacacatgttaggaggttttcaacacttcagtgagtagtaaacttgtaagtaaagcaggtatgaacagaatctcttgaattagtgaaaagtcaaaatcgttaattactgtttaatttaaaactgaaattataggtattaacaaataactatatgccttatactgtactttatttatttatttttccgagacggtcttgctctgttgcccaggctggagtgcggtgacgtgatcttggctcactgcagcctctgcctcccgggttcaagcaattttcatgcctcagcctaccgagtagctgggactacaggcatgcactggcacacccagctaagttttttgtatttttagtagagatgggatttcaccatgttgcccaggctggtctccaattcctgacctcaagtgatccacccaccttggcctcccaaagtgctgggattacaggcatgagccatcatgcccggccatataatgtactttaaacatgatgattttgaaactggaaacacacgcacatgtgagtaatttcttaaatggaattgaattaccttgaagaatcttagaaaaatgatgtttttaattttaaattagttttgcgtcatacatgtctttatttctcaaattttaaagaaaagtctatgaattaaagaaaataaaacttttcctgcatgaaagcaatgagtgtattatgtaccaaaaaggtagaagaaaaatatcttctgtaatattagctagatattacttactaaagatatttttggggtatatttattagcaatattttaatgcaattttaaacataattgtcatcatacttcatagacagtttatagcctgctatttttggttagcattgtagtatgagctattttccatattatttgaacttttaaaatttaatggttggtatgatattgtatgacttgtatgcatccttgtttacctagtctttattatacactttaattgattacagttttttttttttttttttgcttttgtgagcatctggcagataactttcttgagtaaagttattatgtagaaatattttctttgggccaggtgcggtggctcatgcctataatcccagcactttgggaggctgaggcaggtggaacatgaagtcaggagttcaagaccagcctggccaatatggtgaaaccccgtctatactaaaaatacaaaaatcagctgggcatggtggtgcatgcctgtagtcccaggtactcaggaggttgaggcaggagaattgcttgaacccgggaggtggagaggttgcagtgagccgagatcgaaccactgcactccagcctgggcgacagagcaagactccaactcaaaaaaaaaaaaagaaaagaaaagaaaagaaatactttcttactttctttgtatagataaagggagatagaattactagatcaaagtctcttgatggtttttgccaatttgttttgtaaatgtatgtatcaccacaggctatctatgagagtgtctatttcatggaaacttagcctacaatgaatagtcattttacccctaaatatttgataagttaaaaaatgctatcacatttaacatttcataggctttaagaagttgcagttttatattcatttcttcatgcattttgtgtactatttcaaaagtttctataggggaatgagagcaaagtaatgtgtttttcattatttattttgctaaccaaacatatttaattactaaccaaaaggatgatcctaattaagccaacacttggaattattttcatgtaaaatgtctgtgatagagataattgaatttaataatgaaaaaagtattacagaaatttgctcattaaactgagcttgttttcagctaatccttctgcgaagtgataatgactttttttttttttttttaaataaagatgggggctcgctatgttgaccaggctggtcttgaactcctggcctcaagtgatcctcccatctccgcctctcaaattgctaggaatacaggcatgagccaccacacttggtttaatagtggaatttttattacacttttttatggattcgaggagaggtggcattgtacataacacattctaccgctaattttccatctttcacttttctcattgtgctttccttcccattccgttcctggtgttgaaccaatgcatcatttgtaaatttgtagacagtctgagtttttctgccataatctgttgtttcttcagacttcttctctggtttataagaaaactgttgttttaaaactctcagttttgtattttttatttcttattatactttaagttctgggatatgtgagcagaacgtgcaagttttttacataagtatacatgtgccatggtggtttgctgcacccatcaacctatcatctccattgggtatttcttctaatgctatccctccccttgcccccaaccccccaacaggccccagtgtgatgttcccctccttgtgcccatatgttctcattgttcaactcccacttatgagtgagaacatgcagtgtttggttttctgttcctgtgttagtttgctgagagtgatggtttccagcttcatccatgtccctgcaaaatatatgaactgatcctttttttatggctgcatagtattccgtggtgtataggtgccacattttctttatccagtgtaccattgataggtatttgggttggttccaagtctttgctactgtgaatagtgctgcagtaaacatatgtgtgcatgtgtctttacagtagaatgatttataatcctttgggtatatacccagtaatgggattgctgggtcaaatggtatttctaattctagatcattgtggaatcgtcacactgtcttccacaatggttgaacgaatttatcctcccaccaacagtgtaaaagtgttcctatttctccacatcctctccagcatctgttgtttcctgacttcttaatgatcggcattctaattggcatgagatggtatctcattgtggttttgatttgcatttctctaatgaccagtgatgctgagctgtttttcatgtttgttggccatgtaaatgtcttctttggagaagtgtctattcatatcctatgcccactttttgatagggttatttgtttttttcttataaatttaagttctttgtagattctggatattagccctttgtcagatggataaaaaaacactatttttttaaaaaattttccaattcctcatcggtaaaaaagcagtaaaacattcatggtaatgatcatggcctatagttttttttttttttaagtgacattaggatttaaaactggtatgaaacctaatcatttattttagttagctaatatcaggatttagatttatttttttgacccaattgcagataggcagatcagatctcatagactgccatctgcctcaagctccttttgtagttatgtgaatgtgagcctgaaggctgaacccacttttctctaatggagatttttttttattacactttaagttctagggtacatgtgcacaacgtgcaggtttgttacatatgcatacatgtgccatgttggtgtgctgcacccattaactcgtcatttacattaggtatatctactaatgctatccctcccccctccccccaccccatgacaggccccggtgtgtgatgttccccttcctgtgtccaagtgttttcattgttgaattcccacctatgagtgagaacatgcggtgtttggttttttgtccttgcgatagtttgctgagaatgatggtttccagcttcatccatgtccctatataggacatgaactcatccttttttatggctgcatagtattccatggtgtgtatgtgccacattttcttaatccagtctgtcattgatggacatttgggttggttccaggtctttgctattgtgaatagtgctgcaataaacatacatgtgtgtgagtctttatagcagcatgattgataatcctttgggtatatacccagtaatggggtggctgggtcaaatggtatttctagttctagatccttgaggagtcaccacactgtcttccacaatggttgaactagtttacagtcccaccaacaatgtaaaagtgttcctatttctccacatcctctccagcatgtgttgtttcctgactttttaatgatcgccattctaactggcatgagatggtatctcattgtggttttgatttgcatttgtctgatgaccagtgatgatgagcatttttacatgtgtctttggctgcataaatgtcttcttttgagaagtgtctgttcatatcctttgcctactttttgatggggttgtttgatttttttcttgtaaatttgtttaagttctttgtagattctggatattagccctttgtcagatgagtagattgcaaaaattttctcccattctgtagtttgcctgttcactctgatggtagtttcttttgctgtgcagaagctcttgagtttaattagatcccatttgtcaattttggcttttgttgccattgcttttggtgttttagacatgaagtccttgcccatgcctatgtcctgaatggtattgcctaggttttcttctagggtttttatggttttaggtctgacgcttaagtctttaatccatcttgaattaatttttgtgtaaggtgtaaggaagggatccagtttcagctttctccatatggctagccagttttcccagcaccatttgttaaatagggaattctttccccattttttgtttttgtcaggtttgtcaaagatcaggtggttgtagatgtgtggtattatttctgagggctctgttttgttccattgttctatatctctgttttggtaccagtaccatgctgttttggttactgtagccttgtagtatagtttgaagtcaggtagcgtgatgcctccagctttgttctttttgcttaggattgttgtggcaatgcggtttaaccactctgaaaagatgtatttaaggacttttatctagactctatggtgaggtataacatagtgctggttgagtcagcttcaagtttttgtagagggaggaagagagtaacaaccatgtctggatttaataaaaagtttagcataagtaaatgtgtgctcttttgccttaagaaaatatttttcaatatataaaaaggattaatgagtgctgcctttcagatacttggtttggtgtgtttgaaacatcatttccaaagataggacatacacatttccagggatcatctctatgatatgactctagaaatgatgtagatttttaaaatcaatgtcagaacttatagacacaaatgtatgctttccttctaagtagtcactttgggagcccatatacataacagtggtgtcattcctgatgatatgttgggaactctcattttgtaaccagtttagaagtcatgcaagtaaataaatcttcaggattacttcagatttgggcaaaaaattagttttacccaacttgatcattttgcatttttcaccatatttgactctaagtgaaaactggctatttccaaaaatcatacccatcctgaggatgtgaagatatttttgggctgggcacggtagctcactcctgtaatcccagcagtttgggaggctgaggcagtagggttgtttgaggccagaatttgaagaccagcttggtcaacatagtgagactccctctctccaaaggaaaaaaaaaagtgaagttttttttttctttttcaaatgagtaggcagcattgtttagttatctgtttttttttcttttttttccactgttggacttctgtccattctctttatttgtttatttatttatttgagatggagttttgctctgttgtctaggccggagtgcagtggcgcgatcttggctcactgcagtctctccctcccggctcaagtgattctcctgcctcagcctcccaagtagctgggattacaggcatgcaccaccaggcccggctaattttgtgtttctaggggagacggggtttcaccatgttggccaggctggtctggaactcctgacctcaagtgatctgcctgtctagctcccaaagtgccggggttacaggtgtgagctaccgtgcctggcctgctgatcatactctcttgattttatttttgtactgtggtactgcggttgatggactgcactgatgttatccatatttttaaccttggtcacccacagtgtgaactcattaaatagctgactttgcaatttgattgctatgatttgggaatgagtgtggcagtcataattgtgcaggtttgctatcgtttcatttctagagaacttttctatggtgatctattgatgagataagatatagtatgacattatttattcctctttttgacttttggttctcaggaattttgggtgctgtgagttgacatgtagcatcatttcctcaggtctcattttctatctgagcacgattaaggacacagtgacctgatgataaatttttttgtacatctgactcttatctgaaagaatggttattggccaaatatggaaaccatacccacttggtacctttattctagaggcaaagtttgtttcaaaattttgtaaaacaaccctctccaccaaaagaaaacaaatacccacacaagatctctagttacggtgtctgttatatctcatttcttttccttccctaaatatactgagctattcttaactaaatacaggaaaattgtgcagaggaacacttactaagtgttcagtaaatgttttcatttttcttatgtgtatatctagaagtagaattgttgggtcattgagtaactgtttctgcgtaaatatctatacacgtgccatggtggtttgctgcacccatcaacccgtcatctacattacgtatttctcctaatgctatccctcccccaacccctaacaggccccagtgtgtgatgttcccctccctgtgtccatgtgttctcattgttcaactcccacttatgagtgagaacatgcagtatttggttttctgttcttgtgttagtttgctgagaatgatggtttccagctccatccatgtccctgcaaaggacataaacgcatccttttttatggctgcatagtattccatggggtatatgtgccacattttctttatccagtctatcactgatgggcatttgggttagttccaagtctttgctattgtgaatagtgctgcagtaaacatgtgtgcatgtgtctttatagtagaatgatttataatcctttgggtatatacccagtaatgggatggctgggtcaaatggtatttctagttctagatccttgaggaatcgccacactgtctgccacgatggttgaactaatttaccctcccatcaacagtgtaaaattgttcctatttctccacatcctctccagcatgtgttgttccctgactttttaatgttcgccattctaaccggcgtgaggtggtatctcattgtggtttttatttgcatttctctaatgaccagtgatgatgagttttttttcatatgtttgttggccacataaatgtcttcttttgagaaatgtctgttcatatcctttgcccactttttgttagggttgtttgcttttttcttgtaaatttgtttaagttctttgtagattctggatattagccctttgtcagatggatagatcacaaaaaagttctcccattctgtaggttgcctgttcactctgatgagatatatatatatattttttttttgctgtgcagaaggtctttagtttagttagatcccatttgtcaattttggcttttgttgtcattgcttttggtgttttagtcatgaagtctttgcccatgcctatgtcctgaatggtggtttgcctaggttttcttctagggtttttatggttttaggtcttatgtttaagtctttaatccatcttgagttaatttttatataatgtgtaaggaaggagtccagcttcagttttctgcatatggctagccagttttccaaacaccatttattaaatagggagtcctttctccattgcttgtttttgtcaggtttgtcaaagatcagatggttgtagatatgtggtgttatttctgaggcctcggttctgttccattgttctatatctctgttttggtaccagtaccatgctgttttggttactgtagccttgtagtatagtttgaagtcaggtagcatgatgcctccagctttgttctgtttgcttaggattgtcgtggccctgtggggtattttttggttccatatgaaatttaaagtagcttttttttccaattctgtgaagaaagtcagtggtagcttgatggggatagcattgaatgtatacattactttgggcagtatggccattttcatgatattgattcttcctatccatgagcatggaatgtttttccatttatttgagtcctctcttatttccttgagcagtggtttgtagttctccttgaagaggtccttcacatcccttgtaagttgtattcctaggtattttattgtctttgtagcagttgttaataggaattcactcatgatttggctctctatctgttattgttgtataagaatgcttgtgatttttgcacattgattttgtatcctgagacttcgctgaagttgcttgtcagcttaaggagattttgggctgagatggtggggttttctaaatatgcaatcatttcatctgcagacagagaatttgacttcctcttttccggattgaataccctttatttctttctgttgcctaaatgccctggccagaacttacaatactgtgttgaataggagtggtgagagtgggcatccttgtcttgtaccgggtttcaaagggaatgcttccagtttttgcccattcagtatgatgttggctgtggttttgtcataaatagctcttattattttgagatacgtttcatcggtacccagtttattgagagtttttagcgtgaaggagtgttgaattttattgaagtccttttctgcatctattgagataatcatgtggtttttgtcattggttctgtttatgtgatggattatgtttattgatttgcgtatgttgaaccagctgtgtatcacagggatgaagccgacttgatcgtggtggataagctttttgatgtgctgctggattcggcttgccagtattttattgaggatttttgcatcgatgttcatcagggatattggcctgaaattttctttatttgttgtgtctctgccaggttttggtatcaggatgatgctggcctcataaaatgagttagggaggattccctcgttttctattttttggaatagtttcagaaggaatggtaccagctcctctttgtacctctggtagaattcagctttgaatctgtctggtcctggacttattttgatcggtaggctattagttactgcctcaacttcagaactttttattggtttattcagggattcgacttcttccttgtttagtcttcggagggtgtatgtgtccaggcatttatccatttcctctagattttctagtttgtttgcatagaggtgcttatagtattctctgatggtagtttgtatttttgtgggatcagtggtgatatcccctttatcattttttattgcatctatttgattcttctctcttttgttctttattagtccggatagtggtctgttttgttgatcttctcaaaaaaacacctcctgaattcactgatagtttgaagggtttttcctgtctctatctctttgagttcttctctgatcttagttatttcttgtcttctcctagcttttgaagttgtttgctcttccttctctagttgttttaattatgatgttagggtgttgactttagatatttcctgctttctcttgtgggcatttagtgctataaatttccctgtacacactgctttaaatttgtcccagaaattctggtatgttgtctctttgttctcattggtttcaaagaacttctttatttctgccttaatttctttgtttacctagtagtcattcaggggcaggttgttcagtttccatgtagttgtgcggttttgaatgagtttcttaatcctgagttctaatttgattgcattatagtctgagagactgttatgatttccgttctttttcatttgcttaggagtgttttacttctaattatatggtcagttttagaataagcacgatgaggtgctgagaagaatgtatattctgttgctttggggtcaagagttctgtagatgtctgttaggtctgcttggtccagagctgagttcaagtgttgtatatccttgttaattttccgtcttgtcggtctgtctaatattgacagtgggttattaaaatctcccactattattgtgtgagagtctaagtctctttgtaggtctctaagaacttgctttatgttctgggtgctcccgtattgggtacatatatatttaggatagttagctcttctcgttgctttgatccctttaccattatgtaacacccttctttgtctgttttgatctttgttggtttaaagtctgttttatcagagactaggattgcagcccctggttttttttgctttccatttgcttggtaaatgtttctccatccctttattttgaacctatgtatgtctttaatttgtttttaaaattattatatccatcctacttagtataaattggtttcttgttgtggttttgatttgcatttccctgatatgactaatgatcttgagcattttttcatgtgcttattggccattggtatatattcttttgagaagtgtatatctaagtcttttccccatttaaaaaatagggttgtctttttgttgtttaattgtaagaagtctttatgtattctggttaccagaccctcatgagatacaggatttgaaaatcgttttctctcattgtgtttgctgtgttttcactttcttgatggtgccctttgacatgcaaaagttttgacttttattaaaaatggggctgggcatggtggctcacacttgtcatcccagtgctttgggaggctgaggtggaggatttcttgaggccaggagtttcagaccatcctgggcaacataactggaccccatctctacaaaaaattaaagaaaaaatttagctaagagtatagttgtgtgctgcacttcctcaactaagaacataggtgtgtgccacaggtactcaagatgctgaggcgggaggattgctttagcccaagagttttgagacctcagtgagtcaaggtcacgccactgtgctcaagcctgtgtgacagagcaagaggctaactctaaggaaaaaaaatggggtaaacttatactttccttatttaaagttttaactccttaaaaccctgttgaattacagatacatctattatataacttaagagttgatgctataggctgggcacagtggctcacgcctgtaatcccagcactttgggaggccgagatgggtggatcacgaggtcaggagatagagaccatcctggctaacacggtgaaacctcgtctctgctaaaaatacaaaaaaattagccgggcgtggtggcgggcgcctgtagtcccagctacttgggaggctgaggccggagaatggtgtgaacccgggaggcagagcttgcagtgagccaagatcacgccactgcactccagcctgggtgacagagcaagactccgtcttttaaaaaaaaaaaaaaaaaaaaagagttgatgctataaaacttagttaatgaaatatttccctgggcgatggagctcttgcaagtcctgttgtattttttgttcatctttatgccagtcagttagacagttcttctatgtcaagcagaggatggaataataaaccaaaacactgcttagggctttcagagagtaagtgttcagtaaatatattcgataaattactgaattatttttttaaatgatggaaaggaaaatcttgccctctctttttctgggtgttggctagtataaatctttcttgaagtgataatctacatctatgttttgatttctaaggatttcccaaatataagctatatataagtgagaggaaataataacttaggtgcctaatgataatatgacaagataagtacaagggtcagctatttgttgtgaaatagcaatggatataatttaaatatgaatacctttttgctgtttaatcccccaaattttcttttgatttcttttaaaattcttttgtggtaggtaggtttattgtttcttaagaattaacttaagggtagtattttctgatacatttttaagtaacatgaagtttaacttctgtttaaacacatcatatagagtacattgaaagacctcagtattttcgaaatgtttagtaagtaatatcagcagtttccttaaatgatattttaatcctaggtaagtgtacaggtaggttgtgttactcatatttttatattcttagtgaaatagaattcttttttttttttttttttgagacagggtctgactgttgccttggctagagtgcagtggcatgatcttggctcactgcaacctctgcctcacaaggctcaagccatcctcccacctcagcctcctgagtagctgagaccacaggcatgagccacccatgctctattatgagccaccacacctggcctaaaattcgttttctttaatattttttctttctacacccacaactgtaacatttcccttagtttttactttgaatgtgcatactcttacacgacttacagtatggctatattttcagtttgctagagctttacaattaatttaaaacatgaaaggctaattaagggaattctttaaattttgttttaatagtgaaagcaagttgaatacattggtgcagaagcttcatgacttccttgcacactcatcagaagaatctgaagaaacaagttctcctccacgacttgcaatgaatcaaaacacaggtaaattgaaaaagaatgtgctataccttctagtcttttttctattttttttttacacttatggaggtaaccatttattttattcagagagcagcttttaaaagagatttcagtttgtggaaaatgacagattagcaagctttatagaagcccctattatgtatcttagctatatctgatacaggagattttaattttggtaagtatgactatagaaagcttagaaaaggaagcatttatggttttatatgtaatggaaatgtgttatagaatggctagtgaatgttgactgtgaaaaaatagtattagaagaggcaggagtagtataggaatgttttgtcctagcaatcattcatgtattaggagttaaatttttatttttatttttgtgatggagtctcgctctgtcacccagtctggagttcaatggcatgatcttggctcactgcaacttccgcctcttgggctcaagctattctgctgcctcagcctcctgagtagctgggatcacaggcgtctgccaccatgtttggctaattttggtatttttagtagagactgggtttcaccctgttggccaagctggtctggaactcaagtgatctgccctcgttggcctcccgaagtgctaggataacaggcatgagccatcacacccaacataagagttaaatttttatgttgtttgataatatccctgagtagatttggtgtatttattttttaaaataaaaccacttaacacctcctctctacctccctgtctctctcttttaaaaagatatatatatatatatatatatatatttttttttttttttttttttttaaagagacgaggtcttgctttgtcacccagactggagtgtagtggtgtaatcatagctcactgcagcctcagacttcttgggcttaagcaatcttctcacctcaccctcccggtagctgggattacaggtgtgtgccaccatgcctggttaatttcaaaaaaaaaaaaaaaaaaaaaaaaaaaaaaaaaaatttttagagacatggtcttgctatgttgtccagactggtcttggacttcctggcctcaaatgattctcctgcctcagcctcctgagtagctgaaattataagcatgagccattgtacctggttcccttttttaaaaaacattttgtatcatgtgacagttagcattttcaggttttcaagggtaactacaatacacatgcacacagacacacacaatatgtacaaaaaaagtataagagagttatagtgaaaagttcaaccatatgtgtaattagagttctagaaggaataaagagacttggttaaaagtcctatttggagagatacgggctgagcattttttaaaaagtgatgaaaaacatcagactagagattcaagaagttttgtgaaccctgaacaggataaatataaagaaaactacagctaggcatgtcataaccaaactcctaaagaacataaaccgagagaaaaatatcttaagtagccagaggaaaaaaatacattattttcaaaggaataacagtaacactggcagctcacttaacaacagaaatgatagaaggcagatgacaatgaaattatttctttaaaatgtcaaagaaaagtgcagtcatgcatcacttaactatgggataggtttttttgagaaagcattgttgggtgattttgtcattgtgcaaacattatggagtgtccttacataggctactacacacctaggctatatgttatagcctgttgctcataggctacaaacctgtgcagcgtgttcttgtactgaatacggtaggtaatcggaacacaatggtaaatatttgtgtgtctaaacacatggaaacatagaaaaggtacagtaaaaatacagtattataatcttatgggaccaccgatgtatatgtggtcagtcattgagtgaaatgtctttatgcagcatgtgattgtaattgccagcatagaactgtatattcagtgaaaacatccttcataaatgaagggtggaataaggccatatctgggcaaacaaaaagtgagaacttgatgtcaacagacctacactggagtgaataactacactagaggaaattacaagttttctgaaatgagaaagaaaataatttgaaatggcaacaccaaaatacaggaagtaatgaataagaatgggaaagctaaataggtaggtaaactaaataacataaagttatttaagccacagtccctattcttatttcatcaattaccccagtagtgttcacagataagtttttcccccttaaattcaggatccagttcaagatttagtagtcctgtttctttggttttttaaaaatctgaagcagtttgtctgccttttgggactatgactttttttgaaatgtacaggtgtgttactttgtgaaatggccctcaggattatctgtttagttatggttagattcaggttatacatttttggcaggaatactacataaagtggtgttctgttctccatgcatcctgttacatggcacatgatgtgatttgcccctttactggtgatgttaacttaggttgtttggttatggttgtgtttgctaggtaaacccagtctaaagttatgatttattccattgtaactaataactaatttaatggggggcactttgagattactaaggtattctttttattatcaaaacttaatatgttttcttttgcaaatgaccacaaagtttgcagcttaaaacaacccaaatttgttattttacagttctgtaggttcggagtccggtgggccttgctggacccttctcgggctatcacaaggtcaaagtcaagatgttagtaggactaggttcctttctggagactgtagaaaaatccattcctaagctcattcaggttgttggcagaattcagttctttatgataatcggttagaggtccttctttctcactcactattggccaagaccccctcctagttcttttcaggtgtcttcatttcttctcacgtgatgccctccatcttcaaatccagcaacagcacatcaagtctctctcaagctttgaagctctctgacctagctttttgcttgctaattctgctgccacctgctaccagctggagacatttttctgtttttaaggattcatgtgattagattaggtccctctccctctcatctcctcctgattatctcttgagtttaagatcaactgtgccatattacataacacagttatgggagtgatatgtcatcacattgataatttctggggatttgcggtgtagaatcttgtgggccattcctagaaggtctgtttatcacagcatacatttgtgattcttagctgaataatttattcctatgatgggttcaaaatggtgatgttctaacttgtctttccttctatgtttattagttgatattttattgtaagggaggggttcatgttctaacctattcaattatttgtatcagtatatacttacaattttttccatgaatattctctgtcattatttattttgatcctgaaattgtatcagttttggctagtaggagcctcacctggatggctcctgctgacctttttacaaatccgcatcatttcttgaacactttctttctgtcccttcaaagtattcaaggcttgctttccattctctgttccccagccctacaatcagttattttttgcaagagttctgattccttttagtgggatatagtgtttagaaatcaagatcagggtgtgtgatgtgctcattgccaccaagatgtctttgtttccaagctctttcacagagaaagccaataatatgttttatattttcatgagttgatactgatacttttaattcaattccagtcttctttctagacttccccttttcatgtttttaacttctttctccaacagaaagaaacctggttcctattatccccaatttatttatttttatttatttattctttttgagatggagtctcactctgttgccaggctggagttcagtggcgtgatctcagatcactgcaacctttgcctcccaggttcaagcgattctcctgcctcagcctaccaagtagctgagactacagtcatgcgccaccatacccagctaatttttgtatttttagtagagacagggtttcaccatgttggccaggatggtcttgatctcttgacttcatgatccgcctgcctcgacctcccaaagtgctgggattacaagtgtgagccactgtgcccagcctatccccagtttatttatttatttttatttttatttttttgagatggagtctcgctgtgtcacacaggctggagtgcagtggcgccatctcagctcactgcaacctccgcctcctgggttcaagcgattctcctgtctcagcctcttaagtagctggaactacaggtgcacaccaccgtgcccagctaatttttgtatttttagtggagacggcgttttgccatctctggatggcaggctggtctggaactcctgaccttaggtgatccacctgcctcagcctcccaaagtgctctgattacaggcgtgagccaccaagcccggcctttccccagtttatttgtattcatttttctagtcctcattgtacccacagtttcagagttgttaaccatatcatcgcattaaagaaacgtaactatagttcagtatttctttaaagttctttttgtctttagaatgatgttacgttgtcggagtcctgtgttcactagttgaggaactccttcagtagtggtatctccagttggacaaacagatgtcactcacaaataccaattgtaaattctgggcagcatactgaaggctagatatcaacaaagtagataaactggaggggagtcaacacatggaagaagaagtggcaatggctgaattccccattgttaatcctttttgcttcagccaaggatcctcttagctccatctgtggcctttaagacttggataaaaatctacagtcttattggatgtgaaatcaaggaaaaaatttagggagaccacagcagctgtaacatgagtagagagatcccatctagaaaagagccacagaatgggaaaaccagattgcacgaaaactctcccaatagctctggtcctgttgcctaagtgcactccagattccaaccagcctggttaggactaaaagaacagaacaaaagctttgagttgtttggtactacagggtggaaagggtttggagtttcatttcaagtaagttaactatctgtttgtttggttggttggttttttttgagacaggttctttttctgttgcctaggctggtgtgcagtgatgccatctcagctcacagcaacttccacctcccgggttcaagtgattcttgtgcctcagctttctgaatagctgggattacaggcacctgccaccacgcccagctaatttttgtatttttagtagaggcagtgtttcaccatgttggccaggctggtcttgaactcatgacttcaggttatctgcctgcctcggcttcccaaagtgctgggattacaggcgtgagccaccacacccagcccagttgactttttatgttggccttgtatcctgtgaacttgcttaacgtacttattagttctaaatagtatttttccccctcttgtagattctttgggattttctacttagacagttatatcacctgcaaatagggatagttttattttttcctttccatctgtataccttttaatttcttttcttgcttcattatattagctaggattttctgtattttccagtattacattgaagaatgatgatgatagcagacatcctcttagtgttaccaattttagtgggaaaacattcagtctttcacagtgaaggatgtttgctttataggtttcttgtaaatgccctttatcaagttgaggaagttcccctctattcctagtttgctgagaatttttttaagcttaaatttctatttgatttctatttgtaattataaattcacatgcagttgtaataactaatatagagagagctcttatgcactttggcagtttccctcaatggtaacatataaaactagaatacaatatcacaaccaggaaattgacattgataaaatctattaatcaagattttgtcagttttactttgtgtgtgtgtgtgtgtgtgtgtgtgtgtgttaaagttctatacattttttttttacctgggttgattcatgcatctaccaccacagttgagatacagaatagttcatcaacacaggattcctcatcttggcattttataatcacacccacttccctccgcctacctctgcctatgcttaacacctggcaaccactaatctgtcttccattttgaaaattttgtcatttcaaatatgttaaataaatggagtttatagtaaataatcttttggggttggagtgttttcacttggcataattctgtggagattcattgaggttgttgtatgtatcaacaatcctttccttttaattgcagggtaatattccatggtatggatgtacagattgagtatccttaaccccagaatcagaaatctgaaatgttccaagatcggaaacttttgagtgctgacatgacactcaaaggaaatgctcattggaacatttgggattttcagattagggatgctgaatccctaatgtgaataaaccagaatagtgcaaatatgctagaatctgaaaaaatccaaaatttgaaacacttctggtcccatgcattttggataaggaatacgcaacctgtaccacagttgtatttgtattgttttttttttttttttattgaaatggagtcttgttttgtcacccaggctagagggcagtggcatgatcttgactcactgcaacctccgcctcccaggttcaagtgattctcctgcttcagcctccggagtagctgggattacaggcaagcgccaccacacccggctaatttttgtatttatagtagagacgaggtttcaccatgttggccaggctggtctcgaactcctgacctcaggtgatccacccacctcggcctcccaaagtgctgggattacaggtgtgagccaccgcgcctggcctgtaccacagtttgtttaaccatttatttgttaaagcaaatctgggccgattcctgatttcagttgttacaattaaagctggtggtgaatatttatatatacgtttttatatgaatttatgttttcatttctttgcaataaatgccaggagtgcattttgcagttcatatgatggttacacatttatttttattaaattaattaaactacatttacattttattttattttgggtagagacagagcctcactgtgttggccaggcttgttatgaactcctgacctcaggtaatcctcctgccttgtcctctggaggcccttggattacagacatgaatcactgcacctggtttgcattttttttttttttttactccattggactctatcagtgcttttatttatttattggtatttatttatttatttattttaacttttaggttcagtggtacctgtgaaggtttgtcacataggtaaggtagcatcactggggtttattgtttagattatttcatcacttaggtattaagcccagtacctaatagttatcttgtctactcttacatgttcatttttttaaaagaaactcctgaactgttatccagagtggttgtactgttttatattcccacagcaatgtatgagtgatccagtttctccacatccttgccaacactgggtgttaatactatttttaaattttagccatttgatatttatggtatctcattgtggttttaatttgcatttacttaatgagtaataaattctttttaaatagaaacaggatattgctctgttgcccaggctggagtgcagtggtgcaattatagctcactgcagcctcaaactcctaggctcaagtgatcctcctgcctcagcctctcgagtagctgagactgcctcagcctgtcgagtagccaagactacaggcacatgccaccatacccagctaattttttaatgttctgtagagacggggtctggctctgttgcccatgctggtctcagactcctggcctcaagcgatcttcccaccatggcctcccaaagtatttagattacaggcatcagccactgcatctggctggtaataaaacattaaacatctttattgaaatataatttacatgccatacaattaacccatttaaagtataaaattcagtggtttttagtatattgaatatttacacatatgtacaaccatcaccaccatcaattttaaaatatttttatcacctcaaaaagaaactccataccctttagctatcaccccctagctctaagaaatcactaatctagtttcttgttttgagttttttatttttatttttatttttattttttttttgagacagagtctcgttctgttgcccaggctggagtgcagtggctattttggcttactgcaacctctgcctcccaggttcaaatgatttttgtgccttggcctcccaagtagctgggattataggcgtgcgccaccacacctggctaatttttgtattttttagtagagacagggttttgccatgttggccgggctggtctcaaactcctggcctcaagtcatctgcccacctcaggttcccaaagtcctgggattgcaggcgtgagccactgcgcctggcctatttccctattttggactttcatatgaatggcatcatataatacgtgtttttgtggctgatttctttcatttagcgtaatgtattcaagatatctgttgtaacatgtcttagtactccattcctttttatggccacataatattccattatatgtgtataccatatttgtttatccatttatccattgatggacatttgtcttgttcccatgttttggctgttaggaataatgcggctgtaaatattggtgtacagttttttgtgtgtagccatatatttttgtttatcttgtgtatatacctaggaatctaattgctggatttatatggtaactatgttaaattgtttgaggaaatgtcaaactgttttccaaagtagagatactattttacttttccaccaggagtatataaagattgtgagttcttcacgtccatgccaaccattgttaataacagactttttgattctagccattctagtgcatgtgaagtagtatctcattgtgattttagttttcaactgcctgaagggtaatgatgttgaacatcatttcatgtgcttatttgtagtttgtatatattccttggagaaacttctattcaaaccctctgtccagtctttttctttttgacagggtcctgctctgtttcccaggctggagtgcagtggcatgatctcagctcacagcaccctcaacctccctggctcaaatgatcttcccacctcagcctcccgagtagctaagactatgggtgtgtgccacagtgcccagctaatttttgtttattttttatagagatggggtcttaatttgttgaccaagctggtcttgaactcttgtgcttaagcaattcacccgcctcggcctcccaaagtgctgggattacaggcgtgagccaccgtgcccagcccctttgcccatttttaaaatgggtatttatgctttcattgttgatttgtaagaattctttatatattctaaattttttattgtaaaatatgcataacataaaaattgccattttaactaattttaaatgtacagtcctgtaacgttaagtaaaattgttgtgcattcaccaccaccatccatgtctagtactttttcatcttccccaagtgaaactctgtacccatcacatactaactccccaatcttccctctccttagccttgcaaacaccattctacattctcttcctaggaatttgactactctaggaacttcatatacgtataatcctacaatatttgtccttctgacatattttacttagcacaatgtgttgaaggttatccatgttgtagtatatctcaaaatttcatttcttttgaagtctgaataccattccattgtatgtatataccacattttgtttatctattcatatttcaatggacacttggataagatatataatttggaaatattttcccctattctttgagttgtctttatttatttttagagacagggttttgctctgttgctcaggctggggtgcagtggcaagatcatagttcactgcagccttgaactcctgggtacaagcaatccttccatctcagcctcccaagtagatgagactatagttgtgtgccaccatgtctggctagtatttttttttttttattttttagagatgaggtcttaccatgtagcccaggctgagcttgaactcctggcctcaggcgatccaccttggcctcacaagtagctgggattacaggcgtgagacactgcacccagttgggttgtctttaattgaagcacaagttactaattttgatgaacttttatttatctgtttttccttttgttgctcattcttttggtgtctttaagaatccattaccaaattgaaggtaatgaagatttacccccatgttttcttctaaaagttttatagatttagttcttaaatttaggtctttgatctactttgagttaatgttttgtatatgttgcgaagtaggggtccagcttcattttttgtaggtttctaaccagttgtctcagcaccatttattgaaagacaattctttcttcattgaatggtcttgccacccttgtcagaaatcagtgggactgttgggcatggtggctcatgtctgtaatcccagcactttgggaggccgaggtgggaggggtactcgggcccaggagttccagaccagcctggacaacacagtgagactccatctctattaaaaaaaaaaaaagccaggcgtagtggtgtgtgcctgtagtcccagctacttaggaggctgaggcagaaggatcacttgagcccaggagactgaggctgcagtgagccatgattgtaccactgcaccctagcctgggtgacagagtgagatcctgtctccaaaaaaaaaattaaaaaaaaaatcagctggtcatagatatatgggtttatttctggactcttaattctgtttgtccttttaccagtactccacggtcttgattgcattgttttacagttttgtgcaaagttgcaccaaagttgttgtgtagttttgcaaaactggcaatcaagtctgtgcagtactggcaaaattaggaagtgtgagtcttcatacttttcatttttcaaaattatctgcctattctgaatgttttcaattccctatgaattttaactctttgttttttcttggtagagatgaggtttcactatgtttctgaggctgttcttaaacttctgtcctcaagtgatccttccaccttggcctcccaaagtgctgggattataggtctgagccaccatgcctggtccatatgaattttggaatgagcttgtcaatttttacaaagaagtcagctgggattctgacagagattgcagcgtgtctgtagattagtttgtggagtattggtgatggcagcggtgggccgtctggagtggctgctgccatcacactggctgcagcagggagacgtggccagggctgcacggtctatagagttggtgggagccaggggcaagcaggagccctgccccttccaagttggagctccctgggtcctgctgcagctgcctaagcatggctgtagacctgggcatccctgtgctcttgagtcttgggagcaggctggagccccaccctcccaggtgcaactgcagctggccaaaccgtggctgcagtcccaggcctctcattccatggagcaggcaggagacccaccctcccgggtgcagctgcagtctcccaaactgcggctacagaaccttgccttctgctccacgagcaggcaggagccctgggtgcagcaggagccccgggtgcagccgcagccacccaaaccatggctgcagatctggtcctcctgctttatggagcaggctggagtcccaccctcctgggcacagctatagctgcccaaattgtgggtatagacctgggcctcctgctttatggggcaggcaggagccctgccccactgggtgcagctgcagccacccaaatcatgggggggctgcagacccaggtgtctctgcactcttggggcctgggaaggccccccttgctctcataggcttgggagtgcctgctcctgctgcctggcttcaccctgctattggcacctgctctgatcttgtggcaaagttggggccgagcctgggtgctgtcgtagcctggccaggtatccacatgcttggggaactgctgacatgccagccttctgctgccttgaccccctctggactttgggtactgacaaacatagggaagctgaggcagggctgagggcagttcagcactggcctgcaggtgcccccttgcatctacagcctgggcaccatgaatggcagcaggaggtagacaggttcctcagtggaaggtggcaggtccctggtgaggacccaccttcaggccagggaaagcctgaaggctggaggttgggctgccagttgcatggatcagagtgggaacttgtggtgccttttctgggcctgcctgtggaccaattggcatgcacatcctcccctctgaggcccataaaaaccccaggctcagccagagctgaacagatgtcaggatgaccagctgcagagaggagcaacccactctagggcctcctctctgctgtgagctgcagaggtgacaagatgaccttcctgcaaagaggtgccacacattctagggcctcctctttgctgagagctgcagagacgatgggtcgactttcctgcagagaggtactactcatactagggcctcctctctactgagagctgcagagacgaaggagagatgatggggagatgatgggatgacctgcctgcaaagagaagccacccactctcaggcctcctctctcctgagagctgtgcagatgacgggataatcagctgctgagaggagctaccctctctgctgatagctgaacacttgtagtaacgacttgcctagcagagaagaaccaccctctctgctaggagctgaacacttgtagtaatgacttgcctagcagagaagaaccaccctctctgctaggagctgaacacttgttgggataccttgactgtggaaaggagctgccccctttgggtttcctctgagctgttctattgctcaataaagcccctctttatcttgcttactctccacttttctatgcacctcattcttcttgggtgcaggacaagaacttgggacctgccagatgaggctaaaatagctgtaacacaaacagggctgagacatgccccttgctcaccttgttgcaggtgaagagaaggaaagaagagctgcagccctctggggagcccagacctgggagctccccaagccagggctgtgactccctctttggggccctgcctgcggttcctggtgtctccaaacttctgggtgccaccgtgttccctggtgccagctgtggatgctgcttgtggtgttcatggtccagctgcagcctcacagagaaagagctgatgcccatgctggcacctggagctgcgtgccctgctgcagctgccaggatgtctgattgcgcagtgaccggaccccacacttgctcacataccccttgctgcttcatccagtcttccttggctatcataggacacaggccagtagcatgagccgagtgtagccggccaggccaaataggcgggacaagcccagcaggcctgagcaaaactctggcacaggtgccaccagccgcagatgtttctggccagaaaagtgacaccccaaagattctgtaacactggcatcataagaatgataaatcttatggcttggcctggtggctgaaggaattgtgtactttaaatgggtaaattatatggtgtgtaaattgtatctcaaggatgtttaatgttttatcactggcgaggtgcggtgacttatgcctgtaattccagcactttgggaggctgaggtgggaggattacttgaggacaggaatttgagaccagcctgggaaacatagccagaacccatctctacaaaacatttaaaaatcagccaggcatggtggcatgtgcctgtagtgccagctaatcaggatactgaggcaggaggatcacttgagcccaggaatttgaggcggcagtgagctataattgcaccactgcactccagcctgggcaatagggtgagactctgtccctagtaaaaaaaaaatgttatcttctaattcatgaacatgaagtgtttttccattgatttaggtctttaatttctttcaatagcgttttataattttcagagtatgttttgtacttctttttttttcaaattatttccttctaattctgttataaatggaattcttttcttaatttcattttgagattattcattgcaagtgtatagacataacattgatttttgtttattgtccttgtacccatcaatcttcctgaactaattttattcccatagttcttttattattattattattattttttgagatagtcttgctctgttccccaggctggggtgcagtggtgcgatcttggctcactgcaacctctgcctcccaggttcaagcaattctcttgcctcggcttaccgagtagctgggattacaggcacctgccaccacgcccagctaatttttgtatttttagtagagacagggttttgccatgttggccaggctggtcttgaactcctgacctctggtgatccgcctgcctcggcctcccaaagttttgggattacaggcgtgagccactgcgcccagcctattccaataattctttagtggattccttaggatcttctatgtatgagataatgtcacattctaataaggatagttttattttttatttttttttgagacagagtctcgctttgttgaccagggtggagtgcagtggcatgacctcagctcactgcaacctctaccccctgggttcaagtgactttcctacctcagcatccctaggagctgggattacagggatgcgccaccacacccggcaaatttctgtacttttagtagagatggggttttgccatgttggctaggctggtcttgaactccggacctcgggtgatccacccgcctcagcctcccaaagtgctgggattacaggcatcagccaccgcgcctggccctctaataggaatagtttcataccttcattttaaatactgatgactttcaatttttttttttaacatgcatgctctgagtagaatccgtagtgcaaagttgaatagaaatggtgagagcagatttccttgccttgttcctgatcttaagggtttcggaaagcattcagtctgtcgccattaagtatgatattacctacctgtgggtttttgtagattttaaaatttcctttcttccttaatttattagaaaaaagatttttttttttttttgagacggagttttgctcttgttgcccaggctggagtgcaatggcacaatctcggctcactgcagcctccacctcctggattcaagtgattttcctgtctcagcctcccgagtagctaggattgcaggtgcatgccaccacgcccagctaatttttgtatttttagtagcaacagggtttcatcatattggtcaagctggtctcgaactcctgacctcaggtgatctgcccacctcagcctcccaaagtgctaggattacaggtgtgagccaccacacctggccagaaaaaaaagatatttttaaagagctgttttaggttcatagcaaaattgagcaaaaagtacagtgagttcccatatgtccctgcttccacacatgcacagcatctcccactatcagcattccgtaagagagttgtacatttgttatataacgttgatgaacctacattgacatgtcattattaccccaaatgcatagtttatgttaaggttcactcttggtgttatacattttaaagatttttgacaaatatataatgacctgcattcaccattgtggtatcatacagaatagtttcactgccctaaaaagattcctgtgctgtgcctgtttcttcatccctttctcccctgtgagcactggcagccactgatctttttactttctccatagttttgcctttttcagattgtcatagttgtaatcatatgtatgtaacctttccagactggcttctttcacatagtaatctgcatttgtttcctccatgtctctttgtagcttgatagctaatttatttctagtgctgaataatattccattgtctggatgtactacagtttgtttatccattcatcttctaaaggacatcttggttgcttctaagttttggcagttatgaataaagctgcttataaagatatttatataagtaaatgaagatgtttacataaaataaagacatttataaatatctccatgcaggttattttgtggatgtatgttttcagcttctttggataaataccaaggagtgtgattgctgctttatatatggtatgcttagttttgtaagaaattgctgaactgttttcctgagtggctgtatcattttgcattcccaccagcaataaatgatagtttcttttgctccatatgcttctcagcagttttgatgtagtcagtgttctggattttggctattctaataggcatgcaggggtatattgttttaatttgcaattccctaatgacatgttgagcattttttcatgtgcttatttgcgtctgtatatcttttttggtgaggtgtctgttcacatatttctttttttttccttgctttaaaatcatgttgtttgttttattgttgagttttaagcattctttgtatagtttggataattgtcttttatcagatgtgtactttgtgaagattttctcccagtctctagcctgtcttctgatttgaagttttctaatatttttgtggacttttgcatctatattcataagtgatacttgcctgtagttttctctatttgtgatatattttttatatcagggcaatactgttttcataaaatgagttgggaaatgttgcctccttttctgttttttagaagagtttgtgaaggattggtattagtccttttttaaatgtttgttataattaagtggtgagaacatttgggccttttctttatgggtagctttttttattgctaatttaatctcatcaattgttacaggtctgttcacacctgtttcttcttgagtcagttttagtagtttgtgttttggaatttgttcatttcatgtaagttatttagttttttggcacacagttgttcatagtattcctttataatccgtttatttcagtaagattagtagtaatgtcctctttttcatttctgattctagtaacttgagtcttgtttcttttttttcttggtcagtctaccctaaagtttgttcatcttttcttcccccacaggtaagttgttacacaatccctagcagattccaactttcatggccaaggtcctctttgatcatctttttaaaaaattagtttttggccaggtgcctgtggctcacgcctgcaatctcagcactttgggaggccaaggtgggcagaccacttgaacccaggagttagagaccaggctgggcaacatgacaaaaccccatctccacaaaaaattagccaggtgtggtggtgcgcgcctgtagtcccagctacctgggaggcttagaggggaggatcacctgaacccgggaggttgaggctaaagtgaaccatgatagcacctctgcactccagtatggacaatggagtgagaccctatctctaaaaaaaaaggaggaaaaggaaaagaactactctttggttttattgattttttttttctattgcttttctatttcctatttcattagtttcatgaatttctgccataatctttattatttccttctccttgattttggtttagtttgctcttattttcccagtattttatggtaaaatgaaatatactttattggtagtatgttttttatttttagtgtaatagtttaaattttcttctgctgggaaatgtcttgcaatatttataaactacaacaggaaatgtttttataccaaagtaatctttacagagatttcatgctttataaggaggggttagtatgcaaaaggagagtgattctagtgaaagaacacttctaggaatattttaatgtgagtagtatgttaacaatactgccagacttcatagtgtgagaatgggtttgtggagttataggtattgatgttctgtttgataatgcatcgaagagataaataatgttctttatttcttcttttttagataaaatcagtggttctggaagtaactctgatatgatggaaaacagcaaggaagaggtaaggataattatttagagatatttgttagttacgattaaccaagtagagcatatgtctttagattgcttctggacacatgtatgtgtcgaaggctactgatacccagttgtcattatacttcagtttcgttgttttccagtttgagaacaggtgttcattgtttctgttattgttgtggttcacttcagtggtttacctaaagtcagacaactgaagacttccaacagatagatattaaactgtctttatattgccccaaaggtgtttgaggtggatgttaagggcatgaactccatggttgtgaaatctctcaaaacttggtatctagagtctgctaagcattattatagcaactcataacaaggtcctttgcctgatacacaggtccacaactgtggttttgggaattttttgacctactgtaaaaaaaaactgaatccagtaaaatatattgattatactggcaaaatgagggtaagtttagtatctcaaagcaagttgtagaagttacttcatgccatatgttagcttagagaagaatgaaacatatttagatccttgaaactccctacttctcttgagatctgattacttctgcatctttgttttgtctttgttgactggggccatgatcattttgcagcagtgtattccccgcagcatgccacagcaaccatgtaaaaaacgagaaatttaatcttcagccaaggaaacctggcagtaaatgagaattagttttaatttttatttttttgcatctgtgttccttatgtggtagagaattagtttttgaagttccttttagaaaaatattctaggcacataaatagcatctcattatatcactgtattgaagttgctatagggaaatagctaattgtagggatgccgtttcgagaattttattcacttttatatttatgtctcacatctagggaactagctcttcagaaaaatccaagtcttcaggatcgtcacgatcaaagaggttggttgatgttgaagggacaaaaagttattttctttttcaggttattttctgtttctaaaaccatgtttttttctgaactcatgtcaaccactattctgagttaactattctatacaaatatacatatttgaaaatgattagcataatataatgaatccctttgtatctatcacctgatttcaacaattattattcattctaactttgaattctaaagggtttttaaggatttattatatattagtggcccttgcaatatgtagtttatttcattagacaatatatgtccttgaaaaaggacaaaataattgttgaatgcctatgaggcagtgggttttttgggttatatgaaattgtctaggatgggaagttagtcatcatagttgtaagttataaggagaaaaaagagtggtaaaaaacacttttttctgctaaattgtcaactcaagtcatacataaaaactgaaacttttctaacataatgtagtacccaatatactatgcagtataattgttattagaagtttgccgcttagtctattggactttcattgtttctaaccagtgggaatgtctcttaaaaaccaagcttgtttgatattaatttattctctgaagtagtgattcttaaagaagagtgtcctccagggtctccctggtagctttttcagaatgcgtatgccttggtcctgctccagacctactgaatcataatcttcagtgatatggtatagacatacatgcttccctaggtgattctgatgtgcttccttgttgagacccactgctcaatctcaacatgttatttatgttctttgggtattgttccagttgtcagaaacattcataattctatgaacttaattctttcataggaaaccttcaattgtaacaaagtatgtagaatcagatgatgaaaaacctttggatgatgaaactgtaaatgaagatgcgtctaatgaaaattcagaaaatgatattactatgcagagcttgccaaaaggtaatgtgtgttaatttttcatgaagttaaagttgaaatgaatttttaaacatcatttttataaaattggaacttgattactgttaactatgtacaaacgaccaaacatggcattttcctagtggttgtctagaaatatatttgtatgccaatgataatatgtgttattgaagttaaaaatttggaatattcagttggttttgtaaagaatgaaatctatttttttctttcctttgagttttagacaaggggctttagtttccaaattatacttcagtgtgtaagcaggtttaaaaatttaatatattaggttttggttcagtcaatgttaatgtgcttgctttatacaaaaatgtaatgactgttcctgaaaacttaaaaatcatgtacagtctagtttagtcttattgcattcttaaattccctaaggctaaaagctgaagttaactatcatagatagatttagttgtatttcttgctgttatcttttttaaaaaactttgtcacatacctctcaactgttgaagttctaaccataaaaccttgttaataagaatagggaacaatagccaaatgaatatcttggactcttcatagctcaagtctgagagcaatataattggatgatgagaatgacagggaacttggttcaaagagtcaaattttagattttttttctttgttaaataatatgttgtagtctcttggcacatttttcaaattcattctcatagatcttttacagcagtgcttattaaaccttgttccctgtctatgtttttatgacatattttcaaattatggaagtttaaaaaatacagtaggtaggagggatgggactttccttgactaggataaattagaagttacaaaaggtgataaatgaaatgaggaaaggaaattaatgaaagaagagagataggggcctaccgcttacttagttttgcaaatcatttatgacaattttatgtaatggttttggtggccaagggcagaaacaactaacatgggagtctaagtcccataggtggtgacttactttggatttttacattctcagtggttgtcactgggagtgtttatgatgtaagaaataggaattcaaacttttgttttaattgtactgtggaagaaagtcagcatatgatgttactaacctgaactatgcctaattctgtcagaccaaaacaaaaacagacccgtttcataaggttaaatttgggtgtttatattattgttgtaatatttattgagtatgtataagtaccaggctcttacagaattaactcctttaatcctcaaaacaacactgtaaggtagttattattttgcttgtagagataaaggaacaaattcagaacccaaggaactttttcagctttaaattgagaagctaagatttcaacccaggtctgcttgaatccaaagcctagtgagtgctcttttcactctgctgctttgcttccaattctccctagaagaaatctagggagaattcagtttttttttttttttgtcgttgttgttaatttaaaatctttagttcttttcaaatgctggggcttctctgagtgtctacatgcaatgattgctgtgaataacttttttttggtggggattatttaattttactacaatctgtaaaatctcaatcatctgtgtcctccccccccccaccctttcagagactcagaaactcatttaacaactagatgctataacttgtcaaaatttgcttgttgaataacatagagccatatttcagagaaagcccctggtgactacctgcttttttttccttaattgttgccaatgatagccagttactaagcccagcaatgtaggtaaacattgaaacctaaaccctttttactatgcctgtcttatttgctcttgagagaactaatgaaaacttaaattgacagcctctctcttcaattcacatgttttatagttaaggaaggacattctttctaaaatattaacatagggatcaacaaatgatctcattctacaatttattgttagggtacttcagctaaagtatcttaatctgttaaaactctttaaggactttacagagtagtgaaactttgacataccagttgggaaatgctgcagtatagatacaggagtaatagaatgaacttcatttcccccaccaatacccctcccttgcaatataaaactacccttaaaaatctttctgagtttatgatttggattatgaaaataggatgtctttaaaaattttttccctctgaaccacacatattttatgaattctttatggaacttagcatagatgttcatattcataacagcttttgtgataggcactataaaaattcagaactgggttgaggctttctgtttgattcacacatttgttttgtaatcactccataatacctccctttcctgtttttatgaactatatttcaacaaataaactgttgacacctggcccttttactatttccctgttttatttacttttgtgaggtccttacaccaatatctaaagcttgaaagaaacaaactatgtaccagcaatgttggctttatctgaactgaagtcttgtacttcacttgcacatttaatatgtgtaatggttttttaaatgaaatcattctaggtacagtgattgtacagccagagccagtgctgaatgaagacaaagatgattttaaagggcctgaatttagaagcagaagtaaaatgaaaactgaaaatctcaaaaaacgcggaggtaaatacaagtgaaaatgaaacatgaatttaaattgctgtttatgaccatattggaaaatcggatgtgcttactaaaaatacctccacttttctgccttttgtttattaaaagcactacttaaatataacttctgtttctctctgagctctgaagcagaaaaggttaagcaccatttatcgaaacacctttgccttcagtggctattaagttatctcaagaagcgtagcatttccttcttccacatgttctataatacatatatgccataatactatgttttccccccaaccctaaaataattttagattcatgcaaaatcttgtctgtggcctacaggtaactttatatatatttagagttggatagagtgacgtacatctgcattagtattagttggggtattataaatgcaagtcccttgactccactcctcacaaattagaatttctgttgatgaggtcaagaatgtactccagtttgttcttgtgtacactgaagtttcaaatccactaatctaagaatggcaacatggacataagtaggaaggagtagggagctagagctgataaccctccctctgtcttccagaggcacctctccctttgtctgtctatcttcccttaaacacacaaacggtggggagtggtggctcacacctgtaataccagcactttaggaagccaaggcaggagaattacttgagtcctggagttcgagaccagcttgggcaatatggtgagaccccatatctacaaaaaataaaaatatcagctggacatagcggcgcatgcctgtagtcctagctattctggaggctgaggtgggaggatcacttgagcccaggtgatcgaggctgcagtgagccgtgattgcaccactgcactgcagcctggatgacagagtgagaccctgtctcaaaaaaattaaaacacacacacacacacacacacacacacacacacacacacacacactctaatattggctaaccatctataaaaagtttgcatcagaaggattcatttagaaataatagtggactatgtgtcccacttgtttgtgtgtgattcttaaatggtgcctatatatattttggggcagcttaataaagccagaattcataactataaaaggaatgaatctccaaatgatagaacatgacactaaatttctaagtagaagtgtagtgaaagcatatccatttaatattgatcagattatataattgtgaaattatagtgaagttcttatattggtgaaattttgtgtggatttttattttaatgctatgattatcttgctggaaccagtaaaatatatctatttttataacatattttatatattcattttccgattaaataatttgtaaggttgttggcaaaaataaaggaaatattatatagtcttttgtccacaaaggggtagtcaactccttttgagcataaggaatctttctgagaatctagttcatggtagggaaactgccattgcagcaacagagctcattaaagctaaggtagtagtcttaaaatttaagagaatcctcaattataaagtgatggtaaagatcagtagtaagagtttctttcctctgatcataggttctctagagaagacaaataactaagtgttctgcattgtgtacacttagtgtacagagtgtctaaatggtgttatttttgggaagggaccctgtagcagtcagtgtctgaaatgtggataagggctgaaagaataaaagaaccactgttgttgacgagggtattcctagtgccactttggtatgctgctgacatttggtctcagctgataagtttcaggaacattttattgaatgatctgtgtaggaatgttttggtatcacgcttaagggaatacatgcatttatagccatcagtagcacttaaatctttcacatctattttcatcttaatgatttgttacatttttaagctgtcagaaatcacacaggaaatttaacactaggtttactttatatacacatatatagataaattggtgatctgaaatactgaattggtgtagttaatatttaaactttttaagaaagctggttccaaattgaagcctaacttaggaaactgtcaagaatgtaaactttcttgtattacaagaaatgtaagacattacaagaatgtaagacaatatataaagtcttatattgatttggaataatattataacacaaagatacggttaaagttaacatttcaggagctgattttttaaaaaattttcagtatcataccctattttgacattctcttcccagtttaattgttagaaagtatattttacacctaacttttttacatgacacaataattttgttctatttaaaaccattaaaatctattgagctcagaaatgaaaatgcctcttttccatttataccctgtgttacaattttaaatatatttcataattaaaaataaaaaatttaaacatgtatacagcaacaagtacataaagtaacatttcaacattttaccatatttgcttcagatctcacttaagtaaaatattggttcagtcctactctcatccatttccccttcttcccaccccacaggtaatgattatattgaagttttatgcatgtgcatgtgtgtgcatgtttttctatgttttttatatatgtattcataaaacatttttcatttaaaagtataacaaaataatatgctgtatatatcatttgggaacgtttttcatttaacattgtttttgaattgtattcatgtcagtaaatgtacatctagtttgtttatttttcactgctctatagaattatgttatatcaataagccactattcatttcccacataggaagttattcccaatttttcattttctaattttctaattagtgctgtggtgaatatccttatatttgattccttgtgcacatgtgggagaaaatctccaaagaattacctagttttgtttaattcttgagcgatgtatgcaccaaagcacatagaagatacttagtaagtattacttaacactggatgaacattcagattctacattttatttatcttgttagtttatctgaatgaaatcattgtttgaaatgaaaaagtatggtgtggtgtatttgtttctgttaaaacaaatacagaatatatgaatacccaagatcaaactggtgtttgtaaataatgtgattataatacattaggcttgtaatgcctgctattaggtaggttgagataggaggattgcttgaactcaggcgtttgaggctacagtgatttataattgtgccattgtactccagtctgggtgatggattgagaccccatctttaaaattaaaaaaataaataaataaaaatattagcaacataaatagtaaaccttcaagtttacttttctaaaaaagtatgatggtgttcttatacattaacgtttttagcttctggctaggtgtggtggctcacacctgtaatcccagcattttgggaggctgatgccagaagattgcttgagcccaggagttggagaccagcctgggcaacacagtgagacccagtctttaaaaagaattagctgggtgtagtggtgtatgcctatagtcccagctactcaggaggctgaggtaggaggattgcttgagcctgggaggtagaggctgcagtgagctgaatttgcaccattgcattccagcctaggtgacagagtgagactctagctcttaaaaatttttttaaagtttctacaaataaaaatattcatgataatatttgggtccatggcgctttggaccttaaacctaacagaaacccaaaagagaaaattaaaagggtgaaaaatatatgtgatgttttgttttttatttaaggatggagccaatttgttttttagttgtctcctttttatttgtgaatgtaagcattttgagtgacttctgaattataatctaccatcttattttgatcaaggtcttggttgcacatcaggatcatctttgaaactttaagaaaatgcctgagagattttaattcagtggtttaggggtgggaatggctgtttttaaaaagattcttcagatgactctaatgtttagctcagggtgtgaaacactgccttagcagaactagggacaagagggaggctggagaggtttctgtaggttttcttcagtctgtttatcaggagacagtacagaatgggactctgcctttttcccccagtcgttctgatgttttgctgccaaaatagatatacctgcaatgtcttgtttgtctttatttggaaatagtagacagtattgatatggagtggatagtggagtacacatagaaaaaaggcagtttaatgacaatttatgtatagtgttgaagtaaatattagcaaggaaattggtaatatcataaaattaccaagtttttacataccatattgataggatctgtgcagacaattccaatgagaataaaaacctttatggcatacttaagtgtaggattgcaaaagaatctgttccgtatatgttacttacttccccattctttaaggactgatactgaatttatttgcaaagcaataacaaaataagagctcttggcccctagttttagaactttttatgggttctcttaatgttatttcaagttgtaaaaaatggcatttgcatctgtaaaaggaaacaattaggatttgtaacttggaatttgccaaggttgtcatgtgcttagtaagtcgataaaatattaaccttttttacttgtgtccaatatgccatttttctaaggattatgaggtatttcatgtctaatacaaaagttacaaaatgctgactaaagtaagtatctttttctgtgtataaatgtgtgaataatagccactcctttctcctagaagatgggcttcatgggattgtgagctgcactgcttgtggacaacaggtcaatcattttcaaaaagattccatttatagacacccttcattgcaagttcttatttgtaaggtatgtaatgatctgttgatatttcataccgtaaatatttgaatgcttaccatataccaggcctttgagggcacagtcttgaagaaagatgaaaatggtatctgcccttggaagacttctactatagtggggaaaatagacgtacaaagcctaagtgtcatgataggggagatactgtgattatgggagcacaccggaagcctgtgtaaataggatttggatggctttctagtggaaagctgtatgtgaaatatgaataagaatcagcctggtaagtgagattggttcatcatgttctgggaagaggcaacatagtattcagatactggtagttgagggagagcttggtgtgtttgaaaatctcaagagtggatgtgtgtaatgtttgtgttttataatctttccccttatatatcctacttccccaaatgtaaactatctatgtggagcagggttttgacataacttggagatgatagaattaaaaatgttttttatgtgttgattataattttaacagtctgtgccacttttttgttagtaataccttggagttaattttaaatatctataaatgtgggcctggcatggtggctcatgcttgtaatcctagcactttgggatgctgaggcaggtggatctcctgaggtcaggagttcgagaccagcctggctaacatggtgaaaccccgtgtctactaaaaatacaaaaaattagccgggcatggtggcgggtccctgtaatcccagctacttgggagactgaggcaggagaatcgcttgaacccgggaggtggaggttgcagcgagtcgagatcgcgccattgtactccagcctggacaacaagagggaaatttcgtctcagtaactacctacctacctataaatgtcaaggttatggttttcttaactcatattcctgctaagattaatcctatgttagtttgtttcccaataaaaagctgcctttgaaatgcagtggcaggccatgttttccttggaattctagctctagatcttttcttgcatgaatttttgatagattcagacatgcttaaatgaactgtactttgttctttagcaatttgtatccctcctttccttgaattcagttcagccaggggcctatctagggtatgtattagagagtttcattttaaattgtgacagtagaatctaatattgctggatttgtgacatgtatttgcctttctgttttcttatctatgtgattgtcttttttcaagaaccagtctgttgagcctaggccatttcactaatcggtagtttgtatcagtgagcaccttttccctttctgcagtcccactggaaagactttgaagtcagtcaaacttggatttgaataacagctttgcctcttactagttgtatgactttagatttatttacatattaatgaaagttagccttttctctcataatatgtcctaccttgcatggtaggtatttggtatttaaagataatatagattaattgtttagctgtatacatagtagctgtttgtatatggtggctattaaaattgttaagtacccaaatctaatacatttttatgtagagctttagtagctagatgtatgagaccagaaattagctttactaaaatcttttgtaaacttttttttttttttttttttttttttgagacggagtcttgctctgtcgcccaggctggagtacagtggcgcgatcttggctcacgacaacgtccacctcctgggtcaagtgattctcctgcctcagcctctcgagtagctgggattacaggtgtccactaccacacctggctaatttttgtatttttagtagagacggggttttaccctgttggccaggctggtcttgaactcctgacctcaagtgatccacccatctcagcctcccaaagtgctgggattacaggcatgagccaccaaacacccagccaaaaatcttttatacacttttaaataaggaatagtggtacttgagtgtatggaaatctgtttcaaggcattaattcttgagatagttagatgtctggaaaatacagacattgggtagtgggtagcagtgtttattttatttatttatttatttttgaggcggagtgtcactctgttgcccaggctggagtgcaatggcgtgatcttggctcactgcaacctccgcctcagggttcaagtgagtctcctgcctcaacctttagaatagctgggattacaggcgcttgccaccacgcccggctaatttttgtatttttagtagagactgggtttcgccatgttggccaggctggtcttgaactcctgacctcaggtgatccaccctcctcgtcctcccagagtgctgggattataggcatgagccactgtacccggctgcagtagtgcagtgtttttgctttgagtctctgaaacatgcacacatactcccttttttaaaaaaaaattgtttgtatttttaaaatttttgtgggttcatggtaggtgtatatatttatggcatacatgagatgttttaatactggcgtgcaatgtaaaataagcacattgtggaaaatggggtatccatcccctcaagcatttatcctttgagttacaagcaatctaattacattctttaagttatttaaaaatgtacaattaagttgctattgactgtagtcaccctattgtgctattaaatagtaggtcttattctttgtatttttttgtactcattaaccatccccacctcctccctatcccctcactacctttcccagcttcttgtaactgtccttcatgacatccttcattagttcatccatgagttcaattgttttgatttttagatcccacttataagtgacaacatgcagtgtttgtctttctgtgcctggcttatttcacttaacataatgatctccagttccttccatgttgttgcaaatgacaggatctcattcttttttatggctgaatagtactccattgtgtatatgtaccgcattttatttatttacttatctgttgatgggcacttaggttgcttccaaatctttgctattgtaaacagtggcccaacaatcataggagtgccagtatctctttgatatactcatttcctttcttttgtgtatatactcagcaggtggattgctggatcatacggtatctcaatttttagtttttttgaggaatctcccaactgttttctatagtgattgtactcatttacattcctaccaacagtatacaagggttcccttttctccacatccttgccagcatttgttattgcctgtcttttggatataagccattttaactggggtgagatgatatcttattatagttttgattaacatttctctgataatcaatgatggtgagcagcttttcatatgcctgtttgtcatttgtatgtcttctttggagaaatgtccagtctaatcttttgcccattttttgattggattatttgattttttcctatagaattgttggagctctttatatattgtggttattaatccattgtcagatgggcactttgcaaaatgttctcccattctgtgggttgtcttttcattttgttgattgtatcctttgctgtgcagaagctttttaacttgatgtgatctcatttgccaatttttgctttggttgcctgagcttgtgtaatatgctcaataaatctttgcccacaccagtgtcctggagattttccccagtgtttttaattacttaaaaaaataaagtttttgtcctttatgaatgttatcaatttcgaattaaatttccccttcctcttttcttttaatagaattgcttt

SEQ ID NO: 15474 - DNA, 35680 bp, Homo sapiens
aggcggtacctggacgggttcgtcccgggctgtttcgcgtccggcctgaggcggctggggccgcgcaggtagtgtccctgcacttcttgcccgggcgcgtgaggccagctccgctgcgcttgtctccagcttccagccctcctcccctaagccgccgccatcatgctgctgcctgtgttcaccctgaaactgcgccacaaaatcagcccccgaatggtggccatagggcgctacgacgggactcacccgtgcctggcggccgccacccaaacgggcaaggtaaccgctcccacccgcagggagcccgggccccagggaaccacaggatctccgccggccgcgcccctgggatcccgtcccctctccgaccccgcccccagcccgtgttgcccggcaaccggtcggcgagcaccttgtggctccatcctgcagaggacagtggggtcttagaggaagagcttttctgagaagttgacgttttcttgtcatcaggcacttggagtcaggcgaggtcggggtccctggacatagggagcttagaaaagagacgtctcctgagggaaggggtttggttcgggttagcagtaataaccgaccccagattcaagccaggggcctctgcttgtcacttggaactcggaattcctctgactctctaacactgcttcttcttcctttttttttttttttttttgagacggagtcttgccctgtcgcccaggctggagtgcagtggcgcaatctcgggtcgctgcagcctccgcctcccgggttcctgcaattctcctgcctcagcctcccgagtatctgagattacaggcgcccgccaccacgcctggctaatttttgtatttttagtagagacaggatttcaccatgttggccaggctggtctcgaactcctgacctcaagtgatttacctgcctcggcctcccaaagtactaggattacaggcgtgagccactgcacccagcctttcacagtcctttaccgaacaacgacaaaagaatgcaatacaaaaattaacttattcaaattgcacttttgatccttgcccatgtacattcagttctttccccgtaatttattcactaagtattaggtgtttactatgtgcgattactgggcaagatgtgagagtcaaagagataaaagagaaatcatgtaacattcaccagacttctactaaacaccttctgtatagattttggagactcggatgtaaaaggagtccctactttcagaaagcttatagtccagaagctaacagacaaggcaaatcagagccctgtgtatttgacggaggcatgcccaaaatacatggaatgtagtgacaacgctaataacttataacaggcacaaaactttattacatgagtcatctcagcgtcgttgtcacaaggccaacggcagcagcatggcatagggatggtgtttcttggctccagtacctactaatttcatgaccttgggcaaggcacttaataatagtacctaatacgtggggtcatgagctttaaaaaagttaatacatgtaaagtgcttgacatataggaagtggtcactgattgttacctgttattttctttttatggttctcactttattgactagaaattgcagttcagagaggttcaatacagtgcttggagccactcaactagaaagtgtggaatgtggtcagagtgcatgttctctgatccagtgtggatttaataagctaggatttgtgtaacaatttatagtttttaggacacttccatgtatattgtatgttatatgccttgggatacagaagtaaaaaataaggcttcattttcattaagtagtataacagagttaagctattaatacggggtctggcacatcatgatgttagttattgttacagttagaagtcactgacaggctgggtgcagtgactcatgcctgtaatcccagcactttgagaggctgaggcaggcagatcatctgaggtcaggagttcaagaccaacctggccagcatggtgaaaccctgtctctactaaaaatacaaaaattagccaggtgtggtaggtgcctataatactagctactcgggaggttgaggcaggagaatcacctgaacctaggaggtggaggttgcagggagccgagaccgtgccattgcactccagcctgggcgacagagtgagactcggtctcaaaaaaaaaaaaaaaagcactgacaaatgccaaaaagaacttcatgttgcttgtgctgtaggtgcatagcagatttataaatgggctgaaaatatcccattggtattaactcagcccctaatttgagggcttactatgtgctgggcagtcttcttagctctgcaggtgcattggagaatgtgacagacaagtttttgcccccttggagcttacatttgagagggggaaccaggtagttaactgaatatgcaagtgttttcataggagaaaaagaataagggattcagtgtgatgggagcttggtgtcttagacaggtggtcagatggcctctaataacatttgataagaggtttgaaggaactgaggaaacaagctctgcagatttgtgggataagcgccttgcaggcagagggatctgcaggtgcaagggccttgagctggagatatgcatggtgtgtttcaggagcacaaggaagccgctggggctggaaggcaatgagggtggtcatgaggtagacacaagccagatcatataggaacttgtaggccatggcaaagaccttggtttttatactgagtaagttaggaagtccctgaggattttgataaagtgggtgttggaatttgctttatgttttagataaaggctaactggctggtatgtggagaacagatgttctgtgacgggatgtagggaggtaggtgtcggagtagaagcagggagatcgggcagaggtccctagggcagcccttagatagagtgtgacctggagtggaaggcaggaatgcttgattgtagggctgttgtcgaaaatggcctaataataataataataataataaataaaataaaggagatcccttgtcctgtgtaactggatggatactttgtgttcagctctgtaaacaaatctaaaaagttctgacctgatcttttatcttgagaccttaaaaagaattagtagtattttatgactcaagtaatgccatgaatatattttcttaaaagcaattaaaacattccagctagggttaaagcctgcatgtctagaaacaggactttatccttacagctgggaccctgttgtgaacatggagctgactctgagccttagcaaggatatttttttaaaaggaatctctggccgggcatggtggctcaacacctgcaatcccagtactttgggaggctgagaggggcagatcaactgaggttaggagttcgacaccaacctggccgactgaaaccctgtctctactaaaaatacaaaaattagctgggcgtagtggcgcacccctgtaatcccagctactcgggaggctgaggcaggagaatccctaggacccaggaggcagaggttgcagtgagctgagattgcaccactgtactccagcctgggcaatagagcaagactccgtctcaaaaaacatataaataaataaaaggaatctcttgcagggtgaatattagagttttcctctggggacattttttctctcatggtaatgcttaggggtcagttgaatttatattgtttgcagcacctcctcagctagaacaaaagtgtgaacttcagcaagtcctttgaaagccctgggagtggtctttttgtcgtatgactgagattggctttctttccttgcctgaagggacagacttgtctccctgtggactctctttgagtgtagagaacagcaggagggaactgggggaaagtctgactcctgagatccttgttgctcttgacaaaaattgcaaactctttccattccggtaagaatgaatatggagcccgtaagctatttctgctcctgtactttctcagcatattggatttctggaaaactttgtaagaattggtttgttcagaactgttataaaaggaagtgtgatgtggtggtggctggagcgcagggcctggagcacaccaggctcttgtcttagccctgtcaccagtctcaagaccttggcaaagggccttaactcttccgacctcatatggaaatgaagggttggtgtcaggttcaaatgcaattaacattgaccaaggcatgttataaagtgttacacaaacggaacatgaaggcagtgttcagtggctgcacgttttctatgtttttagtcaattcttttgaaaattattttttgttgaataggctgccttgggtaggtgttaatttaaaattaattctgtttggatttatgtgaaagagatgaaatactcatgtaaattttaaaaattttagaactagaaggggctagagggatccctagtccagtgtttttcatcctcccaacctttttggtcatattgcccaccttggaacttttttagaccaagaaaattttcccagtgaaattctgatacctcagatatactttgtatctctttttgtactgtggtcctgcgaagggctacacgattccccatcgcaaacccatttacctgtcctgggagtgatctcgcccctcttaagactgcattttatagtccaaacctcctttttacaggtgaagtctaggaaagttgaataatttatgcagacactcagattatatttatgatagttgaaactgttgaatttattatctttgggctaattacttagttctatgtcactggtataaactgtgaaagccttcaagatacttgatttgcatgactcggtttaagtttgtgaaacaggtttactaactagcagaccattttaaggtctaggaagtgattcattaggtgcttggatgaaagataataaaggaagtgtttattctgttttccatgatcttcttggtgtgtggcaatcacattgaaggtggtagcagcttattctaggttgatcgggaaaaggctagctcctaagagtgctttgacatcctgctggtgggtagcatgtaagctggcctggtaagcagtgactagatcttgttcattaccttgttccttacaaggctaagaaccactggatttccgtgatttcataatgactgaaagttgtccatgcattgaactatgtacgagtgttttaagtttcataggagattaaagtgacctcttgttaatgtggatgtgttaataacctggttcttttttaaaaaaatgtatgatactaattttttatattttaagggaatgtaattagttatttttgtttcaggtttttattcataatcctcatacacggaaccagcatgtcagtgcatccagggtcttccagagccccctggaatctgatgtttctcttctcagcattaaccaggcagtcagctgtctgactgcaggcgtattgaaccctgagcttggctatgatgcccttttagtggggacacagactaatcttttggcttatgatgtctacaataattcggatttgttctacagagaggcaagtataacctttataaccataaaattgtcattactcattaatgtccattttttatgcttagaagagatcagatcatttattttggtctgtttgttgtatgactgttatagtataggtaaacaacatggagattttgctgttaacatctgctttatgtactcggaacttatttatttggttatggttgctaatcgcttggtgacactcgagcttatctctatgaggtatatctgtgatactgccatctgtcaagatctgttgagaattcagccaagagctgggaagccaatagacaggtctcctggtggacttgcattcaagtttagtgcaatagtttgtagaagcccttactgtagcctgccacctacaggctgctgcaactttaatacccaagcaattcatatttgttacagaaaagataaggaagtaaaaagtaaaagaaattacacctattttttcatctagaaagagcacttaactgttgagtttttgaatccagattttttaccaagcatatatgaatacattttgtagtaaaatggggtcatatatacatgtagccttttacttgtttttaccctatagcagctttattaagatatgattcacatgtacaactaacctacttaaagtatacaattcagtggtttttagtgtatccagagagctgtacaaccatcaccatcatcaattttcaacatttttattaccccctaaaaaacccatacccattagtatcactccccatttttctttaacctcctaaccttaggcaaccagttatctactttctgtctctagaagtttgcatattctagacatttcataaacaatggaattatataatatgtaatcatttgtgactgccttctttttcttagcatgatattttcaaggttgatccatgttgtagcatgtgtcagtaattcacttttatggctgaataatattccattgtatgtatataccacattttatttatccatttatcagttaatggacattccactccctggctattatgtgtggctctttcattcaataatatgttgtgaacatctttatatgaagttactacatacccgttatgtcattcttattggttctgtagtatttcattgtgttaatgtaatttgtttaaccgttccatgttgttgaacatttatgttatttccattgtttctgtattacagttcatagtgtaataactgtatctctttgaccacttccctgattatttcctgaggataagttcctgaaaatgcagatggttttctttctttttgtttttgttttctgagacagagtcttgctctgtcacccaggctggagtgcagtggcatgatcatggcttactgcagccttgacctcatgggctcaagcaattctcccacctcagccttctgagtagctgggactacaggtgtgtactaccacacccagctaattgtttattttttagagagatagggtctcactatgttggccaggctggtctcaaactcctgggctaaagcagtcttcctgcctcagcttcccaaagtgttgtaattatagatgtgagccactgcatttggctggttttcttctttgtctattttttgttgaggtaaaatgtacatacatgaaaatgcacagaccttctgtgtacagttcaatgagtttggatccctataaccaataccccaataaaaatagagaacattttcatcacctcagaaaatattgttgtaccccattccagtcaatttctatctcccatagacaatcactgttctgacttctgtcagcttagattagcttttcctgttgttgaactccatacaaatagtgtctggcttctttcacttaacataatacttgtaagaattatccatattgttgcatataaaagtagtcttttgttgttgttgctaagcaacaaaaatagtatattccattgtgtgaatatactatggtttgtttatccactctcttggtgatagacaagtggctggacatttggattgtttcagtttttaacaaccatttttgtttaagacttgtttttaataagacttttttatataagactttttgtagatatatgttttaatttatcttgggtaaatacccaagagtggaattgctgggctatgtggtttataagaactttatgacactgtgaaactgtttttgcaaagtggttgtatcactttatactcctgcctgcagtgtaggagagttccagttgctccacatcctttgtcaacatttgttgttgccagtctttaattttagccattttggaaggtgtgaagtgatatcttaggtgtggtttcattttgcatttccctgataatcattgatgcagagcaccttttcttgtgcataaatggacatttatgtgtcttccgtgaagtgtcttaagtcttttgcctattttttattggtagtttgtctctttattattgatttgtagacatttcttggatatactggatacaaactctttgtcagatttatatataataaatattttctcccagcctgtggcttgttccactaggcatgtgtcttttgatgagcaaaagttttgcatttttgtgaagtccagctgatcacattttttctttagtggttaggactttttctgccctttgcctatttcaaggtcacatcgtttttgttcagaagtgaaatcgagtttaggactgtattagtcagggttctccagagaaacagaaccaataggacatgtacatattagagggggaaatatttattttcaggaattggcttatgcagttgtggagcctggcaagtcaaaaatctgcatggtgggccagcaggctggagatctaggagagaattgatgttgaagctcaagtacaaaggctgtctgctggtagaatcccttcttccttgggggaggtcagtcttttttctattaagtccttcaatacttgatagaaagttcttaatagaaagtattgaaggacttaatagtaaagtagattattatccatatgtgcgtgggccagttaatgtgtgaggcccacccacattatggataataatctgttttactcaaaatctgctcagtttactcaaaatttggcccaattaatatgtgggcctgcatattatcgtgtctaagataatgtgtccttttacttttcttaggtagcagatggggcaaatgcaattgtgctggggacattgggagacatttcttcccctcttgcgattattggtggcaattgtgctctgcaaggtttcaatcatgaaggaagtgatctcttttggacggtatgaagaagaaaacattctttttggtacccttaagcatttttacttttaatgttcttttttaaccaccaactctactgagtaataatatttataattctgtgcattaaaaaaggatatgaataattcgaatagcattcattcgtgttttgtgtaatcctctccttcatgtagctaatatatttggagtaaatggagaaacgatggcatgctaatggtttggggttttattttcaggttactggagacaatgttaattccttggccttgtgtgactttgatggtgatggaaagaaagaggtatgtgggggaggagatatctctcttgtgtgttcagccaaatgaattttgccatgacagtgacattagtgttgacagaagtgtaagcttctcctggctgattttggtgctctgttgcctaaatgctcagccagttggccccattcgtctttctcttctcttttgaacaataaatcacttgtgcttgtgtaataaatacaaagatcaaagccatggtgtttcagagacacaggagagggcagagagggtagaagagttgggatttcagtcatattcacggtcttatgaattgctcctgatgctttgaaaccatattagtatatagttttcaattttggccaactgttttgaggaatctaaatgttttagagattggcttttagcctttgaaattattcttatggttaccctagaaattagcttcttgagcagttagtaggtgtgacgtgctgtgttgggcaccgacttgcccctctcttgtccatggacactggactctggtgtttgaacagggcttccatctgtaggcagagaaagttgctgatccagggagccttttcaggtactcagggaaataacgtattctggcaagatgtgcagctcccatggcaggataaaagctgcagtagcccctgttccttcattgattgaatctgctgatcctcccattagagggagcatttctgagcatcaaacgattatgaggttgtcaatcttgggtggcagaagcagcatgcaaagtactgtgcaattttttgttttgtttacagaaattttgttgtttgcacttactcacctgaacatgtatgatatttccccttcagcttcttgttggatctgaggattttgatatccgagtttttaaggaagatgagattgtggcagaaatgacagaaacagaggtaagaagctccacctcgaactatggtaaccttgagcaagatagatcagtactgtcagatgaaacatcaagtgagagtgctggggcatctccaaacccaggtggttttaggataaaagcttggggagggggtcagacagagctgtatgttatggtaagaaaagcaataaaaatcctaattaagatatattttgaaaagactgattaaatagagaaaaattattgcatatagttgaatacataaaggcatttcttttaatgagttaatacatgcaaataataataatggcaatcatttattatgtacctattgtatgccaggtagtgctctaagtactttatatgaagtaacatattgaatccttacaacaaccctaataggaagataaattattattatttctatagatgaggaaaatggtgttctggttttttgtttgtttgtttgtttgttttgaggcagagttttactccatcacccaggctggagtgcggtggtgcgatctcggcttactgcaagctccacctcccaagttcaagtgattcgcatgcctcagcctcctgagtagctgggactacaggcacgcaccaccacgcctgggtaatttttgtgtttttaatagagacggggtttcaccatgttggccaggctggtgttgaactccagacctcaagtgatccgcccaccttggcctcccaaagtgttgggattacaggggtgacccaccgcgcctgtattttttgttaagttacttgtacgtagtcttggctatgaaatggcatggtcagcatttgaacctttatgccccttcctcctcatcatgtgtattcagtagggctgaagtgcataaatgagatgtctatatttttttcttcctgcaaattcagtacttctttggcacatttctgtaggtaaacttaaaaattatagaacttgtgattagaatcactcatgtaactgaacctgagatatttcttaatatcccaggttgtttaggcctgatgtttaggcctggtgcagtggctcatgcctgtaatcccagtgctttgggaggccaaggtgggaggatcacttgaggccaggagtttgagacccgcctgggcaacataacaagactccatctctacaaaaaatattaaaaaattagccagaaggtgatggcacacgtctgtagtcccagctgcttgggagactgaggcaggaggatcccttgagcccaggagcttgaggctacagtgagctatgatcacgccactgcattccacccaggggcaacgagaacaagactctgtctcaaaaataaaatttttaagaagtaacagtgttaagagttaggaaaataaagacaaaaataaagcaaaaagcactatctaaagattacctgtatcctttatggttttgacattcttaggatatttatttgctgctggttttccaggattgggcaagactcaaacagaaaaaaataagatattcttaattaaggaataagaggataaaggagcaatagcttgtgaacgttgtaagtggacagaaagaaaccagtaaaagagagtcttagagatcagaatggtgggattttgcaaaatttagttatgtggtatttaggagtctgtatcagaaaagctcgagggcactagtctcaaaactgaccttggccacttgtctttaaattacttgcttcatgtcactcataaaagctgcctaagaaggtcagacttcttttctcctaactataaaaggagacaaaaagcaaaacctacacattgacatacagtgctaccaatgattttaactaagttatcctatagcaagagtcatcagtttttatttagtcctactatactttttatatattcacagttatcatgatgtaagatgatagttgtggacagagaagaaatgaagaggagaaatgggtgccaaaaggagcagtctgaggatgtgtgtttatacagggagtctgttttttattttattatttttttgagatggagtttcgctcttgtcgcccatgctggagtgcagtggcgtgatcttggctcactgcaacctccgcctcccaggttcaagtgattctcctgcctcagcctcccgagtagctgggattacaggcacctgccaccgcgcccagctaatttttgtatttttagtagagatggggtttcgtcatgttggccagactggtcttgaactcctgacctcaggtgatccacccgcctcagcctcccaaagtgttgggattacaggcatgagccaccatgcctggcccgggagtctgttttgtgtgtatgtgcttatatgtgctttctgaagagagggcccggagccttcattacattcttaaaggggtttgcaacctcccccaccaccaaaaaaaaacaacttgagaatccctggctgatagatggtgtgtcccgaattctcatatccctttcattctaatttgtggtaaatcttttctcctttggtgggaatcattcagattttgttggatttttattgcttgttaatattagatttgaggagactgaattctttgaaacatctctttcctaaatcctagaaaagaggacaagaacctggaatagagttagggatttgaggggacttgttgatcttctagtccacaaaaggaagaaactggtgaactaaggaagcagtaaaagagctgaggaatctggggctaaatttatgaaaatatggacttcataacattgttcacttgcagggccattttcctgttctctttgttaggttttgctcctagctcaaatatcatttcccagatcagcaaaatcatgattcatttggcagttgaacagtatgaagtattgtcagaagaatgccttgagctaaataattctggaatcctacacagcactttgtattcatagttaagtgaagtgggtggttttgtagaaaagctgtaggtgtaaaggaaattatataactattctctgctttatacaatttatttcttaatatctcttgtattaggaacagaattagaaagtagatctgcaggatcatggatatcattaagctttggttttaactttaaaggaaagttttgttcagtacctaaaattttatccttttaaggatgtcaaatccttgaacagtcctataaatatttctgtatcatatatgcattctgtatattgttatatactacacaaatccacgtgcctgggtttttacttttcaaaggattatgtgttctttcttttacctctagcaaacaaattatgtcatagaaagaaaagtgtatacatgaagtaagatattcaattgtgtattgttataagtcttttaaaaattgagactgtaggatgttataagttaagtaataatcattaaagcctcttgggtgaacatatataatatctattgtatatgcatattttcgatcttgtgtagttagcttatgttttccttagtccttcagttttcatgtgttttttaaaaataattttgtgaaacttgccacataaggttgctctaaaacaccaaaccctgtgagtttatttaaatctgattatacaactctgaagtagatgacatgtatcgtagagaagaggaatacattccccactaatggattggaagcgcttttaaatctaattttaacatagttgtaacaaggagtgtgaagtcttataaagccgtacttgacagtaaactgagtcttaatgaaaagatgttgtgtttttgtggattgttttgcagatagtcacctctctttgtcccatgtatggcagtcgatttggttatgccctttccaatggcacagttggagtttatgacaaaacatcccgatactggagaattaaagttagtataatttagcctttgatattcaggcgcttgatagttattgtgagacttctgtgctaattattaaaattctttttcagtcgaaaaatcatgccatgagcattcatgcttttgaccttaattctgatggagtgaatgaactgataactggttggtccaatgggaaggtaagtttgaatagcaaagttcaggtataattcagagtagtaattgtccaaggtgtattggctgtaggacttagaacagtaacattgggatgtaaacttcagttcgttccttggcaatgtttttacatttaacttaataatcttgacacattcttcctgctatcattgtcaagagctgcacagtgagagagtgtaagtcttataagcggtgtttgggggaaatcttcggggagattctgtctaaatctcttatttgaagtgctgagaatccatcagccagattgattctaggtagtacaacagtaaaaaaggagttttaaggaattgtttgaatagctcttttccaatacatcttcaaaactgcctgaaaacttagcactaataggaagaatcatgttagcatattgttttctgagctataactttaaaataaaatccttttgcttgctttccttttttaacttcaaatcagaattttttacagtcttttggcaagtcaggattgtcttcttagaagctgcctaggtagctgccagatctccatggataccatttgccctcgctttcttgtctgtcagtgttggattgcctgaaggggatcagcaaattcttatcttttcttctttgatttatctttacttttctctagcaccttgtaagcattcctttggtgttacgtgaagaacggattctaaaaagctgttatgttggtttctgcttcttcacttagttttgtcattagtatgggtactaaaaattataagactgtatagttgcttattaagaaatatgaaagtctgtgaaatgggtgtcttagttggtttgggctgctgtaacaaaataccatagggtgggtggcttataaacaacagaaatttatttcttatagttctggaggctgggaagcccccatcaaggtgttggcagtttcagtgtctggtgagggaccacttcctcataggagccttacagggtggaaggggcaagggatctctctgggccttcttttatagggcactaatcctgttcatgggggctctgcccttatgacctaatcacctctcacaagctctacttgccaataccattcattaccttggctaataggattcagcataggaatttgtgggggcaaaaacattcagatcatagcagtggatcatattttgagggaatataaattattatgactgacttaagaattagaaaactactagacttgaaaacttgtcaggttaccttgaaatataattgttgacctagatgtttttatagttaaatgcttttgaaattttaagggatttctattatgtaatgcgttcctgagcatgaaaaagataagaaaattatataagtggaaaaaccgattatctacatctaacagaaatatacaaaaaggaaatatacagatccaacttgtgaatacaggtgtgaaaatattaaataaatgctgctagacaattaactttgtcttttgtatgtcatttgatgagttggagggccatcctttcctttcagggtaaaacctcccagttggattaagcaaaagatcagaatatccacagaaatattaatttgtagtcctgcttcttagttagcaaatgagccttcttatttgctaaatattgtggaaatgcagtggtagaagccattaggtagctaggctttaactagaaagaagcaagttcaggtcagtctgagttagagggctacattaatgtgctttgttaaaaatgcaggtcattcgttctttcacaggctttagcattcataattttcaggcttccatgatgttattaatagcattaatacttgacagtgatatactgtagacaaggggtaggctgtaacctaaattactttatgttttggttgcaaagttttgcccagaagattgtttatgaaaagacaaaactagtgagtagcattggtcatcgaaatgattgctatgctagattttctgtagctagccttttgttgataatacctgtgtccttgcctggaacataatcatctttttttttttttttgagactggagtctcgctttgtcacccaggctggagtgcagtggcgcaatctcggctcactgcaacctccgcctcccgggttcaagcgattctcctgcctcagcctccctagtagctgggactacaggtgcgtaccaccacacccagctaattttttgtatttttagtacagacagggtttcaccatgttagccagaatggtctcgatttcctgacctcgtgatccgcctgcctcggcctcacaaagtgctggcattacaggcgtgagccactgtgcccggcctcataatcttcattttaagtgatggtcacttattatcacttttgagatgcatttgtttctgatcagtcatttatttatttgttctctctcttggaaatgggagacttagaggataggagagctctctaaagtatctgaatagtttttatgtggaagaggaactcttaacagggttgttgtaaaaggttgcatggtggaagactgggctaactccgtagtttctgaacttcagattcaacatactttatacatttatatataataaagatacaatttttatatagagctaacatttattacgtacttctgtgtgtcaggccctgttgatatatgttaacttcattaggcctcagttatacccaatgggatatagtactgttaatttctccatgttctggttattgaaccccagatgaaaagaccaagcacagaatggttaagaaacttgcaagatgctgtggatagtacgtggcagagctagattctgaacctgagcggtttggccattaagcccatgcccttttgcactgtgctgtgtgtactatatgtactggctcttagcagacccgtttcttcaagtgaagcattgtgtgaaggcctatgaaaaacagcttttatttaaaaagaaggaagcacagctggttgaggctctttagggtccctcttggccccagcagtcataggtatctcctgagaagttgtagggcttcatagaatactcttgaaaactgctagactaaatgacctttaaagctgatttttatttttaaattttgtggtttttaaacatgtagcataagcaacttttaaatttgtgttttatttgtaggttgatgctcgaagtgaccgaactggggaggtcatctttaaggacaatttttcttctgcaattgccggtgtggtagagggagattaccggatggatggccacatacagttaatctgctgctcagtggatggggaaagtaaattgggatgagaaaaatccttaaaaagtcacgttttccatttgattgggtcaaaatatcaggaaatttcacctgaagtatttgtaccgagatcctgtagttctaataaattcaccaaagttggggagaacttaggtttttgtttttaagagcaggtaattgatgacctaaaagtatacctggttatacttgcggttttttccttctgttcagtccggggctacctgcctggcacggctgagatgaggggcaacctcatggacaccagtgcagagcaggacctgatccgagagctgagtcagaagaagcagaatctgttgctggaactccgtaactatgaggaaaatgccaaggtaggtgtaggtcctaatgtgaccaggtaatggaggctgaaatgttgagactgaccgggaggatcagcaaatatggaagaatgagagtgtcattgccagggtgtggcctttttgccattgtcagaattgagaggggatatatgctttcgtcttgaaatttcatttccaggtagttaaactgtagaaatgttttcctgattgtttaaggacatttcctgcagcactatttatttatagcagtgaaaacagctggaagaaacttagatgttcgtcagcagtagggagtatgtgctaaggaatattaagcagctcaaagaatgaatacttggactgatatggaaggatatctgtcgtcttaccaagtgacaaaaggcaagaacaatatagaatgtcttttatctttttcaaaaacaaacatgttaaaaacagacaactgtaaaaactgtgtgtgtgcatacagcaaactggctgaaatattcctttaatttgtcctgtaatgcattactgtatttgaatttgatgtaacaagggaatttgtttgcttactttaaaagaacaatacttcaaaaatgttaaagtcatgatgggatacagtggaccatacccatagaaagatgcaagggtattttcccacagggccagatagagcaagggagcactaatgaggtgagttctctgaattctaaagaatcagattactataataataataatatgctggaggctctgtcttttgaagctgaatagcaatattatttaaaattgatattagttcagtgttttggtgactgagtaggaaatgggtggggtgttttgcaggctgaattggccagtccactgaacgaggctgatgggcatcggggcataatcccagccaataccaggctccacaccacgctctcagtcagcctggggaatgagacccaaactgctcatacagaattacgcatttccacttctaatggtaagacagtactcacagctggtatttagaggcacctgtgccatcttggagtcattcttttttttttttttgagacagagtcttcctctgtcttggctcactgcaagctctgcctcccgggttcatgccattctcctgtctcagcctcccaagtagctgggactacaggcgcccaccaccacgcccagctaattttttgtatttttagtagagatagggtttcaccgtgttagccaagatggtctcgacctcctgacctcgtgatctgcccacctcagcttcccaaagttggagttgttcttaaactgtttttactcttccctgcagacaccatcatccgagcagtattgatttttgcagaaggaatttttacaggtgaaagccacgtggtacatcccagcattcacaacctctccagttccatctgcatccctattgtgcctcccaaagatgtccctgtggatctgcacttgaaggcattcgtgggttacagaagcaggtgaccctttgcaagtcacagttcatttcaggacagcacttagaggagggcaagatgtataaattttccatatgcccagtggattcttgggggcctgagaaaccatttaatggttctgtctacccaaagtttctcatgaccttttatttcctcagtttgaaacctgtaaaaagaaaatggaaaaactgatatgtaagtttaagatggttctttttttttttttttttttgagacagattctagctttgtcacccaggctggagtacagtggggcaatctcagttcactgcaacctctacctcctgggttcaagcaattcttctgcctcagcctcctgagtactgggaccacaggtgcccaccaccacgcccagctaatttttgtatttttagtagagacaggagttcaccatgttggccaggctggtcttgaactcctgacctcaggtgatccacccgccttggcttccgaaagtgctgggattacaggcatgagccaccacgcctggctaagatcattattttctgtttttagtcaggtgatctcataatcaaaaaatgtttaattgatgatttgtcaatttgtagttttggccactaaaactacaagagttaggatgcacctttatattacagtcatacataacctcagctagtgaagaaaaactgctctatttgtggaagataagatactttttacatcccctttatgatattttaaacccttagtgcatgcaggtatatatgtagactcatgctgtctttaaatcccaaacctaatatattactgtagtactttaaccctcaagtgttttgggggttccttcttaagtgaaacccttaaatatcaattgatgacccagaagtggctttattttctgggccttgcattttgaaagaacattctatacaaaacaattctcttgtgtttcattgattggccatagcacccagtttcatgtatttgaatcgacaagacagctccctcgattctccatgtatgcgctgaccagcctggaccctgccagtgagccaatcagttatgttaactttaccattgcagaacgggcacagagggtgagtatctcgcttttctctttcaatgcttttacacagtagaatcctttagatgttatttcatagaaagggaaaattacattaatgtgttatattggtagcagtaaatatgatatgaaagaattctctaacttgggggtggcttgtaacctgtaataaaaatattgctaaaataccttctctcactttgaaaaagcatctgagcaatcctcagttattggtgaattcttaccagtgtttaattcctctctttccgttatggtcttagtgtggttgtcctggtgtagtatttcaagaggaacctgcagcaagatgaaaagagagtgggacttggagctaagaacgtttttggctttaagtgctacgttaactcattaaattcttagtgatcttggggaagtcccctcaccagtgtgagcctcagttttcttatctaataagtaaggataatcttacccaccttattgcgggggcccgaggattacatgattggtgtaacagtagcaccttgtacatttgaaaggactaataccagtggactttaaccttggctgggctttggaattcttggtgggactttttaatcatgtagattctcaggcccctgcctggcctgtggaaccacagactctataggtgggcccttccagaaggcctcatgggtggttctcatgtggaacctgtgttgcaagccactgcatggtgttactgctattaacattaaaacttatattttccttattgtgtggatatatctgtggtgtttgcccatgtatacttcattttacatttcttaaagaatagaatggaatggttttaagcacgctacattgtccaggttatacccacagaagagctgttgtgtaacagaatcagcatcatacctgaatcatttgtacattgcatataagactatgtctaagtagaagatgctatgaaatcatgtctgctgtggggccaggcataattatgaatgttacttaagagcataggtgaggtgagaaaagggaatgtgactagtgttttagtattttcttggtgtgggatgaagtataattcttttttttttttctcaacaaagcagtaaaactagaaagaaggagaactcttccctcaagaatggctgtaccttcatatctagaggcacattaaaaaaaagaacgtctgtaccttaaaaatggaggtcatttcattgtgttcattttcaaggttgttgtatggctcggtcagaactttctgttaccagaagacactcacattcagaatgctccatttcaagtgtgtttcacatctttacggaatggcggccacctgcatataaaaataaaacttagtggagaggtaatgtttaatatcacggggcatagatttcttttttgaatttatttattcaaacacttagaccatggaatgagaggggcatagatttctcatgtggtgtttaccattcagtccaaagtgaggtgggggacatcaatgtcaaggtcataaaaccacgttttgttttatttttttcacatggtttaacttagtctgttagtgttaccattttagacactggggtataatttggaatagctgttttctgcctccttcccttcatctcttccttgtctaatttggaaagaattgggaatacagaggtcaacaaaaacattttcaatgtttggatgattttgtcatttaatttctaaggccagaggatttaccttttagctagctgctggaaataatgcagtttgtaatttctttgagagctaaactttcctttttcaacactgcatatatatatatatgcacaataattttgttgagtatggggaaattcaggtactattttagctaagtttgtctaacatctgaggatgctaaacttgtctattttttctctgggtagatcactataaatactgatgatattgatttggctggtgatatcatccagtcaatggcatcattttttgctattgaagaccttcaagtagaagcggattttcctgtctattttgaggaattacgaaaggtgctagttaaggtgagggaatgcggtagatgcatttgtgagaatgtggtagtctaataatatttgaggagattaatggtactacaaatgtacttatgttatagtgatgttttcaagaatttttgcaattcttgaagtaaaaattgaactagtattggagagtttactacttaaggatttattttataaaaggaagtgtttagctcctgagcaccatgcttgctttgtttggtttaaagtgatgcatttaaatattaacattttcctttgttagctcttcatcttatttgtagtatctgctttggtcttcttcagtttgggtctttccaaaaacccaaattcaagataaaagagcaaaataaagatgattctgattggccccaaagtatacaatattcccactgcaaatccctaaaatattaatatgtgtgttgtgggggctcctggtgctaaagcatggggaagattcacatggagtgtcgtgttgaaattggaggcagcacagatgagttaacttgttgagacagagatgaaataacgggaagtagcttaattggtataagcgaacaggggaaagaagggggtctctgtatctggtaaatagtgtcttttcatttgtctgggttcaagaagtttgtgaggcctttttcattcctgagtgttcatggtctccaggtggatgaatatcattcagtgcatcagaagctcagtgctgatatggctgatcattctaatttgatccgaagtttgctggtcggagctgaggatgctcgtctgatgagggacatgtgagtatttgtcatggttagtacaggtgcagggttaaaaatgtgagcagtatggaatagcaactctcagatgttaccaatagaagtataaattgttacagtgactttggaaaataacttggcattatcagtaaagttgaaaatgcatgtcctctatgacccagcaattctattcctggtttatagcttagggaaagttacagcttagttatatgtatgcttataaaccaggatatttatataagaatatttgtaaaggcattgtttataaaaatctcaaaatggaaacaatccaaattagcatgaacagtgtagcgacagtggatgaattgtgatatattcatgcaatggaatactacacagcagtgagagcacatgaatctccatgacacataagagcaaggaaaaatctgataagcataatggacactgaaagaagacagacttaaaagactataaaatgtatccgtgtgtatagttagagaaaagagtaaactatagtttgggaaacatgcaataaataaaaatataaattcagggaagagattatcatataagatagtattttctcctagagaaggagggattatgttcagaaaaaacacattgggaaacttcctgtctgaagtcttgtttaacttcattaaatattctgaatttttctgaatatgtaacattttacaataaaaaagttaagtatgtacagtacaggtcttccttggtgcttgctaggatgccaaatttaccttgccaataaaatgtactgaaaaaaattcagtaaaatagttaacaaattatagatgaaatttatgtgtatatattaggggcaagagttcactcagagtgctgcttgtgttttttcctgagacgcctgaattattggcaaataattataatggttttgctcagaggtaaatggtttttaaaataattgtattgttgaaaatttcaaacacatacagaagtacttaaatataatgatttcatatataccacccacccaacttcaacagttatcaactaaagactgatcttttttcatctctacactcaccctctttccctcccaggcactagataattttgaggcaaattttggacattgtgtaattctagccacaactatttcagacaaagggcctttcaatatcatatatatatatatacatatatatacacacacacacacacacacacacatatatacacacgtctgtataaaaatcacaatgccatatcacacttagaaaaatttacaataattgcttaatattacaaatacctcatctgtttagatgttcccagttgtcttataaatgtggacatgtgtgttttaagttggcttgctcaaatcaaaatccagatcaaagtccatacattggatttggttggaaatcgtttaatcttttaatccacacttttgcttgcccactcagtctcttctctccttctcctgtggggtgccattttggattttgctggtggtatccttgtggtaatgtttagtattattcttctgtcccctgtatagaaagataatggtagatctggaggcttgattagattcaatttcaaattttggcaagaatacttcgtgagtagtgttgtttacttccatgaggaagcatgcaatttttgattgtttctttttatgatattatcagccattgatgatcattgcctagattcattatttcttttggggtttgcaaaatagtgatattctaattctgttattcttttcttcatatattagttgaaatacttctatgaaaaataatgttccctcatgaattaatgaattatttggttccctgaggtacagtttgtacaggaaagacagtttctttatcagctttaaaataatgtgttgatctccagcatgcactaggtgaccaatgagatttttaagtccttacatactcatgtatttgaacatatttaatgtgtttcaatttatatctgttattattaatttttatggctagttttttttttttttttcgagacggagtctcgctctgtcgcccaggctggagtgcagtggtgcaatctcggctcactgcaacctccgcctcccgggttcatgccattctcctgcctcagcctcccgagtagctgggactacaggcgcccgccaccaagcccggctaattttttgtattttcagtagagacagggtttcaccgtgttagccaggatggtctcgatctcctgagctcgtgatctgcccgcctcagcctcccaaagtgctgggattacaggtgtgagctactgcgcccggccttttacggctagattttccagtctgtgggcaatggaagtctctttaggttggatacagttacctttggacatggtcccattaatttggttggttctttgttttcttgtatgatgaaatgtttcaggcttatctggtacatttcccagtcttcatatggaaccagccatttctctcgagtcctggttcttttacatgagaaatggtatttagagatcatggtctgaccactaaagatgttcattgctactgggttgattattgtttttaggccttttcaatgcgtagagctaggaattttttttttcaatgagaaaatatgagttcatactatttaccattcagatttatgaatataggctcttcgattttattactgcgcctcttctctctcacattgaaaatcatggcttcaggttgggcacggtagtttacacttgtaatcccagcactttgcgatgctgaggtgggaggatcacatgagcccagggattcgagaccagcttgggcaacatagtgagacccagtctctgcaaaaaaaaaaaaaaaaaaaaaaattagctgggcatagtggtgcatgcctgtagtcctagttactcaggaggcagaggtaagaagatctctggaacctaggagtttgaggctgcagtgagctatgatcatgacactgcaatccagcctgggatgacagagcaagatctcttaaaaaaaagtgggggaatatcatggctccaatcagtatcaacataactatttgcttcattttacagcacagacacaacatttaagaatattagccaagttgttatcaacaatatgattgctgaaaacagtttaagattttttgtgtgttaattctttgtgtctttagggcatatcccagcagggagtttccgtcaaattactgtatcttaaaatcatttgagattatttctcttttggttatgccacagatttgatagagagttaggttcattgtcttattttgctctcagttttggaggattggcatttttacctttttggtttaattctattacatatttactaaaacctttttgtaattccaaagttagatctataagacaggcatgcacggaaaagtctaactttccattcctgtgaccttcattctgttctctcccttttactataaataaccagttgaacatttaagtatatatatgcagatacacacagatatatacacacacacccctcttcatgtcttagattaagtcatagtatgtatatatctttttctccaccttggttttttttttttttttttttttttttgagacaaggtcttgctgtcacccaggctggaatgtagtgatgcaatcacagctcactgcagcttcaaccacccgggctcaagggatcatctcacctcagcctcctgagtagatgggactaaaggcatgagccaccagcccggctaattttttatttttttgtagagacagggtctcaccacattgcctgggctggtcttgaactcatgggatctactgatcctcccaccttggcttcccaaagtgctgggattacagatgtgagccactgtgtccagcctccaccttgctttttacatttaaaatatatcttggagatttctccaccatggtgtagagaaatacatctcatttgtctttacggctacatagtactccattttctggctgtttttcagccagtttcctctatttggattgttttttttttactgtagataatgcttaagtgaatagttttgttacgtaaatctttttatatttttgccaggatagtttgagaaaaaggcttaacaaatgggattactgcagtaaatgatacatgcatacagaattttgcaaggtcttgtcaaattctccataggtgttacctcattttgtattcccataagcaatgtatgagattgcctgtttctcttcagccttgccagtggagtttgtgggcatactccaggggatgagaaatggtctcttagttttaatttttattttttaaattttattttattgtggtaagaccacagcatcagatctaccttcttaacacatttttaagtgtataatacattatcgttgactataggtgcagtgttgtacagcacatctttagagctgattcttcttgcttaactgaaactattggtaagcaaattcccatttcttcttcccctctttcaactatcattctactctttgattttatgaatttgactattttagatactccatgcaaatatataatatttgtccttctatgactggcttatttcactcagtgtaacatcctcagagttcgtccatgttgtcacatattgcagaatttccctctcttttaagactgaatagtgttccattgtttatatgtactaaattttctttatccattcacctgttgatgaacatttatgttttttccacatgttggttattgtaaatagtgtggtgatgaacgtgggagtgctaataggtcttcagggtcttgtcttcagttcatttggataaatacccggaagtgagattgctagatcatatatggtagttctatttttaattttttgattacatttttaatatttaatcattaaaaattaaaaatttaaatttttaatatttaatcattaaaaatttaaatttttaatatttaaatgttttccatagtggctgcaccatttttcattgtaatcaacagtgtacaagggttccagtttctctacatccttgccaacacttgttgtcttttttttgataattttcatcctgacaaaggtgaaatgatacttcattgtggttttgatttgcatttccctgatgactagtggcattgggcgtctttttatatacctgtcggtcatttgcttttcttgtttggagaaatttctattcaagtccctagctcattttttaattggattactagtgtttttttttttttttttttttgctgttgagttgtaggagccatttattatgttcagtattgggcatttttcattgttttaattcagggccatttccatttcttttttgtgtgaactatttgtctgtttacatatcaggtactgttgtagtccattttgtgcctctataacagaatacccgagaatgggtaatttataaaggaaagaagttgatttagcttatgggtctgtaggctgggaattacaagaaacatggcactggcatccgcttgacttctgttgagggccatgtgtgaagtcaaaacatggcagaaaaggtcaaaggagaaggggacatgtgtgaagaggcaaagcctgaggggtgccctaactttataacaacctgctcttttgataacttcattcctgcatgagcgagaactcactcctgagagatggcattaatggcattaatctattcatgagggatctgcccccatgacccaaacactccctactaggcccacctcccaacactgctgtgctggcatttcaacttcaacatgagttttggcggggacgaaccacatccaaaccatagtgggtatattaatctcttacgtgtgatatgagttgcaaatatgttttccggagtttgtcatttgggttttccctttgcttagatttttaaaaaattttgctttaatgggccaggcgcggtggctcacgcctgtaatcccagcactttgggaggctgaggcaggtggatcatgaggccaggagatcgagaccgtcctgactaacatggtgaaaccctgtctctactaaaaatacaaaaaatcagccggtcgtggtggcgggcgcctgtagtcccagctattcgggaggctgaggcgggagaatggtgtgaacccgggaggcggaggttgcagtgagctgagatcgcaccactgccctccagcctgggtgacagagtgagactccatctcaaaaaaaaaaaattttgctttactgttggttttaccttgtaagagcttttaaaattttgtatatagtcaaattataagaaaatttgactacattaagaaaatgtaagtcattttcttaatactttatttatttatttttgagacagagtctcactctgttgcccagcctggagtgcagtggcgtgatctcggctcactgcaacctctgcctcccagattcaagtgattctcctgcctcagcctcccaagtagcgctaccacacctggctgatttttgtatttttagtagagacgaggtttcaccatgttggccaggctggtctcaaactcctgacctcaggtgatctgcccgccttggcctcccaaagtgctgggattacgggtgtgagccactgtgcccagccacattttcttaatacttttacattttgaattactgttagaaaagttttctttaacagcagggtatagagtaattcatctgttttcctttagtacttgtatattttgcttttttacattaagtctctgttccagttggagtttatcctggtgttcatataaataataaactcagttttatcattttccttatgactatcacattattattatattattattatttttgtgtgtgtgtgtgtgtgtgtgcgtgtgtgtgtgtgtgagatagggtctcactgtgtcacccaggctggagtgcagagagatcacagctcacagcagcctcgatctcctgggctcaagttatcctcccacctcagctgctggagtagctgggactacaggcgtgtgctaccatagccagctaatttttgtgtagacccagggtctcgctctgttgcccagactggtcttgaactcctgggctcaagcgatctgcctgccgtggcctgtcaaaatgctgggatttcaggcgtgagccactgtgcctggccacattgcattattttaatactactactttttttttttctttgagatggagtttcgctcttgttgcccaagctggagtgcaatggcgctatcttggctcactgcaacctctgccttcctggttcaagccattctcctgcttcagcctcccgagtagctgggattacaggcatgcgccaccatgcccagctaattttttttgtatttttagtagagatggagtttcactatgttggccaggctggtctcaaactcctgacctcaggtgatccaccaacctcggcctcccaaagtgctgggattacaggtgtgagccactgtgcccagcctgatactacttcttttaaagttcatcatgcttacaatgatttcagatactgcccttatcatatatcatatttctgtacacagttgaatctatttctggattttctgtactattccattggtctgacttgtcacttcatttgacaatatcattcttttttaaaaaaaattattttgagacagaatcttattctgttgcccaggctggagcacagtggtgtgatcacagctcactgcaacctcggcctcccaggtacaagggatcctcctacctcagcctcctgagtaggtgggactacaggcatgtgccaccacacccagctaatttttttttatttttggtagagacagggtctcactatattgcccaggctagtctcaaactcctgaggttaagccatcctcttgcctcggccattttttttttttaatgtttggctgggtgcagtagcttatgtctataatcccagtgctttgggaggttgaggcatgaggatggcttgaggccaggagctcaagaccagcctgggcaatatagcaagaccccatctctaaaaaagaaaatataaatttcattgtgatattctgaaatacatatttgatcttcaaccctgtttcctgacataataactcctaaaatcttaggctctccaaagtgatgtctttttgtatgctattgattggtttatggctggcagctcctaggtagcttcaggataggggtcagtcaccagaacgaccaaggcaggattagaggattgggactttctgcccacccctctcccaacctccagggagtggagaggggctgagagttaagttgatcacctatggccagtggtttagtcagtcatgcccaaataatgaagattccatcaaaacccaaagggacagcattcagagattttctagacatctgaacacacagagtttcctgaaggttgatgcacctagggagggcatggaagctccaagcgccttccctaatacttcgttctatgcatctcttcatctgtatcctttgtaatatcctttataataaactagcaaatgccattaagtttccctgggttctatgtactgctctagtaaattaatcaaacccacagagggggtcatgggaaccctaacttgaagcagatcagtcagaaattctggcagcctgaacttgtgatatgtatctgaagtcaggcagtcttgtgggactgagcccttaatctgtgagatctgacagtgtctccgggggaatcgtgtcggaacggaattggaggacacccagctggtgtctgctatagaactgattgttttcttggtgtgtgggaaaaacctccacacagttgaggacagaagtcttctgtgttgattgttgtggtgtgggagcagaggaggaacagtttgtttttttccccactcatggtgaactacacaatgtgaaatttaccatcttaactactgtatactacttttagtgtacggttcagtggcattaaatacgttcataatgtgtaaccatcaccaccagcagcatctctataattctttatctcttaaacctgaaactctgtacccgttaaacagtaactacccattctcccttccctttagctctggcaactaccagtgatggtgccattctttcatgtatggatgttttgtatgtttcaatatctggtgtgggtagtgccccgtccccaacccctgttgcttttctttttcatggtttttcctagctacttgtgcttgtttgttctttccaatgaatttcatcagcaatttttgtagctccgtaacaaaaataggtattttaattgagatgatgttaaatgcattaacttagggagaactgatgctgctgcagtgatgtttggtcttgctagctaagaacatgctatgtctttatatttgcttaagccatgttttgtgtctttctggagtgctttcatggtttactcttgtagatactggatgttaccaattttaagtttatgcttaggtattttctgtatttttagacaattacgaaatattttataattgtaaatattttttacattatcttattctataattatggttttgtgtttgtacatatgaacactgatttttatctgttgattttataatgtgccctttactaactatcttatagtttttccagatgtattcttgtatcatctgtaaattgagatagatatttgctctttttggccaactatctgtagggtccctagtttctctatctctctatctctctcttaagtcaaaaatggttgctggctttaggcatttgattgcaaaatgtcaacatttgtttttttttttaaatcaaattaattgatatataactcatacatgcagaaaatttatgcttttaaggtttacagtttaatcaattttgagaaacttatgtaatcatgttgctactactacaatcgagatataggatatttctatcactggccgggtggctcacacttgtaatcccagcattttgggaggccaaggtgggtggatcacttgaagccaggagttcgagaccagcctggccaacatggtgaaacccagtctctactaaaactacaaaaaattagccaggtgtggtggcgggtacctgtaatcccacctattcaggaggctgaggcaggagaatcacttgaacctgggaggtggaggttgcagtgatccgagatcgtgccattgcactccatctagcttactgggcaacaagagcaaaactccatctcaaaaaaaaaaaaaaaaaaaaaaaagaatatttctgtcactcttgtgactgtttgtatcaatacctcttctaacctccagttcctggaaaccactcatcttatttcttttcctgtagtttcaaccttttcaaaataccatataaatggaatcatactgtatctatatctatatatccttttgagtctggcttcattcacttacataatgtcttagagattcatccatgttgctgcatgtatttgtagttccttttttattgctgaatagtattccattgtatggatatatgatatttatctattcaccaactgaggataattgggttgtttccagactttggtgagtagaataaagctgctataaatacttgcatacaagttttttatagacataggttttcatttctcttgggtaaataccttacaatgggattgctgggtcatacattgtgtgtttaactttataagaaactgccaaatcacctgtcaaagtagttgcagctttttgtatttctgtccacaatgcatgaaagttccagttgtcccacatctttgctagcatttggtatcttcagctatatttttctttagttattttcattgttgtgtagtatagatctcatttctgttttaattttatgactttgttttaaacctttgataaaatacaaggctgagttgtcaaccaggccactttagtctaatgaatattcatctgaaacttggaaggtgggctgtcaccttgctcacttgtccctactcccagcacagtgggcttgagaattcttaaccacctaaatcaaccattgaccagtaaccaaggaaggccacttgtcttctgtttatttggaaggaaaagaatatttttatggaacttatccgtattttcaaagcaaactagcagttactcgattttaatgaaaatatagcttaaaaatggtgtcttttctttgtatgtctaagaaatttgcaagtttttcttaagcttgccatatcaacatgaaatgatgtcaaatttctactgatttgcacaggaaaacaatgaagagtcgttatatggaactctatgaccttaatagagacttgctaaatggatataaaattcgctgtaacaatcacacagagctgttgggaaacctcaaagcagtaaatcaagcaattcaaagagcaggtcgtctgcggggtaagtctcttttcataacactgcactttgatctgtaatgtttttggtggaactcattgaagatggtggtagcatccaataattcatattggggctgaaagtagcatacctttcacactccagagctggcaccagtcacttatgtttcagtcagtcggcctagtgtttggcttttgtctccggacttcaaagggagagaaaaccttcagctccttttcttagaccttcctgcatcctctaaagaaaaacctactatatataacccaaaggaaatatataaacatatatatataaataaaaccatcaaggcccaattagcaaaaaagagactgaaaattaatgctaagtgtctaacttaaaaatttagaaaagaacaataggataaacccaaggaagcagaaatatagccagagatttatacctgaattctgctgttttgggtcgatgctttgacttctttagaaataatctttgctaggtgactatgagctttgatccttttctgtaaaactgactgttggtttctaggtttgagacagtctctaagtcagttttttcaataattccctcaccaagttattttttttagggaatggtaagataaatcatatttcaagtataactcttttccctcctggttttatgttgttttaaaactgacgtctaattttataatttcatgtctaacaatcttttggttcctgatgtttcttcttatgcagttggaaaaccaaagaaccaggtgatcactgcttgtcgggatgcaattcgaagcaataacatcaacacactgttcaaaatcatgcgagtggggacagcttcttcctaggtgaggaaaatacaggtcatgaagttcctggcaaagattttctgttaaaaacctatgctggtttgctttggatcacaccctggtgaaccccgggtgctaagaatgaaaataaccttggtgagttgtacaaattaaagacaaagaactacatgtgaagatagacttgctttctatttttaaatcagtagtagtactgttgctgaataatactaggtttttatggaataggatgaatgcttttgaagtattagggcttcagagtccaattttgcttatttatggtatataaatacatatttttttcttgaaattgcaattgagtttgtacttttcaaatagattatctactttttcattaaaatgtaaagatgttaaactttgtgttgattgattataaaatcaccaccaaatcagaa

SEQ ID NO: 15475 - DNA, 35703 bp, Homo sapiens
cgccgaggctccaccgcgcagccgcaaaaagagcggacgggtctgcgccgccgcaggaggagcaggcggtacctggacgggttcgtcccgggctgtttcgcgtccggcctgaggcggctggggccgcgcaggtagtgtccctgcacttcttgcccgggcgcgtgaggccagctccgctgcgcttgtctccagcttccagccctcctcccctaagccgccgccatcatgctgctgcctgtgttcaccctgaaactgcgccacaaaatcagcccccgaatggtggccatagggcgctacgacgggactcacccgtgcctggcggccgccacccaaacgggcaaggtaaccgctcccacccgcagggagcccgggccccagggaaccacaggatctccgccggccgcgcccctgggatcccgtcccctctccgaccccgcccccagcccgtgttgcccggcaaccggtcggcgagcaccttgtggctccatcctgcagaggacagtggggtcttagaggaagagcttttctgagaagttgacgttttcttgtcatcaggcacttggagtcaggcgaggtcggggtccctggacatagggagcttagaaaagagacgtctcctgagggaaggggtttggttcgggttagcagtaataaccgaccccagattcaagccaggggcctctgcttgtcacttggaactcggaattcctctgactctctaacactgcttcttcttcctttttttttttttttttttgagacggagtcttgccctgtcgcccaggctggagtgcagtggcgcaatctcgggtcgctgcagcctccgcctcccgggttcctgcaattctcctgcctcagcctcccgagtatctgagattacaggcgcccgccaccacgcctggctaatttttgtatttttagtagagacaggatttcaccatgttggccaggctggtctcgaactcctgacctcaagtgatttacctgcctcggcctcccaaagtactaggattacaggcgtgagccactgcacccagcctttcacagtcctttaccgaacaacgacaaaagaatgcaatacaaaaattaacttattcaaattgcacttttgatccttgcccatgtacattcagttctttccccgtaatttattcactaagtattaggtgtttactatgtgcgattactgggcaagatgtgagagtcaaagagataaaagagaaatcatgtaacattcaccagacttctactaaacaccttctgtatagattttggagactcggatgtaaaaggagtccctactttcagaaagcttatagtccagaagctaacagacaaggcaaatcagagccctgtgtatttgacggaggcatgcccaaaatacatggaatgtagtgacaacgctaataacttataacaggcacaaaactttattacatgagtcatctcagcgtcgttgtcacaaggccaacggcagcagcatggcatagggatggtgtttcttggctccagtacctactaatttcatgaccttgggcaaggcacttaataatagtacctaatacgtggggtcatgagctttaaaaaagttaatacatgtaaagtgcttgacatataggaagtggtcactgattgttacctgttattttctttttatggttctcactttattgactagaaattgcagttcagagaggttcaatacagtgcttggagccactcaactagaaagtgtggaatgtggtcagagtgcatgttctctgatccagtgtggatttaataagctaggatttgtgtaacaatttatagtttttaggacacttccatgtatattgtatgttatatgccttgggatacagaagtaaaaaataaggcttcattttcattaagtagtataacagagttaagctattaatacggggtctggcacatcatgatgttagttattgttacagttagaagtcactgacaggctgggtgcagtgactcatgcctgtaatcccagcactttgagaggctgaggcaggcagatcatctgaggtcaggagttcaagaccaacctggccagcatggtgaaaccctgtctctactaaaaatacaaaaattagccaggtgtggtaggtgcctataatactagctactcgggaggttgaggcaggagaatcacctgaacctaggaggtggaggttgcagggagccgagaccgtgccattgcactccagcctgggcgacagagtgagactcggtctcaaaaaaaaaaaaaaaagcactgacaaatgccaaaaagaacttcatgttgcttgtgctgtaggtgcatagcagatttataaatgggctgaaaatatcccattggtattaactcagcccctaatttgagggcttactatgtgctgggcagtcttcttagctctgcaggtgcattggagaatgtgacagacaagtttttgcccccttggagcttacatttgagagggggaaccaggtagttaactgaatatgcaagtgttttcataggagaaaaagaataagggattcagtgtgatgggagcttggtgtcttagacaggtggtcagatggcctctaataacatttgataagaggtttgaaggaactgaggaaacaagctctgcagatttgtgggataagcgccttgcaggcagagggatctgcaggtgcaagggccttgagctggagatatgcatggtgtgtttcaggagcacaaggaagccgctggggctggaaggcaatgagggtggtcatgaggtagacacaagccagatcatataggaacttgtaggccatggcaaagaccttggtttttatactgagtaagttaggaagtccctgaggattttgataaagtgggtgttggaatttgctttatgttttagataaaggctaactggctggtatgtggagaacagatgttctgtgacgggatgtagggaggtaggtgtcggagtagaagcagggagatcgggcagaggtccctagggcagcccttagatagagtgtgacctggagtggaaggcaggaatgcttgattgtagggctgttgtcgaaaatggcctaataataataataataataataaataaaataaaggagatcccttgtcctgtgtaactggatggatactttgtgttcagctctgtaaacaaatctaaaaagttctgacctgatcttttatcttgagaccttaaaaagaattagtagtattttatgactcaagtaatgccatgaatatattttcttaaaagcaattaaaacattccagctagggttaaagcctgcatgtctagaaacaggactttatccttacagctgggaccctgttgtgaacatggagctgactctgagccttagcaaggatatttttttaaaaggaatctctggccgggcatggtggctcaacacctgcaatcccagtactttgggaggctgagaggggcagatcaactgaggttaggagttcgacaccaacctggccgactgaaaccctgtctctactaaaaatacaaaaattagctgggcgtagtggcgcacccctgtaatcccagctactcgggaggctgaggcaggagaatccctaggacccaggaggcagaggttgcagtgagctgagattgcaccactgtactccagcctgggcaatagagcaagactccgtctcaaaaaacatataaataaataaaaggaatctcttgcagggtgaatattagagttttcctctggggacattttttctctcatggtaatgcttaggggtcagttgaatttatattgtttgcagcacctcctcagctagaacaaaagtgtgaacttcagcaagtcctttgaaagccctgggagtggtctttttgtcgtatgactgagattggctttctttccttgcctgaagggacagacttgtctccctgtggactctctttgagtgtagagaacagcaggagggaactgggggaaagtctgactcctgagatccttgttgctcttgacaaaaattgcaaactctttccattccggtaagaatgaatatggagcccgtaagctatttctgctcctgtactttctcagcatattggatttctggaaaactttgtaagaattggtttgttcagaactgttataaaaggaagtgtgatgtggtggtggctggagcgcagggcctggagcacaccaggctcttgtcttagccctgtcaccagtctcaagaccttggcaaagggccttaactcttccgacctcatatggaaatgaagggttggtgtcaggttcaaatgcaattaacattgaccaaggcatgttataaagtgttacacaaacggaacatgaaggcagtgttcagtggctgcacgttttctatgtttttagtcaattcttttgaaaattattttttgttgaataggctgccttgggtaggtgttaatttaaaattaattctgtttggatttatgtgaaagagatgaaatactcatgtaaattttaaaaattttagaactagaaggggctagagggatccctagtccagtgtttttcatcctcccaacctttttggtcatattgcccaccttggaacttttttagaccaagaaaattttcccagtgaaattctgatacctcagatatactttgtatctctttttgtactgtggtcctgcgaagggctacacgattccccatcgcaaacccatttacctgtcctgggagtgatctcgcccctcttaagactgcattttatagtccaaacctcctttttacaggtgaagtctaggaaagttgaataatttatgcagacactcagattatatttatgatagttgaaactgttgaatttattatctttgggctaattacttagttctatgtcactggtataaactgtgaaagccttcaagatacttgatttgcatgactcggtttaagtttgtgaaacaggtttactaactagcagaccattttaaggtctaggaagtgattcattaggtgcttggatgaaagataataaaggaagtgtttattctgttttccatgatcttcttggtgtgtggcaatcacattgaaggtggtagcagcttattctaggttgatcgggaaaaggctagctcctaagagtgctttgacatcctgctggtgggtagcatgtaagctggcctggtaagcagtgactagatcttgttcattaccttgttccttacaaggctaagaaccactggatttccgtgatttcataatgactgaaagttgtccatgcattgaactatgtacgagtgttttaagtttcataggagattaaagtgacctcttgttaatgtggatgtgttaataacctggttcttttttaaaaaaatgtatgatactaattttttatattttaagggaatgtaattagttatttttgtttcaggtttttattcataatcctcatacacggaaccagcatgtcagtgcatccagggtcttccagagccccctggaatctgatgtttctcttctcagcattaaccaggcagtcagctgtctgactgcaggcgtattgaaccctgagcttggctatgatgcccttttagtggggacacagactaatcttttggcttatgatgtctacaataattcggatttgttctacagagaggcaagtataacctttataaccataaaattgtcattactcattaatgtccattttttatgcttagaagagatcagatcatttattttggtctgtttgttgtatgactgttatagtataggtaaacaacatggagattttgctgttaacatctgctttatgtactcggaacttatttatttggttatggttgctaatcgcttggtgacactcgagcttatctctatgaggtatatctgtgatactgccatctgtcaagatctgttgagaattcagccaagagctgggaagccaatagacaggtctcctggtggacttgcattcaagtttagtgcaatagtttgtagaagcccttactgtagcctgccacctacaggctgctgcaactttaatacccaagcaattcatatttgttacagaaaagataaggaagtaaaaagtaaaagaaattacacctattttttcatctagaaagagcacttaactgttgagtttttgaatccagattttttaccaagcatatatgaatacattttgtagtaaaatggggtcatatatacatgtagccttttacttgtttttaccctatagcagctttattaagatatgattcacatgtacaactaacctacttaaagtatacaattcagtggtttttagtgtatccagagagctgtacaaccatcaccatcatcaattttcaacatttttattaccccctaaaaaacccatacccattagtatcactccccatttttctttaacctcctaaccttaggcaaccagttatctactttctgtctctagaagtttgcatattctagacatttcataaacaatggaattatataatatgtaatcatttgtgactgccttctttttcttagcatgatattttcaaggttgatccatgttgtagcatgtgtcagtaattcacttttatggctgaataatattccattgtatgtatataccacattttatttatccatttatcagttaatggacattccactccctggctattatgtgtggctctttcattcaataatatgttgtgaacatctttatatgaagttactacatacccgttatgtcattcttattggttctgtagtatttcattgtgttaatgtaatttgtttaaccgttccatgttgttgaacatttatgttatttccattgtttctgtattacagttcatagtgtaataactgtatctctttgaccacttccctgattatttcctgaggataagttcctgaaaatgcagatggttttctttctttttgtttttgttttctgagacagagtcttgctctgtcacccaggctggagtgcagtggcatgatcatggcttactgcagccttgacctcatgggctcaagcaattctcccacctcagccttctgagtagctgggactacaggtgtgtactaccacacccagctaattgtttattttttagagagatagggtctcactatgttggccaggctggtctcaaactcctgggctaaagcagtcttcctgcctcagcttcccaaagtgttgtaattatagatgtgagccactgcatttggctggttttcttctttgtctattttttgttgaggtaaaatgtacatacatgaaaatgcacagaccttctgtgtacagttcaatgagtttggatccctataaccaataccccaataaaaatagagaacattttcatcacctcagaaaatattgttgtaccccattccagtcaatttctatctcccatagacaatcactgttctgacttctgtcagcttagattagcttttcctgttgttgaactccatacaaatagtgtctggcttctttcacttaacataatacttgtaagaattatccatattgttgcatataaaagtagtcttttgttgttgttgctaagcaacaaaaatagtatattccattgtgtgaatatactatggtttgtttatccactctcttggtgatagacaagtggctggacatttggattgtttcagtttttaacaaccatttttgtttaagacttgtttttaataagacttttttatataagactttttgtagatatatgttttaatttatcttgggtaaatacccaagagtggaattgctgggctatgtggtttataagaactttatgacactgtgaaactgtttttgcaaagtggttgtatcactttatactcctgcctgcagtgtaggagagttccagttgctccacatcctttgtcaacatttgttgttgccagtctttaattttagccattttggaaggtgtgaagtgatatcttaggtgtggtttcattttgcatttccctgataatcattgatgcagagcaccttttcttgtgcataaatggacatttatgtgtcttccgtgaagtgtcttaagtcttttgcctattttttattggtagtttgtctctttattattgatttgtagacatttcttggatatactggatacaaactctttgtcagatttatatataataaatattttctcccagcctgtggcttgttccactaggcatgtgtcttttgatgagcaaaagttttgcatttttgtgaagtccagctgatcacattttttctttagtggttaggactttttctgccctttgcctatttcaaggtcacatcgtttttgttcagaagtgaaatcgagtttaggactgtattagtcagggttctccagagaaacagaaccaataggacatgtacatattagagggggaaatatttattttcaggaattggcttatgcagttgtggagcctggcaagtcaaaaatctgcatggtgggccagcaggctggagatctaggagagaattgatgttgaagctcaagtacaaaggctgtctgctggtagaatcccttcttccttgggggaggtcagtcttttttctattaagtccttcaatacttgatagaaagttcttaatagaaagtattgaaggacttaatagtaaagtagattattatccatatgtgcgtgggccagttaatgtgtgaggcccacccacattatggataataatctgttttactcaaaatctgctcagtttactcaaaatttggcccaattaatatgtgggcctgcatattatcgtgtctaagataatgtgtccttttacttttcttaggtagcagatggggcaaatgcaattgtgctggggacattgggagacatttcttcccctcttgcgattattggtggcaattgtgctctgcaaggtttcaatcatgaaggaagtgatctcttttggacggtatgaagaagaaaacattctttttggtacccttaagcatttttacttttaatgttcttttttaaccaccaactctactgagtaataatatttataattctgtgcattaaaaaaggatatgaataattcgaatagcattcattcgtgttttgtgtaatcctctccttcatgtagctaatatatttggagtaaatggagaaacgatggcatgctaatggtttggggttttattttcaggttactggagacaatgttaattccttggccttgtgtgactttgatggtgatggaaagaaagaggtatgtgggggaggagatatctctcttgtgtgttcagccaaatgaattttgccatgacagtgacattagtgttgacagaagtgtaagcttctcctggctgattttggtgctctgttgcctaaatgctcagccagttggccccattcgtctttctcttctcttttgaacaataaatcacttgtgcttgtgtaataaatacaaagatcaaagccatggtgtttcagagacacaggagagggcagagagggtagaagagttgggatttcagtcatattcacggtcttatgaattgctcctgatgctttgaaaccatattagtatatagttttcaattttggccaactgttttgaggaatctaaatgttttagagattggcttttagcctttgaaattattcttatggttaccctagaaattagcttcttgagcagttagtaggtgtgacgtgctgtgttgggcaccgacttgcccctctcttgtccatggacactggactctggtgtttgaacagggcttccatctgtaggcagagaaagttgctgatccagggagccttttcaggtactcagggaaataacgtattctggcaagatgtgcagctcccatggcaggataaaagctgcagtagcccctgttccttcattgattgaatctgctgatcctcccattagagggagcatttctgagcatcaaacgattatgaggttgtcaatcttgggtggcagaagcagcatgcaaagtactgtgcaattttttgttttgtttacagaaattttgttgtttgcacttactcacctgaacatgtatgatatttccccttcagcttcttgttggatctgaggattttgatatccgagtttttaaggaagatgagattgtggcagaaatgacagaaacagaggtaagaagctccacctcgaactatggtaaccttgagcaagatagatcagtactgtcagatgaaacatcaagtgagagtgctggggcatctccaaacccaggtggttttaggataaaagcttggggagggggtcagacagagctgtatgttatggtaagaaaagcaataaaaatcctaattaagatatattttgaaaagactgattaaatagagaaaaattattgcatatagttgaatacataaaggcatttcttttaatgagttaatacatgcaaataataataatggcaatcatttattatgtacctattgtatgccaggtagtgctctaagtactttatatgaagtaacatattgaatccttacaacaaccctaataggaagataaattattattatttctatagatgaggaaaatggtgttctggttttttgtttgtttgtttgtttgttttgaggcagagttttactccatcacccaggctggagtgcggtggtgcgatctcggcttactgcaagctccacctcccaagttcaagtgattcgcatgcctcagcctcctgagtagctgggactacaggcacgcaccaccacgcctgggtaatttttgtgtttttaatagagacggggtttcaccatgttggccaggctggtgttgaactccagacctcaagtgatccgcccaccttggcctcccaaagtgttgggattacaggggtgacccaccgcgcctgtattttttgttaagttacttgtacgtagtcttggctatgaaatggcatggtcagcatttgaacctttatgccccttcctcctcatcatgtgtattcagtagggctgaagtgcataaatgagatgtctatatttttttcttcctgcaaattcagtacttctttggcacatttctgtaggtaaacttaaaaattatagaacttgtgattagaatcactcatgtaactgaacctgagatatttcttaatatcccaggttgtttaggcctgatgtttaggcctggtgcagtggctcatgcctgtaatcccagtgctttgggaggccaaggtgggaggatcacttgaggccaggagtttgagacccgcctgggcaacataacaagactccatctctacaaaaaatattaaaaaattagccagaaggtgatggcacacgtctgtagtcccagctgcttgggagactgaggcaggaggatcccttgagcccaggagcttgaggctacagtgagctatgatcacgccactgcattccacccaggggcaacgagaacaagactctgtctcaaaaataaaatttttaagaagtaacagtgttaagagttaggaaaataaagacaaaaataaagcaaaaagcactatctaaagattacctgtatcctttatggttttgacattcttaggatatttatttgctgctggttttccaggattgggcaagactcaaacagaaaaaaataagatattcttaattaaggaataagaggataaaggagcaatagcttgtgaacgttgtaagtggacagaaagaaaccagtaaaagagagtcttagagatcagaatggtgggattttgcaaaatttagttatgtggtatttaggagtctgtatcagaaaagctcgagggcactagtctcaaaactgaccttggccacttgtctttaaattacttgcttcatgtcactcataaaagctgcctaagaaggtcagacttcttttctcctaactataaaaggagacaaaaagcaaaacctacacattgacatacagtgctaccaatgattttaactaagttatcctatagcaagagtcatcagtttttatttagtcctactatactttttatatattcacagttatcatgatgtaagatgatagttgtggacagagaagaaatgaagaggagaaatgggtgccaaaaggagcagtctgaggatgtgtgtttatacagggagtctgttttttattttattatttttttgagatggagtttcgctcttgtcgcccatgctggagtgcagtggcgtgatcttggctcactgcaacctccgcctcccaggttcaagtgattctcctgcctcagcctcccgagtagctgggattacaggcacctgccaccgcgcccagctaatttttgtatttttagtagagatggggtttcgtcatgttggccagactggtcttgaactcctgacctcaggtgatccacccgcctcagcctcccaaagtgttgggattacaggcatgagccaccatgcctggcccgggagtctgttttgtgtgtatgtgcttatatgtgctttctgaagagagggcccggagccttcattacattcttaaaggggtttgcaacctcccccaccaccaaaaaaaaacaacttgagaatccctggctgatagatggtgtgtcccgaattctcatatccctttcattctaatttgtggtaaatcttttctcctttggtgggaatcattcagattttgttggatttttattgcttgttaatattagatttgaggagactgaattctttgaaacatctctttcctaaatcctagaaaagaggacaagaacctggaatagagttagggatttgaggggacttgttgatcttctagtccacaaaaggaagaaactggtgaactaaggaagcagtaaaagagctgaggaatctggggctaaatttatgaaaatatggacttcataacattgttcacttgcagggccattttcctgttctctttgttaggttttgctcctagctcaaatatcatttcccagatcagcaaaatcatgattcatttggcagttgaacagtatgaagtattgtcagaagaatgccttgagctaaataattctggaatcctacacagcactttgtattcatagttaagtgaagtgggtggttttgtagaaaagctgtaggtgtaaaggaaattatataactattctctgctttatacaatttatttcttaatatctcttgtattaggaacagaattagaaagtagatctgcaggatcatggatatcattaagctttggttttaactttaaaggaaagttttgttcagtacctaaaattttatccttttaaggatgtcaaatccttgaacagtcctataaatatttctgtatcatatatgcattctgtatattgttatatactacacaaatccacgtgcctgggtttttacttttcaaaggattatgtgttctttcttttacctctagcaaacaaattatgtcatagaaagaaaagtgtatacatgaagtaagatattcaattgtgtattgttataagtcttttaaaaattgagactgtaggatgttataagttaagtaataatcattaaagcctcttgggtgaacatatataatatctattgtatatgcatattttcgatcttgtgtagttagcttatgttttccttagtccttcagttttcatgtgttttttaaaaataattttgtgaaacttgccacataaggttgctctaaaacaccaaaccctgtgagtttatttaaatctgattatacaactctgaagtagatgacatgtatcgtagagaagaggaatacattccccactaatggattggaagcgcttttaaatctaattttaacatagttgtaacaaggagtgtgaagtcttataaagccgtacttgacagtaaactgagtcttaatgaaaagatgttgtgtttttgtggattgttttgcagatagtcacctctctttgtcccatgtatggcagtcgatttggttatgccctttccaatggcacagttggagtttatgacaaaacatcccgatactggagaattaaagttagtataatttagcctttgatattcaggcgcttgatagttattgtgagacttctgtgctaattattaaaattctttttcagtcgaaaaatcatgccatgagcattcatgcttttgaccttaattctgatggagtgaatgaactgataactggttggtccaatgggaaggtaagtttgaatagcaaagttcaggtataattcagagtagtaattgtccaaggtgtattggctgtaggacttagaacagtaacattgggatgtaaacttcagttcgttccttggcaatgtttttacatttaacttaataatcttgacacattcttcctgctatcattgtcaagagctgcacagtgagagagtgtaagtcttataagcggtgtttgggggaaatcttcggggagattctgtctaaatctcttatttgaagtgctgagaatccatcagccagattgattctaggtagtacaacagtaaaaaaggagttttaaggaattgtttgaatagctcttttccaatacatcttcaaaactgcctgaaaacttagcactaataggaagaatcatgttagcatattgttttctgagctataactttaaaataaaatccttttgcttgctttccttttttaacttcaaatcagaattttttacagtcttttggcaagtcaggattgtcttcttagaagctgcctaggtagctgccagatctccatggataccatttgccctcgctttcttgtctgtcagtgttggattgcctgaaggggatcagcaaattcttatcttttcttctttgatttatctttacttttctctagcaccttgtaagcattcctttggtgttacgtgaagaacggattctaaaaagctgttatgttggtttctgcttcttcacttagttttgtcattagtatgggtactaaaaattataagactgtatagttgcttattaagaaatatgaaagtctgtgaaatgggtgtcttagttggtttgggctgctgtaacaaaataccatagggtgggtggcttataaacaacagaaatttatttcttatagttctggaggctgggaagcccccatcaaggtgttggcagtttcagtgtctggtgagggaccacttcctcataggagccttacagggtggaaggggcaagggatctctctgggccttcttttatagggcactaatcctgttcatgggggctctgcccttatgacctaatcacctctcacaagctctacttgccaataccattcattaccttggctaataggattcagcataggaatttgtgggggcaaaaacattcagatcatagcagtggatcatattttgagggaatataaattattatgactgacttaagaattagaaaactactagacttgaaaacttgtcaggttaccttgaaatataattgttgacctagatgtttttatagttaaatgcttttgaaattttaagggatttctattatgtaatgcgttcctgagcatgaaaaagataagaaaattatataagtggaaaaaccgattatctacatctaacagaaatatacaaaaaggaaatatacagatccaacttgtgaatacaggtgtgaaaatattaaataaatgctgctagacaattaactttgtcttttgtatgtcatttgatgagttggagggccatcctttcctttcagggtaaaacctcccagttggattaagcaaaagatcagaatatccacagaaatattaatttgtagtcctgcttcttagttagcaaatgagccttcttatttgctaaatattgtggaaatgcagtggtagaagccattaggtagctaggctttaactagaaagaagcaagttcaggtcagtctgagttagagggctacattaatgtgctttgttaaaaatgcaggtcattcgttctttcacaggctttagcattcataattttcaggcttccatgatgttattaatagcattaatacttgacagtgatatactgtagacaaggggtaggctgtaacctaaattactttatgttttggttgcaaagttttgcccagaagattgtttatgaaaagacaaaactagtgagtagcattggtcatcgaaatgattgctatgctagattttctgtagctagccttttgttgataatacctgtgtccttgcctggaacataatcatctttttttttttttttgagactggagtctcgctttgtcacccaggctggagtgcagtggcgcaatctcggctcactgcaacctccgcctcccgggttcaagcgattctcctgcctcagcctccctagtagctgggactacaggtgcgtaccaccacacccagctaattttttgtatttttagtacagacagggtttcaccatgttagccagaatggtctcgatttcctgacctcgtgatccgcctgcctcggcctcacaaagtgctggcattacaggcgtgagccactgtgcccggcctcataatcttcattttaagtgatggtcacttattatcacttttgagatgcatttgtttctgatcagtcatttatttatttgttctctctcttggaaatgggagacttagaggataggagagctctctaaagtatctgaatagtttttatgtggaagaggaactcttaacagggttgttgtaaaaggttgcatggtggaagactgggctaactccgtagtttctgaacttcagattcaacatactttatacatttatatataataaagatacaatttttatatagagctaacatttattacgtacttctgtgtgtcaggccctgttgatatatgttaacttcattaggcctcagttatacccaatgggatatagtactgttaatttctccatgttctggttattgaaccccagatgaaaagaccaagcacagaatggttaagaaacttgcaagatgctgtggatagtacgtggcagagctagattctgaacctgagcggtttggccattaagcccatgcccttttgcactgtgctgtgtgtactatatgtactggctcttagcagacccgtttcttcaagtgaagcattgtgtgaaggcctatgaaaaacagcttttatttaaaaagaaggaagcacagctggttgaggctctttagggtccctcttggccccagcagtcataggtatctcctgagaagttgtagggcttcatagaatactcttgaaaactgctagactaaatgacctttaaagctgatttttatttttaaattttgtggtttttaaacatgtagcataagcaacttttaaatttgtgttttatttgtaggttgatgctcgaagtgaccgaactggggaggtcatctttaaggacaatttttcttctgcaattgccggtgtggtagagggagattaccggatggatggccacatacagttaatctgctgctcagtggatggggaaagtaaattgggatgagaaaaatccttaaaaagtcacgttttccatttgattgggtcaaaatatcaggaaatttcacctgaagtatttgtaccgagatcctgtagttctaataaattcaccaaagttggggagaacttaggtttttgtttttaagagcaggtaattgatgacctaaaagtatacctggttatacttgcggttttttccttctgttcagtccggggctacctgcctggcacggctgagatgaggggcaacctcatggacaccagtgcagagcaggacctgatccgagagctgagtcagaagaagcagaatctgttgctggaactccgtaactatgaggaaaatgccaaggtaggtgtaggtcctaatgtgaccaggtaatggaggctgaaatgttgagactgaccgggaggatcagcaaatatggaagaatgagagtgtcattgccagggtgtggcctttttgccattgtcagaattgagaggggatatatgctttcgtcttgaaatttcatttccaggtagttaaactgtagaaatgttttcctgattgtttaaggacatttcctgcagcactatttatttatagcagtgaaaacagctggaagaaacttagatgttcgtcagcagtagggagtatgtgctaaggaatattaagcagctcaaagaatgaatacttggactgatatggaaggatatctgtcgtcttaccaagtgacaaaaggcaagaacaatatagaatgtcttttatctttttcaaaaacaaacatgttaaaaacagacaactgtaaaaactgtgtgtgtgcatacagcaaactggctgaaatattcctttaatttgtcctgtaatgcattactgtatttgaatttgatgtaacaagggaatttgtttgcttactttaaaagaacaatacttcaaaaatgttaaagtcatgatgggatacagtggaccatacccatagaaagatgcaagggtattttcccacagggccagatagagcaagggagcactaatgaggtgagttctctgaattctaaagaatcagattactataataataataatatgctggaggctctgtcttttgaagctgaatagcaatattatttaaaattgatattagttcagtgttttggtgactgagtaggaaatgggtggggtgttttgcaggctgaattggccagtccactgaacgaggctgatgggcatcggggcataatcccagccaataccaggctccacaccacgctctcagtcagcctggggaatgagacccaaactgctcatacagaattacgcatttccacttctaatggtaagacagtactcacagctggtatttagaggcacctgtgccatcttggagtcattcttttttttttttttgagacagagtcttcctctgtcttggctcactgcaagctctgcctcccgggttcatgccattctcctgtctcagcctcccaagtagctgggactacaggcgcccaccaccacgcccagctaattttttgtatttttagtagagatagggtttcaccgtgttagccaagatggtctcgacctcctgacctcgtgatctgcccacctcagcttcccaaagttggagttgttcttaaactgtttttactcttccctgcagacaccatcatccgagcagtattgatttttgcagaaggaatttttacaggtgaaagccacgtggtacatcccagcattcacaacctctccagttccatctgcatccctattgtgcctcccaaagatgtccctgtggatctgcacttgaaggcattcgtgggttacagaagcaggtgaccctttgcaagtcacagttcatttcaggacagcacttagaggagggcaagatgtataaattttccatatgcccagtggattcttgggggcctgagaaaccatttaatggttctgtctacccaaagtttctcatgaccttttatttcctcagtttgaaacctgtaaaaagaaaatggaaaaactgatatgtaagtttaagatggttctttttttttttttttttttgagacagattctagctttgtcacccaggctggagtacagtggggcaatctcagttcactgcaacctctacctcctgggttcaagcaattcttctgcctcagcctcctgagtactgggaccacaggtgcccaccaccacgcccagctaatttttgtatttttagtagagacaggagttcaccatgttggccaggctggtcttgaactcctgacctcaggtgatccacccgccttggcttccgaaagtgctgggattacaggcatgagccaccacgcctggctaagatcattattttctgtttttagtcaggtgatctcataatcaaaaaatgtttaattgatgatttgtcaatttgtagttttggccactaaaactacaagagttaggatgcacctttatattacagtcatacataacctcagctagtgaagaaaaactgctctatttgtggaagataagatactttttacatcccctttatgatattttaaacccttagtgcatgcaggtatatatgtagactcatgctgtctttaaatcccaaacctaatatattactgtagtactttaaccctcaagtgttttgggggttccttcttaagtgaaacccttaaatatcaattgatgacccagaagtggctttattttctgggccttgcattttgaaagaacattctatacaaaacaattctcttgtgtttcattgattggccatagcacccagtttcatgtatttgaatcgacaagacagctccctcgattctccatgtatgcgctgaccagcctggaccctgccagtgagccaatcagttatgttaactttaccattgcagaacgggcacagagggtgagtatctcgcttttctctttcaatgcttttacacagtagaatcctttagatgttatttcatagaaagggaaaattacattaatgtgttatattggtagcagtaaatatgatatgaaagaattctctaacttgggggtggcttgtaacctgtaataaaaatattgctaaaataccttctctcactttgaaaaagcatctgagcaatcctcagttattggtgaattcttaccagtgtttaattcctctctttccgttatggtcttagtgtggttgtcctggtgtagtatttcaagaggaacctgcagcaagatgaaaagagagtgggacttggagctaagaacgtttttggctttaagtgctacgttaactcattaaattcttagtgatcttggggaagtcccctcaccagtgtgagcctcagttttcttatctaataagtaaggataatcttacccaccttattgcgggggcccgaggattacatgattggtgtaacagtagcaccttgtacatttgaaaggactaataccagtggactttaaccttggctgggctttggaattcttggtgggactttttaatcatgtagattctcaggcccctgcctggcctgtggaaccacagactctataggtgggcccttccagaaggcctcatgggtggttctcatgtggaacctgtgttgcaagccactgcatggtgttactgctattaacattaaaacttatattttccttattgtgtggatatatctgtggtgtttgcccatgtatacttcattttacatttcttaaagaatagaatggaatggttttaagcacgctacattgtccaggttatacccacagaagagctgttgtgtaacagaatcagcatcatacctgaatcatttgtacattgcatataagactatgtctaagtagaagatgctatgaaatcatgtctgctgtggggccaggcataattatgaatgttacttaagagcataggtgaggtgagaaaagggaatgtgactagtgttttagtattttcttggtgtgggatgaagtataattcttttttttttttctcaacaaagcagtaaaactagaaagaaggagaactcttccctcaagaatggctgtaccttcatatctagaggcacattaaaaaaaagaacgtctgtaccttaaaaatggaggtcatttcattgtgttcattttcaaggttgttgtatggctcggtcagaactttctgttaccagaagacactcacattcagaatgctccatttcaagtgtgtttcacatctttacggaatggcggccacctgcatataaaaataaaacttagtggagaggtaatgtttaatatcacggggcatagatttcttttttgaatttatttattcaaacacttagaccatggaatgagaggggcatagatttctcatgtggtgtttaccattcagtccaaagtgaggtgggggacatcaatgtcaaggtcataaaaccacgttttgttttatttttttcacatggtttaacttagtctgttagtgttaccattttagacactggggtataatttggaatagctgttttctgcctccttcccttcatctcttccttgtctaatttggaaagaattgggaatacagaggtcaacaaaaacattttcaatgtttggatgattttgtcatttaatttctaaggccagaggatttaccttttagctagctgctggaaataatgcagtttgtaatttctttgagagctaaactttcctttttcaacactgcatatatatatatatgcacaataattttgttgagtatggggaaattcaggtactattttagctaagtttgtctaacatctgaggatgctaaacttgtctattttttctctgggtagatcactataaatactgatgatattgatttggctggtgatatcatccagtcaatggcatcattttttgctattgaagaccttcaagtagaagcggattttcctgtctattttgaggaattacgaaaggtgctagttaaggtgagggaatgcggtagatgcatttgtgagaatgtggtagtctaataatatttgaggagattaatggtactacaaatgtacttatgttatagtgatgttttcaagaatttttgcaattcttgaagtaaaaattgaactagtattggagagtttactacttaaggatttattttataaaaggaagtgtttagctcctgagcaccatgcttgctttgtttggtttaaagtgatgcatttaaatattaacattttcctttgttagctcttcatcttatttgtagtatctgctttggtcttcttcagtttgggtctttccaaaaacccaaattcaagataaaagagcaaaataaagatgattctgattggccccaaagtatacaatattcccactgcaaatccctaaaatattaatatgtgtgttgtgggggctcctggtgctaaagcatggggaagattcacatggagtgtcgtgttgaaattggaggcagcacagatgagttaacttgttgagacagagatgaaataacgggaagtagcttaattggtataagcgaacaggggaaagaagggggtctctgtatctggtaaatagtgtcttttcatttgtctgggttcaagaagtttgtgaggcctttttcattcctgagtgttcatggtctccaggtggatgaatatcattcagtgcatcagaagctcagtgctgatatggctgatcattctaatttgatccgaagtttgctggtcggagctgaggatgctcgtctgatgagggacatgtgagtatttgtcatggttagtacaggtgcagggttaaaaatgtgagcagtatggaatagcaactctcagatgttaccaatagaagtataaattgttacagtgactttggaaaataacttggcattatcagtaaagttgaaaatgcatgtcctctatgacccagcaattctattcctggtttatagcttagggaaagttacagcttagttatatgtatgcttataaaccaggatatttatataagaatatttgtaaaggcattgtttataaaaatctcaaaatggaaacaatccaaattagcatgaacagtgtagcgacagtggatgaattgtgatatattcatgcaatggaatactacacagcagtgagagcacatgaatctccatgacacataagagcaaggaaaaatctgataagcataatggacactgaaagaagacagacttaaaagactataaaatgtatccgtgtgtatagttagagaaaagagtaaactatagtttgggaaacatgcaataaataaaaatataaattcagggaagagattatcatataagatagtattttctcctagagaaggagggattatgttcagaaaaaacacattgggaaacttcctgtctgaagtcttgtttaacttcattaaatattctgaatttttctgaatatgtaacattttacaataaaaaagttaagtatgtacagtacaggtcttccttggtgcttgctaggatgccaaatttaccttgccaataaaatgtactgaaaaaaattcagtaaaatagttaacaaattatagatgaaatttatgtgtatatattaggggcaagagttcactcagagtgctgcttgtgttttttcctgagacgcctgaattattggcaaataattataatggttttgctcagaggtaaatggtttttaaaataattgtattgttgaaaatttcaaacacatacagaagtacttaaatataatgatttcatatataccacccacccaacttcaacagttatcaactaaagactgatcttttttcatctctacactcaccctctttccctcccaggcactagataattttgaggcaaattttggacattgtgtaattctagccacaactatttcagacaaagggcctttcaatatcatatatatatatatacatatatatacacacacacacacacacacacacatatatacacacgtctgtataaaaatcacaatgccatatcacacttagaaaaatttacaataattgcttaatattacaaatacctcatctgtttagatgttcccagttgtcttataaatgtggacatgtgtgttttaagttggcttgctcaaatcaaaatccagatcaaagtccatacattggatttggttggaaatcgtttaatcttttaatccacacttttgcttgcccactcagtctcttctctccttctcctgtggggtgccattttggattttgctggtggtatccttgtggtaatgtttagtattattcttctgtcccctgtatagaaagataatggtagatctggaggcttgattagattcaatttcaaattttggcaagaatacttcgtgagtagtgttgtttacttccatgaggaagcatgcaatttttgattgtttctttttatgatattatcagccattgatgatcattgcctagattcattatttcttttggggtttgcaaaatagtgatattctaattctgttattcttttcttcatatattagttgaaatacttctatgaaaaataatgttccctcatgaattaatgaattatttggttccctgaggtacagtttgtacaggaaagacagtttctttatcagctttaaaataatgtgttgatctccagcatgcactaggtgaccaatgagatttttaagtccttacatactcatgtatttgaacatatttaatgtgtttcaatttatatctgttattattaatttttatggctagttttttttttttttttcgagacggagtctcgctctgtcgcccaggctggagtgcagtggtgcaatctcggctcactgcaacctccgcctcccgggttcatgccattctcctgcctcagcctcccgagtagctgggactacaggcgcccgccaccaagcccggctaattttttgtattttcagtagagacagggtttcaccgtgttagccaggatggtctcgatctcctgagctcgtgatctgcccgcctcagcctcccaaagtgctgggattacaggtgtgagctactgcgcccggccttttacggctagattttccagtctgtgggcaatggaagtctctttaggttggatacagttacctttggacatggtcccattaatttggttggttctttgttttcttgtatgatgaaatgtttcaggcttatctggtacatttcccagtcttcatatggaaccagccatttctctcgagtcctggttcttttacatgagaaatggtatttagagatcatggtctgaccactaaagatgttcattgctactgggttgattattgtttttaggccttttcaatgcgtagagctaggaattttttttttcaatgagaaaatatgagttcatactatttaccattcagatttatgaatataggctcttcgattttattactgcgcctcttctctctcacattgaaaatcatggcttcaggttgggcacggtagtttacacttgtaatcccagcactttgcgatgctgaggtgggaggatcacatgagcccagggattcgagaccagcttgggcaacatagtgagacccagtctctgcaaaaaaaaaaaaaaaaaaaaaaattagctgggcatagtggtgcatgcctgtagtcctagttactcaggaggcagaggtaagaagatctctggaacctaggagtttgaggctgcagtgagctatgatcatgacactgcaatccagcctgggatgacagagcaagatctcttaaaaaaaagtgggggaatatcatggctccaatcagtatcaacataactatttgcttcattttacagcacagacacaacatttaagaatattagccaagttgttatcaacaatatgattgctgaaaacagtttaagattttttgtgtgttaattctttgtgtctttagggcatatcccagcagggagtttccgtcaaattactgtatcttaaaatcatttgagattatttctcttttggttatgccacagatttgatagagagttaggttcattgtcttattttgctctcagttttggaggattggcatttttacctttttggtttaattctattacatatttactaaaacctttttgtaattccaaagttagatctataagacaggcatgcacggaaaagtctaactttccattcctgtgaccttcattctgttctctcccttttactataaataaccagttgaacatttaagtatatatatgcagatacacacagatatatacacacacacccctcttcatgtcttagattaagtcatagtatgtatatatctttttctccaccttggttttttttttttttttttttttttttgagacaaggtcttgctgtcacccaggctggaatgtagtgatgcaatcacagctcactgcagcttcaaccacccgggctcaagggatcatctcacctcagcctcctgagtagatgggactaaaggcatgagccaccagcccggctaattttttatttttttgtagagacagggtctcaccacattgcctgggctggtcttgaactcatgggatctactgatcctcccaccttggcttcccaaagtgctgggattacagatgtgagccactgtgtccagcctccaccttgctttttacatttaaaatatatcttggagatttctccaccatggtgtagagaaatacatctcatttgtctttacggctacatagtactccattttctggctgtttttcagccagtttcctctatttggattgttttttttttactgtagataatgcttaagtgaatagttttgttacgtaaatctttttatatttttgccaggatagtttgagaaaaaggcttaacaaatgggattactgcagtaaatgatacatgcatacagaattttgcaaggtcttgtcaaattctccataggtgttacctcattttgtattcccataagcaatgtatgagattgcctgtttctcttcagccttgccagtggagtttgtgggcatactccaggggatgagaaatggtctcttagttttaatttttattttttaaattttattttattgtggtaagaccacagcatcagatctaccttcttaacacatttttaagtgtataatacattatcgttgactataggtgcagtgttgtacagcacatctttagagctgattcttcttgcttaactgaaactattggtaagcaaattcccatttcttcttcccctctttcaactatcattctactctttgattttatgaatttgactattttagatactccatgcaaatatataatatttgtccttctatgactggcttatttcactcagtgtaacatcctcagagttcgtccatgttgtcacatattgcagaatttccctctcttttaagactgaatagtgttccattgtttatatgtactaaattttctttatccattcacctgttgatgaacatttatgttttttccacatgttggttattgtaaatagtgtggtgatgaacgtgggagtgctaataggtcttcagggtcttgtcttcagttcatttggataaatacccggaagtgagattgctagatcatatatggtagttctatttttaattttttgattacatttttaatatttaatcattaaaaattaaaaatttaaatttttaatatttaatcattaaaaatttaaatttttaatatttaaatgttttccatagtggctgcaccatttttcattgtaatcaacagtgtacaagggttccagtttctctacatccttgccaacacttgttgtcttttttttgataattttcatcctgacaaaggtgaaatgatacttcattgtggttttgatttgcatttccctgatgactagtggcattgggcgtctttttatatacctgtcggtcatttgcttttcttgtttggagaaatttctattcaagtccctagctcattttttaattggattactagtgtttttttttttttttttttttgctgttgagttgtaggagccatttattatgttcagtattgggcatttttcattgttttaattcagggccatttccatttcttttttgtgtgaactatttgtctgtttacatatcaggtactgttgtagtccattttgtgcctctataacagaatacccgagaatgggtaatttataaaggaaagaagttgatttagcttatgggtctgtaggctgggaattacaagaaacatggcactggcatccgcttgacttctgttgagggccatgtgtgaagtcaaaacatggcagaaaaggtcaaaggagaaggggacatgtgtgaagaggcaaagcctgaggggtgccctaactttataacaacctgctcttttgataacttcattcctgcatgagcgagaactcactcctgagagatggcattaatggcattaatctattcatgagggatctgcccccatgacccaaacactccctactaggcccacctcccaacactgctgtgctggcatttcaacttcaacatgagttttggcggggacgaaccacatccaaaccatagtgggtatattaatctcttacgtgtgatatgagttgcaaatatgttttccggagtttgtcatttgggttttccctttgcttagatttttaaaaaattttgctttaatgggccaggcgcggtggctcacgcctgtaatcccagcactttgggaggctgaggcaggtggatcatgaggccaggagatcgagaccgtcctgactaacatggtgaaaccctgtctctactaaaaatacaaaaaatcagccggtcgtggtggcgggcgcctgtagtcccagctattcgggaggctgaggcgggagaatggtgtgaacccgggaggcggaggttgcagtgagctgagatcgcaccactgccctccagcctgggtgacagagtgagactccatctcaaaaaaaaaaaattttgctttactgttggttttaccttgtaagagcttttaaaattttgtatatagtcaaattataagaaaatttgactacattaagaaaatgtaagtcattttcttaatactttatttatttatttttgagacagagtctcactctgttgcccagcctggagtgcagtggcgtgatctcggctcactgcaacctctgcctcccagattcaagtgattctcctgcctcagcctcccaagtagcgctaccacacctggctgatttttgtatttttagtagagacgaggtttcaccatgttggccaggctggtctcaaactcctgacctcaggtgatctgcccgccttggcctcccaaagtgctgggattacgggtgtgagccactgtgcccagccacattttcttaatacttttacattttgaattactgttagaaaagttttctttaacagcagggtatagagtaattcatctgttttcctttagtacttgtatattttgcttttttacattaagtctctgttccagttggagtttatcctggtgttcatataaataataaactcagttttatcattttccttatgactatcacattattattatattattattatttttgtgtgtgtgtgtgtgtgtgtgcgtgtgtgtgtgtgtgagatagggtctcactgtgtcacccaggctggagtgcagagagatcacagctcacagcagcctcgatctcctgggctcaagttatcctcccacctcagctgctggagtagctgggactacaggcgtgtgctaccatagccagctaatttttgtgtagacccagggtctcgctctgttgcccagactggtcttgaactcctgggctcaagcgatctgcctgccgtggcctgtcaaaatgctgggatttcaggcgtgagccactgtgcctggccacattgcattattttaatactactactttttttttttctttgagatggagtttcgctcttgttgcccaagctggagtgcaatggcgctatcttggctcactgcaacctctgccttcctggttcaagccattctcctgcttcagcctcccgagtagctgggattacaggcatgcgccaccatgcccagctaattttttttgtatttttagtagagatggagtttcactatgttggccaggctggtctcaaactcctgacctcaggtgatccaccaacctcggcctcccaaagtgctgggattacaggtgtgagccactgtgcccagcctgatactacttcttttaaagttcatcatgcttacaatgatttcagatactgcccttatcatatatcatatttctgtacacagttgaatctatttctggattttctgtactattccattggtctgacttgtcacttcatttgacaatatcattcttttttaaaaaaaattattttgagacagaatcttattctgttgcccaggctggagcacagtggtgtgatcacagctcactgcaacctcggcctcccaggtacaagggatcctcctacctcagcctcctgagtaggtgggactacaggcatgtgccaccacacccagctaatttttttttatttttggtagagacagggtctcactatattgcccaggctagtctcaaactcctgaggttaagccatcctcttgcctcggccattttttttttttaatgtttggctgggtgcagtagcttatgtctataatcccagtgctttgggaggttgaggcatgaggatggcttgaggccaggagctcaagaccagcctgggcaatatagcaagaccccatctctaaaaaagaaaatataaatttcattgtgatattctgaaatacatatttgatcttcaaccctgtttcctgacataataactcctaaaatcttaggctctccaaagtgatgtctttttgtatgctattgattggtttatggctggcagctcctaggtagcttcaggataggggtcagtcaccagaacgaccaaggcaggattagaggattgggactttctgcccacccctctcccaacctccagggagtggagaggggctgagagttaagttgatcacctatggccagtggtttagtcagtcatgcccaaataatgaagattccatcaaaacccaaagggacagcattcagagattttctagacatctgaacacacagagtttcctgaaggttgatgcacctagggagggcatggaagctccaagcgccttccctaatacttcgttctatgcatctcttcatctgtatcctttgtaatatcctttataataaactagcaaatgccattaagtttccctgggttctatgtactgctctagtaaattaatcaaacccacagagggggtcatgggaaccctaacttgaagcagatcagtcagaaattctggcagcctgaacttgtgatatgtatctgaagtcaggcagtcttgtgggactgagcccttaatctgtgagatctgacagtgtctccgggggaatcgtgtcggaacggaattggaggacacccagctggtgtctgctatagaactgattgttttcttggtgtgtgggaaaaacctccacacagttgaggacagaagtcttctgtgttgattgttgtggtgtgggagcagaggaggaacagtttgtttttttccccactcatggtgaactacacaatgtgaaatttaccatcttaactactgtatactacttttagtgtacggttcagtggcattaaatacgttcataatgtgtaaccatcaccaccagcagcatctctataattctttatctcttaaacctgaaactctgtacccgttaaacagtaactacccattctcccttccctttagctctggcaactaccagtgatggtgccattctttcatgtatggatgttttgtatgtttcaatatctggtgtgggtagtgccccgtccccaacccctgttgcttttctttttcatggtttttcctagctacttgtgcttgtttgttctttccaatgaatttcatcagcaatttttgtagctccgtaacaaaaataggtattttaattgagatgatgttaaatgcattaacttagggagaactgatgctgctgcagtgatgtttggtcttgctagctaagaacatgctatgtctttatatttgcttaagccatgttttgtgtctttctggagtgctttcatggtttactcttgtagatactggatgttaccaattttaagtttatgcttaggtattttctgtatttttagacaattacgaaatattttataattgtaaatattttttacattatcttattctataattatggttttgtgtttgtacatatgaacactgatttttatctgttgattttataatgtgccctttactaactatcttatagtttttccagatgtattcttgtatcatctgtaaattgagatagatatttgctctttttggccaactatctgtagggtccctagtttctctatctctctatctctctcttaagtcaaaaatggttgctggctttaggcatttgattgcaaaatgtcaacatttgtttttttttttaaatcaaattaattgatatataactcatacatgcagaaaatttatgcttttaaggtttacagtttaatcaattttgagaaacttatgtaatcatgttgctactactacaatcgagatataggatatttctatcactggccgggtggctcacacttgtaatcccagcattttgggaggccaaggtgggtggatcacttgaagccaggagttcgagaccagcctggccaacatggtgaaacccagtctctactaaaactacaaaaaattagccaggtgtggtggcgggtacctgtaatcccacctattcaggaggctgaggcaggagaatcacttgaacctgggaggtggaggttgcagtgatccgagatcgtgccattgcactccatctagcttactgggcaacaagagcaaaactccatctcaaaaaaaaaaaaaaaaaaaaaaaagaatatttctgtcactcttgtgactgtttgtatcaatacctcttctaacctccagttcctggaaaccactcatcttatttcttttcctgtagtttcaaccttttcaaaataccatataaatggaatcatactgtatctatatctatatatccttttgagtctggcttcattcacttacataatgtcttagagattcatccatgttgctgcatgtatttgtagttccttttttattgctgaatagtattccattgtatggatatatgatatttatctattcaccaactgaggataattgggttgtttccagactttggtgagtagaataaagctgctataaatacttgcatacaagttttttatagacataggttttcatttctcttgggtaaataccttacaatgggattgctgggtcatacattgtgtgtttaactttataagaaactgccaaatcacctgtcaaagtagttgcagctttttgtatttctgtccacaatgcatgaaagttccagttgtcccacatctttgctagcatttggtatcttcagctatatttttctttagttattttcattgttgtgtagtatagatctcatttctgttttaattttatgactttgttttaaacctttgataaaatacaaggctgagttgtcaaccaggccactttagtctaatgaatattcatctgaaacttggaaggtgggctgtcaccttgctcacttgtccctactcccagcacagtgggcttgagaattcttaaccacctaaatcaaccattgaccagtaaccaaggaaggccacttgtcttctgtttatttggaaggaaaagaatatttttatggaacttatccgtattttcaaagcaaactagcagttactcgattttaatgaaaatatagcttaaaaatggtgtcttttctttgtatgtctaagaaatttgcaagtttttcttaagcttgccatatcaacatgaaatgatgtcaaatttctactgatttgcacaggaaaacaatgaagagtcgttatatggaactctatgaccttaatagagacttgctaaatggatataaaattcgctgtaacaatcacacagagctgttgggaaacctcaaagcagtaaatcaagcaattcaaagagcaggtcgtctgcggggtaagtctcttttcataacactgcactttgatctgtaatgtttttggtggaactcattgaagatggtggtagcatccaataattcatattggggctgaaagtagcatacctttcacactccagagctggcaccagtcacttatgtttcagtcagtcggcctagtgtttggcttttgtctccggacttcaaagggagagaaaaccttcagctccttttcttagaccttcctgcatcctctaaagaaaaacctactatatataacccaaaggaaatatataaacatatatatataaataaaaccatcaaggcccaattagcaaaaaagagactgaaaattaatgctaagtgtctaacttaaaaatttagaaaagaacaataggataaacccaaggaagcagaaatatagccagagatttatacctgaattctgctgttttgggtcgatgctttgacttctttagaaataatctttgctaggtgactatgagctttgatccttttctgtaaaactgactgttggtttctaggtttgagacagtctctaagtcagttttttcaataattccctcaccaagttattttttttagggaatggtaagataaatcatatttcaagtataactcttttccctcctggttttatgttgttttaaaactgacgtctaattttataatttcatgtctaacaatcttttggttcctgatgtttcttcttatgcagttggaaaaccaaagaaccaggtgatcactgcttgtcgggatgcaattcgaagcaataacatcaacacactgttcaaaatcatgcgagtggggacagcttcttcctaggtgaggaaaatacaggtcatgaagttcctggcaaagattttctgttaaaaacctatgctggtttgctttggatcacaccctggtgaaccccgggtgctaagaatgaaaataaccttggtgagttgtacaaattaaagacaaagaactacatgtgaagatagacttgctttctatttttaaatcagtagtagtactgttgctgaataatactaggtttttatggaataggatgaatgcttttgaagtattagggcttcagagtccaattttgcttatttatggtatataaatacatatttttttcttgaaattgcaattgagtttgtacttttcaaatagattatctactttttcattaaaatgtaaagatgttaaa

SEQ ID NO: 15476 - DNA, 35697 bp, Homo sapiens
gccgccgcaggaggagcaggcggtacctggacgggttcgtcccgggctgtttcgcgtccggcctgaggcggctggggccgcgcaggtagtgtccctgcacttcttgcccgggcgcgtgaggccagctccgctgcgcttgtctccagcttccagccctcctcccctaagccgccgccatcatgctgctgcctgtgttcaccctgaaactgcgccacaaaatcagcccccgaatggtggccatagggcgctacgacgggactcacccgtgcctggcggccgccacccaaacgggcaaggtaaccgctcccacccgcagggagcccgggccccagggaaccacaggatctccgccggccgcgcccctgggatcccgtcccctctccgaccccgcccccagcccgtgttgcccggcaaccggtcggcgagcaccttgtggctccatcctgcagaggacagtggggtcttagaggaagagcttttctgagaagttgacgttttcttgtcatcaggcacttggagtcaggcgaggtcggggtccctggacatagggagcttagaaaagagacgtctcctgagggaaggggtttggttcgggttagcagtaataaccgaccccagattcaagccaggggcctctgcttgtcacttggaactcggaattcctctgactctctaacactgcttcttcttcctttttttttttttttttttgagacggagtcttgccctgtcgcccaggctggagtgcagtggcgcaatctcgggtcgctgcagcctccgcctcccgggttcctgcaattctcctgcctcagcctcccgagtatctgagattacaggcgcccgccaccacgcctggctaatttttgtatttttagtagagacaggatttcaccatgttggccaggctggtctcgaactcctgacctcaagtgatttacctgcctcggcctcccaaagtactaggattacaggcgtgagccactgcacccagcctttcacagtcctttaccgaacaacgacaaaagaatgcaatacaaaaattaacttattcaaattgcacttttgatccttgcccatgtacattcagttctttccccgtaatttattcactaagtattaggtgtttactatgtgcgattactgggcaagatgtgagagtcaaagagataaaagagaaatcatgtaacattcaccagacttctactaaacaccttctgtatagattttggagactcggatgtaaaaggagtccctactttcagaaagcttatagtccagaagctaacagacaaggcaaatcagagccctgtgtatttgacggaggcatgcccaaaatacatggaatgtagtgacaacgctaataacttataacaggcacaaaactttattacatgagtcatctcagcgtcgttgtcacaaggccaacggcagcagcatggcatagggatggtgtttcttggctccagtacctactaatttcatgaccttgggcaaggcacttaataatagtacctaatacgtggggtcatgagctttaaaaaagttaatacatgtaaagtgcttgacatataggaagtggtcactgattgttacctgttattttctttttatggttctcactttattgactagaaattgcagttcagagaggttcaatacagtgcttggagccactcaactagaaagtgtggaatgtggtcagagtgcatgttctctgatccagtgtggatttaataagctaggatttgtgtaacaatttatagtttttaggacacttccatgtatattgtatgttatatgccttgggatacagaagtaaaaaataaggcttcattttcattaagtagtataacagagttaagctattaatacggggtctggcacatcatgatgttagttattgttacagttagaagtcactgacaggctgggtgcagtgactcatgcctgtaatcccagcactttgagaggctgaggcaggcagatcatctgaggtcaggagttcaagaccaacctggccagcatggtgaaaccctgtctctactaaaaatacaaaaattagccaggtgtggtaggtgcctataatactagctactcgggaggttgaggcaggagaatcacctgaacctaggaggtggaggttgcagggagccgagaccgtgccattgcactccagcctgggcgacagagtgagactcggtctcaaaaaaaaaaaaaaaagcactgacaaatgccaaaaagaacttcatgttgcttgtgctgtaggtgcatagcagatttataaatgggctgaaaatatcccattggtattaactcagcccctaatttgagggcttactatgtgctgggcagtcttcttagctctgcaggtgcattggagaatgtgacagacaagtttttgcccccttggagcttacatttgagagggggaaccaggtagttaactgaatatgcaagtgttttcataggagaaaaagaataagggattcagtgtgatgggagcttggtgtcttagacaggtggtcagatggcctctaataacatttgataagaggtttgaaggaactgaggaaacaagctctgcagatttgtgggataagcgccttgcaggcagagggatctgcaggtgcaagggccttgagctggagatatgcatggtgtgtttcaggagcacaaggaagccgctggggctggaaggcaatgagggtggtcatgaggtagacacaagccagatcatataggaacttgtaggccatggcaaagaccttggtttttatactgagtaagttaggaagtccctgaggattttgataaagtgggtgttggaatttgctttatgttttagataaaggctaactggctggtatgtggagaacagatgttctgtgacgggatgtagggaggtaggtgtcggagtagaagcagggagatcgggcagaggtccctagggcagcccttagatagagtgtgacctggagtggaaggcaggaatgcttgattgtagggctgttgtcgaaaatggcctaataataataataataataataaataaaataaaggagatcccttgtcctgtgtaactggatggatactttgtgttcagctctgtaaacaaatctaaaaagttctgacctgatcttttatcttgagaccttaaaaagaattagtagtattttatgactcaagtaatgccatgaatatattttcttaaaagcaattaaaacattccagctagggttaaagcctgcatgtctagaaacaggactttatccttacagctgggaccctgttgtgaacatggagctgactctgagccttagcaaggatatttttttaaaaggaatctctggccgggcatggtggctcaacacctgcaatcccagtactttgggaggctgagaggggcagatcaactgaggttaggagttcgacaccaacctggccgactgaaaccctgtctctactaaaaatacaaaaattagctgggcgtagtggcgcacccctgtaatcccagctactcgggaggctgaggcaggagaatccctaggacccaggaggcagaggttgcagtgagctgagattgcaccactgtactccagcctgggcaatagagcaagactccgtctcaaaaaacatataaataaataaaaggaatctcttgcagggtgaatattagagttttcctctggggacattttttctctcatggtaatgcttaggggtcagttgaatttatattgtttgcagcacctcctcagctagaacaaaagtgtgaacttcagcaagtcctttgaaagccctgggagtggtctttttgtcgtatgactgagattggctttctttccttgcctgaagggacagacttgtctccctgtggactctctttgagtgtagagaacagcaggagggaactgggggaaagtctgactcctgagatccttgttgctcttgacaaaaattgcaaactctttccattccggtaagaatgaatatggagcccgtaagctatttctgctcctgtactttctcagcatattggatttctggaaaactttgtaagaattggtttgttcagaactgttataaaaggaagtgtgatgtggtggtggctggagcgcagggcctggagcacaccaggctcttgtcttagccctgtcaccagtctcaagaccttggcaaagggccttaactcttccgacctcatatggaaatgaagggttggtgtcaggttcaaatgcaattaacattgaccaaggcatgttataaagtgttacacaaacggaacatgaaggcagtgttcagtggctgcacgttttctatgtttttagtcaattcttttgaaaattattttttgttgaataggctgccttgggtaggtgttaatttaaaattaattctgtttggatttatgtgaaagagatgaaatactcatgtaaattttaaaaattttagaactagaaggggctagagggatccctagtccagtgtttttcatcctcccaacctttttggtcatattgcccaccttggaacttttttagaccaagaaaattttcccagtgaaattctgatacctcagatatactttgtatctctttttgtactgtggtcctgcgaagggctacacgattccccatcgcaaacccatttacctgtcctgggagtgatctcgcccctcttaagactgcattttatagtccaaacctcctttttacaggtgaagtctaggaaagttgaataatttatgcagacactcagattatatttatgatagttgaaactgttgaatttattatctttgggctaattacttagttctatgtcactggtataaactgtgaaagccttcaagatacttgatttgcatgactcggtttaagtttgtgaaacaggtttactaactagcagaccattttaaggtctaggaagtgattcattaggtgcttggatgaaagataataaaggaagtgtttattctgttttccatgatcttcttggtgtgtggcaatcacattgaaggtggtagcagcttattctaggttgatcgggaaaaggctagctcctaagagtgctttgacatcctgctggtgggtagcatgtaagctggcctggtaagcagtgactagatcttgttcattaccttgttccttacaaggctaagaaccactggatttccgtgatttcataatgactgaaagttgtccatgcattgaactatgtacgagtgttttaagtttcataggagattaaagtgacctcttgttaatgtggatgtgttaataacctggttcttttttaaaaaaatgtatgatactaattttttatattttaagggaatgtaattagttatttttgtttcaggtttttattcataatcctcatacacggaaccagcatgtcagtgcatccagggtcttccagagccccctggaatctgatgtttctcttctcagcattaaccaggcagtcagctgtctgactgcaggcgtattgaaccctgagcttggctatgatgcccttttagtggggacacagactaatcttttggcttatgatgtctacaataattcggatttgttctacagagaggcaagtataacctttataaccataaaattgtcattactcattaatgtccattttttatgcttagaagagatcagatcatttattttggtctgtttgttgtatgactgttatagtataggtaaacaacatggagattttgctgttaacatctgctttatgtactcggaacttatttatttggttatggttgctaatcgcttggtgacactcgagcttatctctatgaggtatatctgtgatactgccatctgtcaagatctgttgagaattcagccaagagctgggaagccaatagacaggtctcctggtggacttgcattcaagtttagtgcaatagtttgtagaagcccttactgtagcctgccacctacaggctgctgcaactttaatacccaagcaattcatatttgttacagaaaagataaggaagtaaaaagtaaaagaaattacacctattttttcatctagaaagagcacttaactgttgagtttttgaatccagattttttaccaagcatatatgaatacattttgtagtaaaatggggtcatatatacatgtagccttttacttgtttttaccctatagcagctttattaagatatgattcacatgtacaactaacctacttaaagtatacaattcagtggtttttagtgtatccagagagctgtacaaccatcaccatcatcaattttcaacatttttattaccccctaaaaaacccatacccattagtatcactccccatttttctttaacctcctaaccttaggcaaccagttatctactttctgtctctagaagtttgcatattctagacatttcataaacaatggaattatataatatgtaatcatttgtgactgccttctttttcttagcatgatattttcaaggttgatccatgttgtagcatgtgtcagtaattcacttttatggctgaataatattccattgtatgtatataccacattttatttatccatttatcagttaatggacattccactccctggctattatgtgtggctctttcattcaataatatgttgtgaacatctttatatgaagttactacatacccgttatgtcattcttattggttctgtagtatttcattgtgttaatgtaatttgtttaaccgttccatgttgttgaacatttatgttatttccattgtttctgtattacagttcatagtgtaataactgtatctctttgaccacttccctgattatttcctgaggataagttcctgaaaatgcagatggttttctttctttttgtttttgttttctgagacagagtcttgctctgtcacccaggctggagtgcagtggcatgatcatggcttactgcagccttgacctcatgggctcaagcaattctcccacctcagccttctgagtagctgggactacaggtgtgtactaccacacccagctaattgtttattttttagagagatagggtctcactatgttggccaggctggtctcaaactcctgggctaaagcagtcttcctgcctcagcttcccaaagtgttgtaattatagatgtgagccactgcatttggctggttttcttctttgtctattttttgttgaggtaaaatgtacatacatgaaaatgcacagaccttctgtgtacagttcaatgagtttggatccctataaccaataccccaataaaaatagagaacattttcatcacctcagaaaatattgttgtaccccattccagtcaatttctatctcccatagacaatcactgttctgacttctgtcagcttagattagcttttcctgttgttgaactccatacaaatagtgtctggcttctttcacttaacataatacttgtaagaattatccatattgttgcatataaaagtagtcttttgttgttgttgctaagcaacaaaaatagtatattccattgtgtgaatatactatggtttgtttatccactctcttggtgatagacaagtggctggacatttggattgtttcagtttttaacaaccatttttgtttaagacttgtttttaataagacttttttatataagactttttgtagatatatgttttaatttatcttgggtaaatacccaagagtggaattgctgggctatgtggtttataagaactttatgacactgtgaaactgtttttgcaaagtggttgtatcactttatactcctgcctgcagtgtaggagagttccagttgctccacatcctttgtcaacatttgttgttgccagtctttaattttagccattttggaaggtgtgaagtgatatcttaggtgtggtttcattttgcatttccctgataatcattgatgcagagcaccttttcttgtgcataaatggacatttatgtgtcttccgtgaagtgtcttaagtcttttgcctattttttattggtagtttgtctctttattattgatttgtagacatttcttggatatactggatacaaactctttgtcagatttatatataataaatattttctcccagcctgtggcttgttccactaggcatgtgtcttttgatgagcaaaagttttgcatttttgtgaagtccagctgatcacattttttctttagtggttaggactttttctgccctttgcctatttcaaggtcacatcgtttttgttcagaagtgaaatcgagtttaggactgtattagtcagggttctccagagaaacagaaccaataggacatgtacatattagagggggaaatatttattttcaggaattggcttatgcagttgtggagcctggcaagtcaaaaatctgcatggtgggccagcaggctggagatctaggagagaattgatgttgaagctcaagtacaaaggctgtctgctggtagaatcccttcttccttgggggaggtcagtcttttttctattaagtccttcaatacttgatagaaagttcttaatagaaagtattgaaggacttaatagtaaagtagattattatccatatgtgcgtgggccagttaatgtgtgaggcccacccacattatggataataatctgttttactcaaaatctgctcagtttactcaaaatttggcccaattaatatgtgggcctgcatattatcgtgtctaagataatgtgtccttttacttttcttaggtagcagatggggcaaatgcaattgtgctggggacattgggagacatttcttcccctcttgcgattattggtggcaattgtgctctgcaaggtttcaatcatgaaggaagtgatctcttttggacggtatgaagaagaaaacattctttttggtacccttaagcatttttacttttaatgttcttttttaaccaccaactctactgagtaataatatttataattctgtgcattaaaaaaggatatgaataattcgaatagcattcattcgtgttttgtgtaatcctctccttcatgtagctaatatatttggagtaaatggagaaacgatggcatgctaatggtttggggttttattttcaggttactggagacaatgttaattccttggccttgtgtgactttgatggtgatggaaagaaagaggtatgtgggggaggagatatctctcttgtgtgttcagccaaatgaattttgccatgacagtgacattagtgttgacagaagtgtaagcttctcctggctgattttggtgctctgttgcctaaatgctcagccagttggccccattcgtctttctcttctcttttgaacaataaatcacttgtgcttgtgtaataaatacaaagatcaaagccatggtgtttcagagacacaggagagggcagagagggtagaagagttgggatttcagtcatattcacggtcttatgaattgctcctgatgctttgaaaccatattagtatatagttttcaattttggccaactgttttgaggaatctaaatgttttagagattggcttttagcctttgaaattattcttatggttaccctagaaattagcttcttgagcagttagtaggtgtgacgtgctgtgttgggcaccgacttgcccctctcttgtccatggacactggactctggtgtttgaacagggcttccatctgtaggcagagaaagttgctgatccagggagccttttcaggtactcagggaaataacgtattctggcaagatgtgcagctcccatggcaggataaaagctgcagtagcccctgttccttcattgattgaatctgctgatcctcccattagagggagcatttctgagcatcaaacgattatgaggttgtcaatcttgggtggcagaagcagcatgcaaagtactgtgcaattttttgttttgtttacagaaattttgttgtttgcacttactcacctgaacatgtatgatatttccccttcagcttcttgttggatctgaggattttgatatccgagtttttaaggaagatgagattgtggcagaaatgacagaaacagaggtaagaagctccacctcgaactatggtaaccttgagcaagatagatcagtactgtcagatgaaacatcaagtgagagtgctggggcatctccaaacccaggtggttttaggataaaagcttggggagggggtcagacagagctgtatgttatggtaagaaaagcaataaaaatcctaattaagatatattttgaaaagactgattaaatagagaaaaattattgcatatagttgaatacataaaggcatttcttttaatgagttaatacatgcaaataataataatggcaatcatttattatgtacctattgtatgccaggtagtgctctaagtactttatatgaagtaacatattgaatccttacaacaaccctaataggaagataaattattattatttctatagatgaggaaaatggtgttctggttttttgtttgtttgtttgtttgttttgaggcagagttttactccatcacccaggctggagtgcggtggtgcgatctcggcttactgcaagctccacctcccaagttcaagtgattcgcatgcctcagcctcctgagtagctgggactacaggcacgcaccaccacgcctgggtaatttttgtgtttttaatagagacggggtttcaccatgttggccaggctggtgttgaactccagacctcaagtgatccgcccaccttggcctcccaaagtgttgggattacaggggtgacccaccgcgcctgtattttttgttaagttacttgtacgtagtcttggctatgaaatggcatggtcagcatttgaacctttatgccccttcctcctcatcatgtgtattcagtagggctgaagtgcataaatgagatgtctatatttttttcttcctgcaaattcagtacttctttggcacatttctgtaggtaaacttaaaaattatagaacttgtgattagaatcactcatgtaactgaacctgagatatttcttaatatcccaggttgtttaggcctgatgtttaggcctggtgcagtggctcatgcctgtaatcccagtgctttgggaggccaaggtgggaggatcacttgaggccaggagtttgagacccgcctgggcaacataacaagactccatctctacaaaaaatattaaaaaattagccagaaggtgatggcacacgtctgtagtcccagctgcttgggagactgaggcaggaggatcccttgagcccaggagcttgaggctacagtgagctatgatcacgccactgcattccacccaggggcaacgagaacaagactctgtctcaaaaataaaatttttaagaagtaacagtgttaagagttaggaaaataaagacaaaaataaagcaaaaagcactatctaaagattacctgtatcctttatggttttgacattcttaggatatttatttgctgctggttttccaggattgggcaagactcaaacagaaaaaaataagatattcttaattaaggaataagaggataaaggagcaatagcttgtgaacgttgtaagtggacagaaagaaaccagtaaaagagagtcttagagatcagaatggtgggattttgcaaaatttagttatgtggtatttaggagtctgtatcagaaaagctcgagggcactagtctcaaaactgaccttggccacttgtctttaaattacttgcttcatgtcactcataaaagctgcctaagaaggtcagacttcttttctcctaactataaaaggagacaaaaagcaaaacctacacattgacatacagtgctaccaatgattttaactaagttatcctatagcaagagtcatcagtttttatttagtcctactatactttttatatattcacagttatcatgatgtaagatgatagttgtggacagagaagaaatgaagaggagaaatgggtgccaaaaggagcagtctgaggatgtgtgtttatacagggagtctgttttttattttattatttttttgagatggagtttcgctcttgtcgcccatgctggagtgcagtggcgtgatcttggctcactgcaacctccgcctcccaggttcaagtgattctcctgcctcagcctcccgagtagctgggattacaggcacctgccaccgcgcccagctaatttttgtatttttagtagagatggggtttcgtcatgttggccagactggtcttgaactcctgacctcaggtgatccacccgcctcagcctcccaaagtgttgggattacaggcatgagccaccatgcctggcccgggagtctgttttgtgtgtatgtgcttatatgtgctttctgaagagagggcccggagccttcattacattcttaaaggggtttgcaacctcccccaccaccaaaaaaaaacaacttgagaatccctggctgatagatggtgtgtcccgaattctcatatccctttcattctaatttgtggtaaatcttttctcctttggtgggaatcattcagattttgttggatttttattgcttgttaatattagatttgaggagactgaattctttgaaacatctctttcctaaatcctagaaaagaggacaagaacctggaatagagttagggatttgaggggacttgttgatcttctagtccacaaaaggaagaaactggtgaactaaggaagcagtaaaagagctgaggaatctggggctaaatttatgaaaatatggacttcataacattgttcacttgcagggccattttcctgttctctttgttaggttttgctcctagctcaaatatcatttcccagatcagcaaaatcatgattcatttggcagttgaacagtatgaagtattgtcagaagaatgccttgagctaaataattctggaatcctacacagcactttgtattcatagttaagtgaagtgggtggttttgtagaaaagctgtaggtgtaaaggaaattatataactattctctgctttatacaatttatttcttaatatctcttgtattaggaacagaattagaaagtagatctgcaggatcatggatatcattaagctttggttttaactttaaaggaaagttttgttcagtacctaaaattttatccttttaaggatgtcaaatccttgaacagtcctataaatatttctgtatcatatatgcattctgtatattgttatatactacacaaatccacgtgcctgggtttttacttttcaaaggattatgtgttctttcttttacctctagcaaacaaattatgtcatagaaagaaaagtgtatacatgaagtaagatattcaattgtgtattgttataagtcttttaaaaattgagactgtaggatgttataagttaagtaataatcattaaagcctcttgggtgaacatatataatatctattgtatatgcatattttcgatcttgtgtagttagcttatgttttccttagtccttcagttttcatgtgttttttaaaaataattttgtgaaacttgccacataaggttgctctaaaacaccaaaccctgtgagtttatttaaatctgattatacaactctgaagtagatgacatgtatcgtagagaagaggaatacattccccactaatggattggaagcgcttttaaatctaattttaacatagttgtaacaaggagtgtgaagtcttataaagccgtacttgacagtaaactgagtcttaatgaaaagatgttgtgtttttgtggattgttttgcagatagtcacctctctttgtcccatgtatggcagtcgatttggttatgccctttccaatggcacagttggagtttatgacaaaacatcccgatactggagaattaaagttagtataatttagcctttgatattcaggcgcttgatagttattgtgagacttctgtgctaattattaaaattctttttcagtcgaaaaatcatgccatgagcattcatgcttttgaccttaattctgatggagtgaatgaactgataactggttggtccaatgggaaggtaagtttgaatagcaaagttcaggtataattcagagtagtaattgtccaaggtgtattggctgtaggacttagaacagtaacattgggatgtaaacttcagttcgttccttggcaatgtttttacatttaacttaataatcttgacacattcttcctgctatcattgtcaagagctgcacagtgagagagtgtaagtcttataagcggtgtttgggggaaatcttcggggagattctgtctaaatctcttatttgaagtgctgagaatccatcagccagattgattctaggtagtacaacagtaaaaaaggagttttaaggaattgtttgaatagctcttttccaatacatcttcaaaactgcctgaaaacttagcactaataggaagaatcatgttagcatattgttttctgagctataactttaaaataaaatccttttgcttgctttccttttttaacttcaaatcagaattttttacagtcttttggcaagtcaggattgtcttcttagaagctgcctaggtagctgccagatctccatggataccatttgccctcgctttcttgtctgtcagtgttggattgcctgaaggggatcagcaaattcttatcttttcttctttgatttatctttacttttctctagcaccttgtaagcattcctttggtgttacgtgaagaacggattctaaaaagctgttatgttggtttctgcttcttcacttagttttgtcattagtatgggtactaaaaattataagactgtatagttgcttattaagaaatatgaaagtctgtgaaatgggtgtcttagttggtttgggctgctgtaacaaaataccatagggtgggtggcttataaacaacagaaatttatttcttatagttctggaggctgggaagcccccatcaaggtgttggcagtttcagtgtctggtgagggaccacttcctcataggagccttacagggtggaaggggcaagggatctctctgggccttcttttatagggcactaatcctgttcatgggggctctgcccttatgacctaatcacctctcacaagctctacttgccaataccattcattaccttggctaataggattcagcataggaatttgtgggggcaaaaacattcagatcatagcagtggatcatattttgagggaatataaattattatgactgacttaagaattagaaaactactagacttgaaaacttgtcaggttaccttgaaatataattgttgacctagatgtttttatagttaaatgcttttgaaattttaagggatttctattatgtaatgcgttcctgagcatgaaaaagataagaaaattatataagtggaaaaaccgattatctacatctaacagaaatatacaaaaaggaaatatacagatccaacttgtgaatacaggtgtgaaaatattaaataaatgctgctagacaattaactttgtcttttgtatgtcatttgatgagttggagggccatcctttcctttcagggtaaaacctcccagttggattaagcaaaagatcagaatatccacagaaatattaatttgtagtcctgcttcttagttagcaaatgagccttcttatttgctaaatattgtggaaatgcagtggtagaagccattaggtagctaggctttaactagaaagaagcaagttcaggtcagtctgagttagagggctacattaatgtgctttgttaaaaatgcaggtcattcgttctttcacaggctttagcattcataattttcaggcttccatgatgttattaatagcattaatacttgacagtgatatactgtagacaaggggtaggctgtaacctaaattactttatgttttggttgcaaagttttgcccagaagattgtttatgaaaagacaaaactagtgagtagcattggtcatcgaaatgattgctatgctagattttctgtagctagccttttgttgataatacctgtgtccttgcctggaacataatcatctttttttttttttttgagactggagtctcgctttgtcacccaggctggagtgcagtggcgcaatctcggctcactgcaacctccgcctcccgggttcaagcgattctcctgcctcagcctccctagtagctgggactacaggtgcgtaccaccacacccagctaattttttgtatttttagtacagacagggtttcaccatgttagccagaatggtctcgatttcctgacctcgtgatccgcctgcctcggcctcacaaagtgctggcattacaggcgtgagccactgtgcccggcctcataatcttcattttaagtgatggtcacttattatcacttttgagatgcatttgtttctgatcagtcatttatttatttgttctctctcttggaaatgggagacttagaggataggagagctctctaaagtatctgaatagtttttatgtggaagaggaactcttaacagggttgttgtaaaaggttgcatggtggaagactgggctaactccgtagtttctgaacttcagattcaacatactttatacatttatatataataaagatacaatttttatatagagctaacatttattacgtacttctgtgtgtcaggccctgttgatatatgttaacttcattaggcctcagttatacccaatgggatatagtactgttaatttctccatgttctggttattgaaccccagatgaaaagaccaagcacagaatggttaagaaacttgcaagatgctgtggatagtacgtggcagagctagattctgaacctgagcggtttggccattaagcccatgcccttttgcactgtgctgtgtgtactatatgtactggctcttagcagacccgtttcttcaagtgaagcattgtgtgaaggcctatgaaaaacagcttttatttaaaaagaaggaagcacagctggttgaggctctttagggtccctcttggccccagcagtcataggtatctcctgagaagttgtagggcttcatagaatactcttgaaaactgctagactaaatgacctttaaagctgatttttatttttaaattttgtggtttttaaacatgtagcataagcaacttttaaatttgtgttttatttgtaggttgatgctcgaagtgaccgaactggggaggtcatctttaaggacaatttttcttctgcaattgccggtgtggtagagggagattaccggatggatggccacatacagttaatctgctgctcagtggatggggaaagtaaattgggatgagaaaaatccttaaaaagtcacgttttccatttgattgggtcaaaatatcaggaaatttcacctgaagtatttgtaccgagatcctgtagttctaataaattcaccaaagttggggagaacttaggtttttgtttttaagagcaggtaattgatgacctaaaagtatacctggttatacttgcggttttttccttctgttcagtccggggctacctgcctggcacggctgagatgaggggcaacctcatggacaccagtgcagagcaggacctgatccgagagctgagtcagaagaagcagaatctgttgctggaactccgtaactatgaggaaaatgccaaggtaggtgtaggtcctaatgtgaccaggtaatggaggctgaaatgttgagactgaccgggaggatcagcaaatatggaagaatgagagtgtcattgccagggtgtggcctttttgccattgtcagaattgagaggggatatatgctttcgtcttgaaatttcatttccaggtagttaaactgtagaaatgttttcctgattgtttaaggacatttcctgcagcactatttatttatagcagtgaaaacagctggaagaaacttagatgttcgtcagcagtagggagtatgtgctaaggaatattaagcagctcaaagaatgaatacttggactgatatggaaggatatctgtcgtcttaccaagtgacaaaaggcaagaacaatatagaatgtcttttatctttttcaaaaacaaacatgttaaaaacagacaactgtaaaaactgtgtgtgtgcatacagcaaactggctgaaatattcctttaatttgtcctgtaatgcattactgtatttgaatttgatgtaacaagggaatttgtttgcttactttaaaagaacaatacttcaaaaatgttaaagtcatgatgggatacagtggaccatacccatagaaagatgcaagggtattttcccacagggccagatagagcaagggagcactaatgaggtgagttctctgaattctaaagaatcagattactataataataataatatgctggaggctctgtcttttgaagctgaatagcaatattatttaaaattgatattagttcagtgttttggtgactgagtaggaaatgggtggggtgttttgcaggctgaattggccagtccactgaacgaggctgatgggcatcggggcataatcccagccaataccaggctccacaccacgctctcagtcagcctggggaatgagacccaaactgctcatacagaattacgcatttccacttctaatggtaagacagtactcacagctggtatttagaggcacctgtgccatcttggagtcattcttttttttttttttgagacagagtcttcctctgtcttggctcactgcaagctctgcctcccgggttcatgccattctcctgtctcagcctcccaagtagctgggactacaggcgcccaccaccacgcccagctaattttttgtatttttagtagagatagggtttcaccgtgttagccaagatggtctcgacctcctgacctcgtgatctgcccacctcagcttcccaaagttggagttgttcttaaactgtttttactcttccctgcagacaccatcatccgagcagtattgatttttgcagaaggaatttttacaggtgaaagccacgtggtacatcccagcattcacaacctctccagttccatctgcatccctattgtgcctcccaaagatgtccctgtggatctgcacttgaaggcattcgtgggttacagaagcaggtgaccctttgcaagtcacagttcatttcaggacagcacttagaggagggcaagatgtataaattttccatatgcccagtggattcttgggggcctgagaaaccatttaatggttctgtctacccaaagtttctcatgaccttttatttcctcagtttgaaacctgtaaaaagaaaatggaaaaactgatatgtaagtttaagatggttctttttttttttttttttttgagacagattctagctttgtcacccaggctggagtacagtggggcaatctcagttcactgcaacctctacctcctgggttcaagcaattcttctgcctcagcctcctgagtactgggaccacaggtgcccaccaccacgcccagctaatttttgtatttttagtagagacaggagttcaccatgttggccaggctggtcttgaactcctgacctcaggtgatccacccgccttggcttccgaaagtgctgggattacaggcatgagccaccacgcctggctaagatcattattttctgtttttagtcaggtgatctcataatcaaaaaatgtttaattgatgatttgtcaatttgtagttttggccactaaaactacaagagttaggatgcacctttatattacagtcatacataacctcagctagtgaagaaaaactgctctatttgtggaagataagatactttttacatcccctttatgatattttaaacccttagtgcatgcaggtatatatgtagactcatgctgtctttaaatcccaaacctaatatattactgtagtactttaaccctcaagtgttttgggggttccttcttaagtgaaacccttaaatatcaattgatgacccagaagtggctttattttctgggccttgcattttgaaagaacattctatacaaaacaattctcttgtgtttcattgattggccatagcacccagtttcatgtatttgaatcgacaagacagctccctcgattctccatgtatgcgctgaccagcctggaccctgccagtgagccaatcagttatgttaactttaccattgcagaacgggcacagagggtgagtatctcgcttttctctttcaatgcttttacacagtagaatcctttagatgttatttcatagaaagggaaaattacattaatgtgttatattggtagcagtaaatatgatatgaaagaattctctaacttgggggtggcttgtaacctgtaataaaaatattgctaaaataccttctctcactttgaaaaagcatctgagcaatcctcagttattggtgaattcttaccagtgtttaattcctctctttccgttatggtcttagtgtggttgtcctggtgtagtatttcaagaggaacctgcagcaagatgaaaagagagtgggacttggagctaagaacgtttttggctttaagtgctacgttaactcattaaattcttagtgatcttggggaagtcccctcaccagtgtgagcctcagttttcttatctaataagtaaggataatcttacccaccttattgcgggggcccgaggattacatgattggtgtaacagtagcaccttgtacatttgaaaggactaataccagtggactttaaccttggctgggctttggaattcttggtgggactttttaatcatgtagattctcaggcccctgcctggcctgtggaaccacagactctataggtgggcccttccagaaggcctcatgggtggttctcatgtggaacctgtgttgcaagccactgcatggtgttactgctattaacattaaaacttatattttccttattgtgtggatatatctgtggtgtttgcccatgtatacttcattttacatttcttaaagaatagaatggaatggttttaagcacgctacattgtccaggttatacccacagaagagctgttgtgtaacagaatcagcatcatacctgaatcatttgtacattgcatataagactatgtctaagtagaagatgctatgaaatcatgtctgctgtggggccaggcataattatgaatgttacttaagagcataggtgaggtgagaaaagggaatgtgactagtgttttagtattttcttggtgtgggatgaagtataattcttttttttttttctcaacaaagcagtaaaactagaaagaaggagaactcttccctcaagaatggctgtaccttcatatctagaggcacattaaaaaaaagaacgtctgtaccttaaaaatggaggtcatttcattgtgttcattttcaaggttgttgtatggctcggtcagaactttctgttaccagaagacactcacattcagaatgctccatttcaagtgtgtttcacatctttacggaatggcggccacctgcatataaaaataaaacttagtggagaggtaatgtttaatatcacggggcatagatttcttttttgaatttatttattcaaacacttagaccatggaatgagaggggcatagatttctcatgtggtgtttaccattcagtccaaagtgaggtgggggacatcaatgtcaaggtcataaaaccacgttttgttttatttttttcacatggtttaacttagtctgttagtgttaccattttagacactggggtataatttggaatagctgttttctgcctccttcccttcatctcttccttgtctaatttggaaagaattgggaatacagaggtcaacaaaaacattttcaatgtttggatgattttgtcatttaatttctaaggccagaggatttaccttttagctagctgctggaaataatgcagtttgtaatttctttgagagctaaactttcctttttcaacactgcatatatatatatatgcacaataattttgttgagtatggggaaattcaggtactattttagctaagtttgtctaacatctgaggatgctaaacttgtctattttttctctgggtagatcactataaatactgatgatattgatttggctggtgatatcatccagtcaatggcatcattttttgctattgaagaccttcaagtagaagcggattttcctgtctattttgaggaattacgaaaggtgctagttaaggtgagggaatgcggtagatgcatttgtgagaatgtggtagtctaataatatttgaggagattaatggtactacaaatgtacttatgttatagtgatgttttcaagaatttttgcaattcttgaagtaaaaattgaactagtattggagagtttactacttaaggatttattttataaaaggaagtgtttagctcctgagcaccatgcttgctttgtttggtttaaagtgatgcatttaaatattaacattttcctttgttagctcttcatcttatttgtagtatctgctttggtcttcttcagtttgggtctttccaaaaacccaaattcaagataaaagagcaaaataaagatgattctgattggccccaaagtatacaatattcccactgcaaatccctaaaatattaatatgtgtgttgtgggggctcctggtgctaaagcatggggaagattcacatggagtgtcgtgttgaaattggaggcagcacagatgagttaacttgttgagacagagatgaaataacgggaagtagcttaattggtataagcgaacaggggaaagaagggggtctctgtatctggtaaatagtgtcttttcatttgtctgggttcaagaagtttgtgaggcctttttcattcctgagtgttcatggtctccaggtggatgaatatcattcagtgcatcagaagctcagtgctgatatggctgatcattctaatttgatccgaagtttgctggtcggagctgaggatgctcgtctgatgagggacatgtgagtatttgtcatggttagtacaggtgcagggttaaaaatgtgagcagtatggaatagcaactctcagatgttaccaatagaagtataaattgttacagtgactttggaaaataacttggcattatcagtaaagttgaaaatgcatgtcctctatgacccagcaattctattcctggtttatagcttagggaaagttacagcttagttatatgtatgcttataaaccaggatatttatataagaatatttgtaaaggcattgtttataaaaatctcaaaatggaaacaatccaaattagcatgaacagtgtagcgacagtggatgaattgtgatatattcatgcaatggaatactacacagcagtgagagcacatgaatctccatgacacataagagcaaggaaaaatctgataagcataatggacactgaaagaagacagacttaaaagactataaaatgtatccgtgtgtatagttagagaaaagagtaaactatagtttgggaaacatgcaataaataaaaatataaattcagggaagagattatcatataagatagtattttctcctagagaaggagggattatgttcagaaaaaacacattgggaaacttcctgtctgaagtcttgtttaacttcattaaatattctgaatttttctgaatatgtaacattttacaataaaaaagttaagtatgtacagtacaggtcttccttggtgcttgctaggatgccaaatttaccttgccaataaaatgtactgaaaaaaattcagtaaaatagttaacaaattatagatgaaatttatgtgtatatattaggggcaagagttcactcagagtgctgcttgtgttttttcctgagacgcctgaattattggcaaataattataatggttttgctcagaggtaaatggtttttaaaataattgtattgttgaaaatttcaaacacatacagaagtacttaaatataatgatttcatatataccacccacccaacttcaacagttatcaactaaagactgatcttttttcatctctacactcaccctctttccctcccaggcactagataattttgaggcaaattttggacattgtgtaattctagccacaactatttcagacaaagggcctttcaatatcatatatatatatatacatatatatacacacacacacacacacacacacatatatacacacgtctgtataaaaatcacaatgccatatcacacttagaaaaatttacaataattgcttaatattacaaatacctcatctgtttagatgttcccagttgtcttataaatgtggacatgtgtgttttaagttggcttgctcaaatcaaaatccagatcaaagtccatacattggatttggttggaaatcgtttaatcttttaatccacacttttgcttgcccactcagtctcttctctccttctcctgtggggtgccattttggattttgctggtggtatccttgtggtaatgtttagtattattcttctgtcccctgtatagaaagataatggtagatctggaggcttgattagattcaatttcaaattttggcaagaatacttcgtgagtagtgttgtttacttccatgaggaagcatgcaatttttgattgtttctttttatgatattatcagccattgatgatcattgcctagattcattatttcttttggggtttgcaaaatagtgatattctaattctgttattcttttcttcatatattagttgaaatacttctatgaaaaataatgttccctcatgaattaatgaattatttggttccctgaggtacagtttgtacaggaaagacagtttctttatcagctttaaaataatgtgttgatctccagcatgcactaggtgaccaatgagatttttaagtccttacatactcatgtatttgaacatatttaatgtgtttcaatttatatctgttattattaatttttatggctagttttttttttttttttcgagacggagtctcgctctgtcgcccaggctggagtgcagtggtgcaatctcggctcactgcaacctccgcctcccgggttcatgccattctcctgcctcagcctcccgagtagctgggactacaggcgcccgccaccaagcccggctaattttttgtattttcagtagagacagggtttcaccgtgttagccaggatggtctcgatctcctgagctcgtgatctgcccgcctcagcctcccaaagtgctgggattacaggtgtgagctactgcgcccggccttttacggctagattttccagtctgtgggcaatggaagtctctttaggttggatacagttacctttggacatggtcccattaatttggttggttctttgttttcttgtatgatgaaatgtttcaggcttatctggtacatttcccagtcttcatatggaaccagccatttctctcgagtcctggttcttttacatgagaaatggtatttagagatcatggtctgaccactaaagatgttcattgctactgggttgattattgtttttaggccttttcaatgcgtagagctaggaattttttttttcaatgagaaaatatgagttcatactatttaccattcagatttatgaatataggctcttcgattttattactgcgcctcttctctctcacattgaaaatcatggcttcaggttgggcacggtagtttacacttgtaatcccagcactttgcgatgctgaggtgggaggatcacatgagcccagggattcgagaccagcttgggcaacatagtgagacccagtctctgcaaaaaaaaaaaaaaaaaaaaaaattagctgggcatagtggtgcatgcctgtagtcctagttactcaggaggcagaggtaagaagatctctggaacctaggagtttgaggctgcagtgagctatgatcatgacactgcaatccagcctgggatgacagagcaagatctcttaaaaaaaagtgggggaatatcatggctccaatcagtatcaacataactatttgcttcattttacagcacagacacaacatttaagaatattagccaagttgttatcaacaatatgattgctgaaaacagtttaagattttttgtgtgttaattctttgtgtctttagggcatatcccagcagggagtttccgtcaaattactgtatcttaaaatcatttgagattatttctcttttggttatgccacagatttgatagagagttaggttcattgtcttattttgctctcagttttggaggattggcatttttacctttttggtttaattctattacatatttactaaaacctttttgtaattccaaagttagatctataagacaggcatgcacggaaaagtctaactttccattcctgtgaccttcattctgttctctcccttttactataaataaccagttgaacatttaagtatatatatgcagatacacacagatatatacacacacacccctcttcatgtcttagattaagtcatagtatgtatatatctttttctccaccttggttttttttttttttttttttttttttgagacaaggtcttgctgtcacccaggctggaatgtagtgatgcaatcacagctcactgcagcttcaaccacccgggctcaagggatcatctcacctcagcctcctgagtagatgggactaaaggcatgagccaccagcccggctaattttttatttttttgtagagacagggtctcaccacattgcctgggctggtcttgaactcatgggatctactgatcctcccaccttggcttcccaaagtgctgggattacagatgtgagccactgtgtccagcctccaccttgctttttacatttaaaatatatcttggagatttctccaccatggtgtagagaaatacatctcatttgtctttacggctacatagtactccattttctggctgtttttcagccagtttcctctatttggattgttttttttttactgtagataatgcttaagtgaatagttttgttacgtaaatctttttatatttttgccaggatagtttgagaaaaaggcttaacaaatgggattactgcagtaaatgatacatgcatacagaattttgcaaggtcttgtcaaattctccataggtgttacctcattttgtattcccataagcaatgtatgagattgcctgtttctcttcagccttgccagtggagtttgtgggcatactccaggggatgagaaatggtctcttagttttaatttttattttttaaattttattttattgtggtaagaccacagcatcagatctaccttcttaacacatttttaagtgtataatacattatcgttgactataggtgcagtgttgtacagcacatctttagagctgattcttcttgcttaactgaaactattggtaagcaaattcccatttcttcttcccctctttcaactatcattctactctttgattttatgaatttgactattttagatactccatgcaaatatataatatttgtccttctatgactggcttatttcactcagtgtaacatcctcagagttcgtccatgttgtcacatattgcagaatttccctctcttttaagactgaatagtgttccattgtttatatgtactaaattttctttatccattcacctgttgatgaacatttatgttttttccacatgttggttattgtaaatagtgtggtgatgaacgtgggagtgctaataggtcttcagggtcttgtcttcagttcatttggataaatacccggaagtgagattgctagatcatatatggtagttctatttttaattttttgattacatttttaatatttaatcattaaaaattaaaaatttaaatttttaatatttaatcattaaaaatttaaatttttaatatttaaatgttttccatagtggctgcaccatttttcattgtaatcaacagtgtacaagggttccagtttctctacatccttgccaacacttgttgtcttttttttgataattttcatcctgacaaaggtgaaatgatacttcattgtggttttgatttgcatttccctgatgactagtggcattgggcgtctttttatatacctgtcggtcatttgcttttcttgtttggagaaatttctattcaagtccctagctcattttttaattggattactagtgtttttttttttttttttttttgctgttgagttgtaggagccatttattatgttcagtattgggcatttttcattgttttaattcagggccatttccatttcttttttgtgtgaactatttgtctgtttacatatcaggtactgttgtagtccattttgtgcctctataacagaatacccgagaatgggtaatttataaaggaaagaagttgatttagcttatgggtctgtaggctgggaattacaagaaacatggcactggcatccgcttgacttctgttgagggccatgtgtgaagtcaaaacatggcagaaaaggtcaaaggagaaggggacatgtgtgaagaggcaaagcctgaggggtgccctaactttataacaacctgctcttttgataacttcattcctgcatgagcgagaactcactcctgagagatggcattaatggcattaatctattcatgagggatctgcccccatgacccaaacactccctactaggcccacctcccaacactgctgtgctggcatttcaacttcaacatgagttttggcggggacgaaccacatccaaaccatagtgggtatattaatctcttacgtgtgatatgagttgcaaatatgttttccggagtttgtcatttgggttttccctttgcttagatttttaaaaaattttgctttaatgggccaggcgcggtggctcacgcctgtaatcccagcactttgggaggctgaggcaggtggatcatgaggccaggagatcgagaccgtcctgactaacatggtgaaaccctgtctctactaaaaatacaaaaaatcagccggtcgtggtggcgggcgcctgtagtcccagctattcgggaggctgaggcgggagaatggtgtgaacccgggaggcggaggttgcagtgagctgagatcgcaccactgccctccagcctgggtgacagagtgagactccatctcaaaaaaaaaaaattttgctttactgttggttttaccttgtaagagcttttaaaattttgtatatagtcaaattataagaaaatttgactacattaagaaaatgtaagtcattttcttaatactttatttatttatttttgagacagagtctcactctgttgcccagcctggagtgcagtggcgtgatctcggctcactgcaacctctgcctcccagattcaagtgattctcctgcctcagcctcccaagtagcgctaccacacctggctgatttttgtatttttagtagagacgaggtttcaccatgttggccaggctggtctcaaactcctgacctcaggtgatctgcccgccttggcctcccaaagtgctgggattacgggtgtgagccactgtgcccagccacattttcttaatacttttacattttgaattactgttagaaaagttttctttaacagcagggtatagagtaattcatctgttttcctttagtacttgtatattttgcttttttacattaagtctctgttccagttggagtttatcctggtgttcatataaataataaactcagttttatcattttccttatgactatcacattattattatattattattatttttgtgtgtgtgtgtgtgtgtgtgcgtgtgtgtgtgtgtgagatagggtctcactgtgtcacccaggctggagtgcagagagatcacagctcacagcagcctcgatctcctgggctcaagttatcctcccacctcagctgctggagtagctgggactacaggcgtgtgctaccatagccagctaatttttgtgtagacccagggtctcgctctgttgcccagactggtcttgaactcctgggctcaagcgatctgcctgccgtggcctgtcaaaatgctgggatttcaggcgtgagccactgtgcctggccacattgcattattttaatactactactttttttttttctttgagatggagtttcgctcttgttgcccaagctggagtgcaatggcgctatcttggctcactgcaacctctgccttcctggttcaagccattctcctgcttcagcctcccgagtagctgggattacaggcatgcgccaccatgcccagctaattttttttgtatttttagtagagatggagtttcactatgttggccaggctggtctcaaactcctgacctcaggtgatccaccaacctcggcctcccaaagtgctgggattacaggtgtgagccactgtgcccagcctgatactacttcttttaaagttcatcatgcttacaatgatttcagatactgcccttatcatatatcatatttctgtacacagttgaatctatttctggattttctgtactattccattggtctgacttgtcacttcatttgacaatatcattcttttttaaaaaaaattattttgagacagaatcttattctgttgcccaggctggagcacagtggtgtgatcacagctcactgcaacctcggcctcccaggtacaagggatcctcctacctcagcctcctgagtaggtgggactacaggcatgtgccaccacacccagctaatttttttttatttttggtagagacagggtctcactatattgcccaggctagtctcaaactcctgaggttaagccatcctcttgcctcggccattttttttttttaatgtttggctgggtgcagtagcttatgtctataatcccagtgctttgggaggttgaggcatgaggatggcttgaggccaggagctcaagaccagcctgggcaatatagcaagaccccatctctaaaaaagaaaatataaatttcattgtgatattctgaaatacatatttgatcttcaaccctgtttcctgacataataactcctaaaatcttaggctctccaaagtgatgtctttttgtatgctattgattggtttatggctggcagctcctaggtagcttcaggataggggtcagtcaccagaacgaccaaggcaggattagaggattgggactttctgcccacccctctcccaacctccagggagtggagaggggctgagagttaagttgatcacctatggccagtggtttagtcagtcatgcccaaataatgaagattccatcaaaacccaaagggacagcattcagagattttctagacatctgaacacacagagtttcctgaaggttgatgcacctagggagggcatggaagctccaagcgccttccctaatacttcgttctatgcatctcttcatctgtatcctttgtaatatcctttataataaactagcaaatgccattaagtttccctgggttctatgtactgctctagtaaattaatcaaacccacagagggggtcatgggaaccctaacttgaagcagatcagtcagaaattctggcagcctgaacttgtgatatgtatctgaagtcaggcagtcttgtgggactgagcccttaatctgtgagatctgacagtgtctccgggggaatcgtgtcggaacggaattggaggacacccagctggtgtctgctatagaactgattgttttcttggtgtgtgggaaaaacctccacacagttgaggacagaagtcttctgtgttgattgttgtggtgtgggagcagaggaggaacagtttgtttttttccccactcatggtgaactacacaatgtgaaatttaccatcttaactactgtatactacttttagtgtacggttcagtggcattaaatacgttcataatgtgtaaccatcaccaccagcagcatctctataattctttatctcttaaacctgaaactctgtacccgttaaacagtaactacccattctcccttccctttagctctggcaactaccagtgatggtgccattctttcatgtatggatgttttgtatgtttcaatatctggtgtgggtagtgccccgtccccaacccctgttgcttttctttttcatggtttttcctagctacttgtgcttgtttgttctttccaatgaatttcatcagcaatttttgtagctccgtaacaaaaataggtattttaattgagatgatgttaaatgcattaacttagggagaactgatgctgctgcagtgatgtttggtcttgctagctaagaacatgctatgtctttatatttgcttaagccatgttttgtgtctttctggagtgctttcatggtttactcttgtagatactggatgttaccaattttaagtttatgcttaggtattttctgtatttttagacaattacgaaatattttataattgtaaatattttttacattatcttattctataattatggttttgtgtttgtacatatgaacactgatttttatctgttgattttataatgtgccctttactaactatcttatagtttttccagatgtattcttgtatcatctgtaaattgagatagatatttgctctttttggccaactatctgtagggtccctagtttctctatctctctatctctctcttaagtcaaaaatggttgctggctttaggcatttgattgcaaaatgtcaacatttgtttttttttttaaatcaaattaattgatatataactcatacatgcagaaaatttatgcttttaaggtttacagtttaatcaattttgagaaacttatgtaatcatgttgctactactacaatcgagatataggatatttctatcactggccgggtggctcacacttgtaatcccagcattttgggaggccaaggtgggtggatcacttgaagccaggagttcgagaccagcctggccaacatggtgaaacccagtctctactaaaactacaaaaaattagccaggtgtggtggcgggtacctgtaatcccacctattcaggaggctgaggcaggagaatcacttgaacctgggaggtggaggttgcagtgatccgagatcgtgccattgcactccatctagcttactgggcaacaagagcaaaactccatctcaaaaaaaaaaaaaaaaaaaaaaaagaatatttctgtcactcttgtgactgtttgtatcaatacctcttctaacctccagttcctggaaaccactcatcttatttcttttcctgtagtttcaaccttttcaaaataccatataaatggaatcatactgtatctatatctatatatccttttgagtctggcttcattcacttacataatgtcttagagattcatccatgttgctgcatgtatttgtagttccttttttattgctgaatagtattccattgtatggatatatgatatttatctattcaccaactgaggataattgggttgtttccagactttggtgagtagaataaagctgctataaatacttgcatacaagttttttatagacataggttttcatttctcttgggtaaataccttacaatgggattgctgggtcatacattgtgtgtttaactttataagaaactgccaaatcacctgtcaaagtagttgcagctttttgtatttctgtccacaatgcatgaaagttccagttgtcccacatctttgctagcatttggtatcttcagctatatttttctttagttattttcattgttgtgtagtatagatctcatttctgttttaattttatgactttgttttaaacctttgataaaatacaaggctgagttgtcaaccaggccactttagtctaatgaatattcatctgaaacttggaaggtgggctgtcaccttgctcacttgtccctactcccagcacagtgggcttgagaattcttaaccacctaaatcaaccattgaccagtaaccaaggaaggccacttgtcttctgtttatttggaaggaaaagaatatttttatggaacttatccgtattttcaaagcaaactagcagttactcgattttaatgaaaatatagcttaaaaatggtgtcttttctttgtatgtctaagaaatttgcaagtttttcttaagcttgccatatcaacatgaaatgatgtcaaatttctactgatttgcacaggaaaacaatgaagagtcgttatatggaactctatgaccttaatagagacttgctaaatggatataaaattcgctgtaacaatcacacagagctgttgggaaacctcaaagcagtaaatcaagcaattcaaagagcaggtcgtctgcggggtaagtctcttttcataacactgcactttgatctgtaatgtttttggtggaactcattgaagatggtggtagcatccaataattcatattggggctgaaagtagcatacctttcacactccagagctggcaccagtcacttatgtttcagtcagtcggcctagtgtttggcttttgtctccggacttcaaagggagagaaaaccttcagctccttttcttagaccttcctgcatcctctaaagaaaaacctactatatataacccaaaggaaatatataaacatatatatataaataaaaccatcaaggcccaattagcaaaaaagagactgaaaattaatgctaagtgtctaacttaaaaatttagaaaagaacaataggataaacccaaggaagcagaaatatagccagagatttatacctgaattctgctgttttgggtcgatgctttgacttctttagaaataatctttgctaggtgactatgagctttgatccttttctgtaaaactgactgttggtttctaggtttgagacagtctctaagtcagttttttcaataattccctcaccaagttattttttttagggaatggtaagataaatcatatttcaagtataactcttttccctcctggttttatgttgttttaaaactgacgtctaattttataatttcatgtctaacaatcttttggttcctgatgtttcttcttatgcagttggaaaaccaaagaaccaggtgatcactgcttgtcgggatgcaattcgaagcaataacatcaacacactgttcaaaatcatgcgagtggggacagcttcttcctaggtgaggaaaatacaggtcatgaagttcctggcaaagattttctgttaaaaacctatgctggtttgctttggatcacaccctggtgaaccccgggtgctaagaatgaaaataaccttggtgagttgtacaaattaaagacaaagaactacatgtgaagatagacttgctttctatttttaaatcagtagtagtactgttgctgaataatactaggtttttatggaataggatgaatgcttttgaagtattagggcttcagagtccaattttgcttatttatggtatataaatacatatttttttcttgaaattgcaattgagtttgtacttttcaaatagattatctactttttcattaaaatgtaaagatgttaaactttgtgttgattgattataaaatcaccaccaaatcagaa

SEQ ID NO: 15477 - DNA, 52267 bp, Homo sapiens
gcagcggtgggctgagctaaaatggctgaggagagagtcgcgacggtgagcgccgagattctctttagttgcccggccgcagggcaaggcaagctggcgggtggcttttgtcccatgcagcggttcctggagagaggcggagctgggtgccgagcgtctcagggtgggcggggcgacacggtcccctttttactgtcccgggaactggtcgcctggggcaagtctggatacttagcagcacaggtcctgttctaggactgtagtccctcttggggtgcgctggacggagaagggagacttttcaccagtaatggctcttaccgtagtgccatctttttctgtctcgggggtttggaaggtaatgactagcacttgtgtagacagttcctgttaatcccgtgaattgggaatttaacatgcctggaagcttgcagcgtcactgccttctgccagtggagcgggactgtgttttttctgtggtgattaagtttaggaaagtacggttttggaattcatctgaaggctgagttgggcgttcactccacagaactgctaatatagaggaacccgatgaattcaggatgacctagtcgctattttttgaggcatatatctataattggatctaatttcggtaaagtgccaagtgtgaagctttgtttaccttgctttagtgttgggtttgaaagcctgttctgtccatttgttagaatgattttaggtattcggaatttattgtctttcgaaaaacgccctggaaaacagtacaaatagcagcctttggctgttttacaacttagttttggctaagcagcaaggttagtgttattgttagagggccttttgtttgttttctactctcatttgcagagtagtcatattattctagtctaattagaaaactctgaagacagaaacttttttttttgagacggagtgtcgctgttgtcggcccgggctggagtgcaatggcgcgatctcggctcactgcaacctccgcctcccaggttccagcaattctcctgcctcagcctccggattagctgagaatacaggcgcctgccaccacgcccggccgaaacatttttattaagctaagaaatttaaaatagctaggccggacgcggtgcatcacgcctgtaatcccagcactttgggaggccgagacgggtggatcacttgaggtcatgagtttgagaccatcctggccaacatggtgaaaccccgtctctactaaaaatacaaaaattagcggggcatcgtggcgctcgcctgtaatcccaggtacctggaaggctgaggcaggagaatcgcttgaaccccggaggcggaggttgcagtgagccgagatcatgccattgcactccagcatgagcgacagagacagactccttctcaaaaaaaaagaaagaaaaaacagattttaaaataattaaataggccaggctcagtggctcacgcctgtaatcctagcaccttgggaggctgaggtgggtggatcgcctgaggtcaggagttcgagaccagcctggccaacgtagtgaaaccctgtccctactaaaaaaatacaaaaaattagctggacgtggtggcgggcgctggtaatcccagctactagggaggctgaggcaggagaatcgcttagaacccaggaggcagaggttgcagtgagccgagatcgtgccatttcactgcagcctgggcatccagagcaaaactccgtctcagaaaaaaaaaaaaagtaaatagcatggttaatgttactgggttttaaatattaaaaacataggaaagaaaatacttccactccagcctgggtgacagagcaagactccgtctcaaaaaaaaaaaaaaaaaaaaaaagaaaatacttctaagtaatcttaaagtgtaaaagataatgggtaacataacattgctacaaatatagcttatcctctagtgctcatcacaagtgtttgtgtaatagaatatgaacttgagtctgtgacggcagaattgtcatgtacatttgaatgtctaatactgttttaaagagaatagcttttgtttcgatatgacttagcaattaagcctgaagttaactgttttcattgttgtcaaatttattgctagtagtgttacgtttatagtaattttcatcttttcaagttaccaatgcatggaaatgtgaatttctgtccttttaggaagtggtattttatcttttttttttttttttttttgagacggagtctcactttgtcgccctgtctggagtgcagtggcgtgatctcagctcagtggaacctctgcctcccgggttcaagtgatttttctgcctcagcctcccgagtagctggggttacaggccctcaccaccatgcctggcttatttttgtggagatggggtttcaccacgttggccaggctggtcttgaactcctgaccttgtgatctgcacgcctcggtctcccaaagtgttgggattacaggcgtgagccatggccccctgccttattttttaatacaattaaaagaacccagtaatcctactcctagacctgtgtcccacagaaaaaagtgttaaacatgagcgtgtagtactagggcattcgttgtagtactatccgtagtggcaaaacgctggaagcaaattaaatgcccattaatagggtaattgatgacttcagatatttccatactgtggaatattatgcagtcattaaaaagaatgttacaactaattgcttttcctctcagaagcccctctctctcactagagaaagctgttctcctttctttcttctgcctattaaacctccattcctaaactcagaaagaaaaaaaaaaaaagagaatgttacgactaattgacttggagggacttccatggtgtacatttaaataaaaggtagatgtgaagtggggtatattatgtgatcttaatttcataacacaaaggaaaacatatagatccgtagataaggatatatggatatggaggagagaaaaggaaaagactcaaaactcacagaatttttgaagaaatgtatagctaaaaatctaagaaggctacagtcaaggccttgaggccagaagacaccccatcaaaactgagtaaaactagcccagtgtgggacgcagaaattctagtatgctaccaaaattacttacggattgctaccagttccttagaaggaaaactgaggactaatatttgtattttcagtatagtttagaattcttaaaaaatgagcaaacaggctgtacttggtggctcatgcctgtaatgccaggacttgtggaaactgaggtgagaggataacttgagtccagaggtttgagaccagtctgggcaacatgttggagccccatttctacaaaaaacacaaaaattagccagacgtggtggcacgcgcctgtcttcccagctactggggaggatcatctgagcctgggggaagttgaggctccagtgagccatgatcatgccactggactccagcaggggcagagtgagactttgtctgaaaaaaacaaaaaatgaatgagcaactaactctggctttcatgatttgtgcttataaatctttttatttatttatttatttatttatttatttatttatttatttattttgagacggagtcttgctctgtcgcccaggctggagcgcagtggcgcgatctcggctcactgcaacctccgcctcccgggttcacgccattctccagcctgagcctccggagtagctgggactacaggcgcctgccaccacgcccagctaattttttgtatttttagtagagacggggtttcaccgtgttagccaggatggtttcaatctcctgaccttgtgatccgcccgactcagcctcccaaagtgctgggattacaggcgagccactgtacccagcctataaattttttttataatgccctgattcccattatttgatgtatttggataaatatgtcatcctgtaaattgaaggattaaactgataagagcagaaaacagaaattagtacactagttgatctggctcagatatagtgcctatgtatcaggtgctccatgaatatttgttggatgaataaatgatcataaaactatataaaaatgaagaaataacagaataaaataatttgttctatataaatcctatgaatgagattgagtgggctaatagaatcctttccatctcaaaatgttctggaaagtcttgagtaaaagactcatcaaaaaaataattctgctttgtgcagaaagaagggttgctgacctttgaaggtgctttttgagtctttaacattctttagtagtatattccccaaagttaagaaattctagttagattttaaaaaattgagttaacatttaaaaaacagttttgttgaggtataatacacgtaccataaaatttactcaatttaagtacaaagtttgatcagttttagtaaatttatatagttgcacagctgtcatcagaggctgcttttaaaacatgtccatcactccagaagggttcctgtgtcaatggaattgctgggttatattgtttaagtatttgtttaaaaaaacagaaacaaatctgcctaacttctgcaggctatatacgagttaacatttccatgagcaatgcatgagggttgtgatttttccacatccctgtcaacacttggtttgtcagtttgtttttatttagctgttgtagtggatgggtagtgatggtgtatggtggttttaatttgtatttccttcatgaataatgatattgaagattttttatatgtttattttccacccgtatctctttggtgaaatgtctttataaatttttgtgaatttttaaatcaagatcattaaccaaatgagcccctcatttgggctcaagtgatccttccacctcaacctcccgagtagctgggaccacaggtgcaggccacgcttggctaatttttgtatattttgtagaggcggggttttgccatgttgcccaggctggtcttaaactcctgaactcaagcaattggcctgcctcacataagtattctcttttattttgaggattaatttttgttgttgtgaaatatatcctacctgtaaaagagtgcttaaaatgtcgtatgtgtgctttaaaggataatataatggaaacttgtgttcctactgcccaggttaggaaatgggttattaataactttgaaacctcctaaatgcctctctcctactgcattttccttcctccacatcagatgtagtgtttcttcaattttatattaatattttgtactttttatagttttaccatatatgtttatatatatccttaatatattagtttttaaaatttgttattaaccttcagtttattcattatttcaacactgtatagtatcttattgtagtaaagtatgtcaattaacttatccattccactagatggagatcgggattatttctggtttttagttattaaaaacaatgctgctgctgggtgcagtggcttacgcctgtaatcctagcactttgggaggccgaggctgcggatcatgaggtcaagagatcgagatcatcctggccaacatggtgcaactccgtctctactaaaaatacaaaaattagcaggatgcggtgctgcgcgcctgtagtccctgctactcgggaggctgaggcgggagaatcacttgaacccaggaggcggaggttgcagtgagccgagattgtgccactgcacttcagcttggcagagcgagacttcgtctcaaaaaaaaaaaaaaaaaaagctgctataaatatggccaagactaaggaaaggtaagtgaggtgcttagggttcacattttatggagtaagagtaagtaccttcttaaggtttataccctaggttcttcacatgcctcactttagtcctagccctgagcattattatgtaggtcttctgatgcaatatctaagagtttctctaaggtatacctagaaatagattgctaggtaatggagtaactttattacttacaggaaactatatggtggttgtaacaatttatgcttctgccaccagtcatggtggatatgaaattatgtcttaatgtgataatttacattgcaatttttttttttttttttttttttttttttgagacagagtcttgctctgtcacccaggctggagtgcagtggcgtgatcttggctcactgcaacctctgcctcctgggctcaagtgatccttccacctcagcctcccgagtagctgagaccacaggcgcaggccacacttggctaatttttgtatattctgtagaggcggggtttcgtcatgttacccaggctggtcttaaactcctgaactcaagcaatcggcctgcctcagcctaccgaagtgctgggattagaggtgtgagccaccacacctggctgtttgtttgttttgagcctgttcctcaggctggagtgcagtggtccaatcatggcttgctgcaactccgcttcctgggcttaagagatcctcccacctcagccttctgagtagctaggactaagggcacctgccactatgcctggctaatttctaaagttttttttatagaggcagagtctcgctgttttgcccaagctgttctcaaatttctaggctcgtgtgatcctcctgcctcagcctcccaaagtgctgggattataggtgtgagccaccacacctggctgatctatctgtcttaaactggagaattgcatttttttctacctcctttcttttttttaaaaaaactgaatttccatctgttacccctccctttctgctcctcttatttcatgccttggaagttatactttgccttcctttaatgagtaccaaagaaattaaaaaatacatgtttactgtaagtccaggcctaaatgttgctactacagggaccatcaaatgctttactaccatctattgccatctgcaaatgtatgccattgttgtttagttttgtagttcttaatgtattttaattaaacaccacaaattatgctttttgtttgttttattcagtcagtagatgcttagaatacttgcttattttaccaattcctttgcttattccactcctttgttctgggattatttttctttttcctaatatattttcattaaaagtttatttggtgagaatctaaaaactctcaaattctgaaagttttaaaaatttgcctttgttgttgaaaattagttttgatgggtgagagaatctagatcaggtgttagcaaacctttttttgtaaagggccagatagtaaatattgtgggctttgtgggccatagagtctctctgacaactactcagcaatgctgttgtaggacaaaagcaaccatagacattatgtaaacatgagtgtgggtatgttctcacaaattttgtttatagacactgaaatttgactcaattttcatgtgttaaaaattattattttttgaatttttttaaccatataaaaatgtaaaaatcattcgtagcttgtagaccaaataaacaggatggatttgacctgtgggccatagtttgctgacctctggtctaaattaacattcattttacttagtacctgacactggagtaattattcttatgatgtcttattgtgatattgtcttccatttttaattgttgaagagccagctgtcagtcttttttgtttttctttttcttcttcttttttttttgaaatggagttttgctcttatcgcccaagctggagtgcagtggtgtgatcttggcccactgcaacctctgccttctgggttcaagcgattttcctgcctcagcctcccaagtagctgggattacaggtgcctgccaccacacccagctaatttttgtatttttagtagagatggggcttcaccatgttggccaggctggtgttgaactcctaacctcaggtgatccacctgccttggcctcccaaagtgctgcaattacaggcatgaggcacggcgtctggcctttctttcctttttttttttttttgagacgtagtcttgctctgttgcccaggccggggggcgatggtacgatcttggctcattgcaacctctgcttcccaagttcaagccattctcctgcctcagcctcccaagtagctgggactataggcacgtgccaccatgccgagctaatttttgtatatttagtagagacggggtttcaccatgttgtccaggctggtcttgaactcctgacctcaagtgatcctctcgccttggcctctcaaataactgtcctttctttgttggtaatctggtgatatgttttcttgtttggctgcttttaagagctgcttcttgtctctggtgcagttcgctatgatgtatctaagtatgtatttattttcatttaacctggtcaggatttgttgagtatccagaaactaaggattggtgtttctcattacatctggaaaaatttgagccattatttttgcttatattgtggtatgtcataggaagttgagaaaagaaaaattcatttgatggttttctatgaggttatagtggaaaataactatctcccttttagaattgagtgctagacagtttctgtgtagatgatctcataagcttccttttatcaaacagcgatcacttttttggtttggctgctgagaagtatggcatcaagtataatactcatatgaggtgtttaagaactgagtatatttcttatgcacattttactatatactataattatacattaaaaatgcacattgtaaatattataaatatgtgttatacattgttaatagtttggatagcaaaagtatgacttgacatttgttttttaaaccatatttaaagtaactctatcacaatatggatttaatggattaattgcataattggtgagctactgattattcttgttatttggatgcttctttaagttagcaagtttatattgtggtgcttcaatatagactacttatttcatttcagagaactcaatttcctgtatctactgagtctcaaaaaccccggcagaaaaaaggtctgtatgcagtttcatggtatgtgtatgtttgcacagacagatttctcttttatttatttatttatttttttttttggaggcagagtctcactgtcacccaggctggagtgcagtagcacaatcttggctcactgcaacctttgcctctggggctcaagcaattctcctgcctcagcctcccgagtagctgggattacaggtgcacgccaccacacctggctaacttttgtgttttagtagagatgaggtttcactgtgtttgccaggctggtctcgaactcctgacctcaggtgatctgcccaccttggcctcccaaagtgttgggattacaggcgtgagccgccacgcctggccagatttctctctcttgttgattcttttatctattctatattatttcaaaatgagtgttgggaaaagaagtaatagtctaaatgttctgtcacatctagcttttatttaatagagttattagatattaggaggttggtttgacctggaaattatttaaatggggtttgattattatgtaagtgtgtactaattttctgcttctggaaaaaccactttgtgaagttccaggtatctttttgctttgttggtttctagtttaattctattgtgggtagagaacattctttatatggtttgttttatggcccacaatgtggcctgtgttggtgcatgtcccatgtacacttggaaataatgtgtattctgctcttgtaggatgtagcattctgtaaatgtcaattaggtcaagttggttgatagtgttctgtatatacttacaattacagatattcatattcttactgatgtagttactgattggaagggtgatagaagagtgttgaagtgtgcaaatgtaattgtggatttgtttctactttcagttctatcaatttttgatttgtgtattttgaagatctgttgttggatgcatatacatttaggattgtctgatttcttggtaaattgacccgtttgtctttatataatattcctcttcaatttctgataatattccttgtttgaagtctactttgcctgataatattttagttttagttatttatttagctattttagttttgctttggccagtctttgaatggtatcaacatataattttcgtagagtaaaattccctttttttagtacaaattctgagtttcgacaaatgaaactagccatgtaaccactagtagcaccataatcaagttataaaagtttaattactcccccaaaagtcacctttactttgtagtaaaccacttcttccattcccaattgcgggcagccattaatctgtttctttcttcctagttttgcctttcttggaatgccaaataaatggaatcatacattattattattttgagagagagggtctcgctctgtcacccaagctagagtgcagtggtgtgattatagctcactgcaacctgaaactcctgggttcaaatggttttccccagtagctgggtctacaggtgcatgccgccatgcctggctaatttttatgtattttttttgtagaaatgggggtctggctctgttgcccaggctggttttgaactcctggcttcaagtgatactccatcttcggcctcctgaagtactggcattacaggcatgagctattgcacctgggttatgtaaatttttcagtggcttttaaacctcatataatgtttgtttgttggtttgtttttgaggcggaggctcgctctgtcacccaggctggagtgcagtggtgcagtctcagctcactgcaacctccacctcctgggttcaagtgattctgctgtctcagcctcccaagtagctgggattatcggcatgaaccaccatgcctggctaatttttttatttttagtacagatggggtttcaccacgttggccaggctggtcttgaactcctgacctcaagtgatccacctgctttggccccccaaagtactgggattacaggcatgagccactgcatccagcccaatatagggaggtattaagaaaagagaagaactatcatccttaagtattaacgggactttaacaaattaaaaaagtagtactttgaataaaaagctgtcacattttactgtgaaatccttagactttttttatacctctagttcaggttttttcagctttggcatgaatgatattttgagcaagataaatctttgttggagttgtcctgtatattgtaggatggttaacaacatccctggcttctacctggtagatgacagtagcacttaattgtaacaaccaaaagtgtctccagatgttgccagttattccttctggggcaaaattgttcccacttgagaaccactgctctggttaagtagtgtaatacttggaaatagaaggcagaaagttggtaagtgcataaagaattcacacagaagttggattagcaagctgagagacgttatttgaacaagtagcaattggaggcattttgactgagaatggatgttgtgcctctccctcactctttcctcctcagcttgagaggtccatattctctcaaagtttgactctttagttttgagggtgatgactgccaactgtggaagggataaacagatttctgtttggtatttttgtccaaatatatcaggactttttcaagaacaggcaatgaaattattgatcagaactacttggtggttctgagaaaataatatgctacatgaggctactgaagtcctcttccttttgccccatgatgtaaccttaggtgactttcttctggctttcagttgaagatcttacccatcattgaggtgagcgaactgatttactgcttgagtctattttcttccttaaaggagtcttcattgaaaactttacccattttggggtggccatagctgaggatgagttttgtccacaacctgagacaacatactcactatgtaaaaaacctgatctcagcttgatatctggttttagactaattgtttaatagaataatttattattgtaaaatatatataaaatttaccatttttaagtgtgtaagtcagtggcattaagtacatttacaaagttgtgcagccatcaccactgtccatttctagaagtgtttcatcattccaaacagaaacactgtacccattaaacaataaatctccacatccccttgcctccccagatcctggtaatctccattctattttctgtatctatgaatttgactattctaggtttttcatgtaaggtgaatcatacaatatttgcccttttctgcctggcttattccactcagcattttcaagattcattcatgttgtagcatgtgtcagaatttcattcctttttaaggctgaataatattctagtgtatgtatatatcacattttgtttatctgtctgttgatgggcatttgggttgttttccttagagtctttatatgtcagtaattcttaaagaatttaaaagttgtagaaactaggaattttgtagatattctagaaatatgtcatttcctgtactgtatataataatttattctacagactaattactgtgtatatatttggttctcagacgtgattttgattttgtagatgctgtacatgctcttcacttcattaatcttttccttttgctaattttggttcttgtgtatacagaattatagagttacaaggtaatttagttgttacctaattcaccctaaagtctacatgaaaccactgtcacagtctttgataagtagttaccaaatctcactatttctactgtgatagtgaatgactttcattgattagctttctgaaagaatagtttatcttacttgtcttggtatcctcacctctgagtctatttgtctattgtaatctggcttttgctccaccgctccactgattaaatggatgagctaagcatttttttttttttccactgcaacctctgcctcccgggttcaagtgattctcttgcctcagcttcccgtgtagctggtattacaggtgcccaccaccatgcctggctaattttttgtctttttagtagaaacggggtttcactatgttggccagactggtatcgagctcctgacttcatgatccaccccaaagcctcccaaagttctgggattacaggtgtgagccaccgtgcttggcccaattctgtttaatttttgaggaacaatgttaacttctaatttaaatggaaggtagtatatatctaatttttccctattatttttaatttcaatgctagtaaatctttaaatctgaaatacacactcttgaattttgacagatatgtatactcatgtacatatttatattcctgtaatcatcagatcaaattaaacatttttatcacttagaaagtttcctcatgcctttttccagtaagtcttctgcttcacttcgccagatgcaaccaccattctgatttctgcctgtataaattgattttgaactttcctataataagttgtgcttgaacttcacacaaagggagccatacagtatctactatttagcttttggcagctttcatacaacatgttgttttggagattcatccgtgttgttatatgtatcagtagttcttttatttaaaaaatgctgtttagtattcagttgcatgaatataccaccgtttgtccattctcctgttaatgagtatttgcaatgtttccagtttttgagtactgtgaaagtttctatgaacatttatttatttagagatggagtctcgctttattgcccaggctggagtgcagtggtgcgatctcagctcactgtaacctccgcctcctgggttcaatcgattcttcagcttcagcctcctgagtagctgggactataggtgtgtgccaccatgcccggctaatttttctatttttagtagagacgggatttcaccatattagccaggctggtcttgaattccttacctcatgatccgcccgcctcagcctcccatagtgctgggattacaggcatgagccactgcacccggcctgaacatttatttactggttttttttgtgtgtgcatgtgtgtgcaagttttcacttgaataagtgcctagggagtggaattgcttggtcatatgtgaactgtttgttttaactttataataaactgccgaagtattttccaaagtggttgtacagttttacccgaccgccagcaacgtgtgaggattctgtttggctacattcttgccaacatttgttactatcagtctttttcatattagacttgctggtgggtatattgtgttttattgtgattttaatttgcattacactaatgactagtgatgttgaacaccttttcatatacttattggtcatatcttttgtgtagtgtctgctcaagttttttgcctatttttaaatttcttttttccttattattgatttgtgagacttcttaatatattctgaatgtacgtcctttgtctgttatatatgtggtaagtatttccccccagcctgtgttttactactttcattttattaaggtatcttttgatgatcaaaagttttaattttgatgaaggccaatttactattatttttcttttgttattaatgccttctctgtcttgtctaggaaatcttgatccttaccccagactgagttgtgtgtcctctcccttttctgcattaatattgcagaaattaattttttggttttagaaaatgtctaatttggctcaatcagtaatttttgatatctttctattgaaatatatatacagaaaagtacatacataaatcataattgtactgtgcagtgaatttttacaaagtaaacatatccatgtaatcaccatctagattaaggtatagaatattatcagtgccctccaggccgcctccttattccctaccagtcattaaccacccctcccaaaggtagtaacttgtatttaacttctatcttctacatcagttttgcctgcttttgaatttaatgtaaatggaatcatgcagtgtgtactttttaatatctaacttcgttgctcagaattatgtttgtgagattcatttatgttgttgcatgtagtagtggttggttgttttcttccttgttatatatattccattgtggggctctacctaagtctattcattttatacttgatgaacatttgggatatttttattgtgatgtattatgaataatgccaccatgaagagtcttgtacatgttttttggtacacatacatacttaggagtaggattttcagggtcaccaggaaggatatatttaggctcagtgaatactagcaagcaatttttaaaatgcggtcaatataatccccatgtgtaaaataaaggtgtacaaacgcacacacacacacttgctcatatgcttatatgtgcatagaaattccttgaaaatactcaagaaatgcttcacctctggtaagggataggaatggaatgggtcttttgtttagtatcctatgtgccctttgaattttgttttactgtaagtatgtatttttaagaaaaccaactagttatttttaaaaatcatttgaaagtcttcctactttgatatatgaaaaacactggttttaaaaaaaataatagaaaagctttaaaatcattattatttttttgagacggagtcttgctctgtcgccaggctggagtgcagtggtgcgatttccgctcaccacaacctttgcctcccggattcaagcaattctcctgcctcagcctcccaagtagctgggactacaggtgtgtgccaccaggcccagctaatttttttttttttttgtatttttaatagagatggggtttcaccatgttggccaggatggtctcaatctcttgacctcgtgatctgcctgcctcggcctcccaaagtgctgggattacaggcgtgagccactgtgcctggccgctttaaaatcattaatgttgcgttgctcagttatgtctaattgacagcccaaacatttacattgtaatattagaaaatcctttatgattgggcagaaacttggtttaatgtgtcaccttggagacctgggttatagtcctgcctcttccattaactacttgttgaatgtggacaatttacttaacctttagggccttaatttcctcctttataatgtgagaatgttctctgaattgcataactcactggccttacgtgactattcagtggaataataagagagaaaaactttgagatacatgcacacacacccttaagaaggatataattgttaaattttgctttgaggaaataaaataatctaagctataaagtaaaaccataattagctaatcttttatatgacttttttcttcctcatttcaagctaatgagaagcaaacaaactggatagcagcaatataattaaaaaattataggccagcttctagcatgtattcttgagtcaatactgactcagcccagtctcttcctcttccttcatcatcatttatgtacctgaacagagtagatgtttctcttgatcctgggcctgttcgccctcagatccattccttgccttctcttctctttttggtatagtgaggagctgactctttttttttttttttttttttttgagacggagtctcgctctgtcgcccaggctggagtgcagtggcgggatctcggctcactgcaagctccgccttccgggttcacgccattctcctgcctcagcctcccaagtagctgggactacaggcgcccgccactacgcccggctaattttttttgtatttttagtagagacggggtttcacctttttttagccgggatggtctcgatctcctgacctcgtgatccgcccgcctcggcctcccaaagtgctgggattacaggcgtgagccatcgcgcccggccgaggagctgactcttgcagcctccttttcttcccaggcttccgtgtcagcagtttctggctggattagcaagtggaggaactggcaggagattagaaggcaagaggaaagagaagacagggcttccctccccgaccttcaggcctcagagtcgtagtggttttttgctcatgcagacttctgatttgtctcaccattccctgttgggcctctcatttcttccattgcctgttctctgcattaaagtccttgtgtttcaaatcctcaagtggctttttgttaggctttgactgatacagggctcaaaatgatagtaatgaaaatgtcttacatttatattcttttcaagatttgttatctcttttgataccccaaatatcctattgaggtagaaaagtgttataattcctgtttggcatgaggaaattaacatttattgaatgactattttcagattctttggattttcgggtgaaaattttaggggggataaatggaggcccagagaagtgaaataacttgccctaggccccatagaaggctggtattgaatcaagattgaaattctgcatgtgaaaacttttacgtgctacatgtctgctagtcctggaagaaatcctttctttgatgagtattttttttaaaggctttacttgcaatatatttacaaaagccttagttatttagtaaatttttcaatgaaaaatctgaaccataataattttctgcttagtacttatatagctagcatactatccctagcattaatcaaagtgtcatgtaaaggtttgatttttgagcctaagcagaatttgaaattcttctaagagaatttagcacctagggcaaactacaggggagaattcttgaggtgtcatgtttattcacttctggaattgtttaaaatatgtcaggtgcatccttaaagggagaaagaagggggaagagatgttacaaaagagtagaatggggcaagagaagtggcaagggagtattgttgctaggttgccagccttctgcccccactgtcttggtgatggtggaggggtagtgtggcagctgggatatgaatgaggtcttttttataactcactaaaagccattaccttgtcttcatctcgtcagctggctacctgacctctgtggtaacataggctcctgaaatgtagcattggagatgatcactgtgctttattgcaaaataggggagactctgctctgcatttacatgcttatgttttgtggaggatctttcaactagtaattctcataatacctgtgaaagcatataagaaccagtatctccatttttagggggagttggagtgagcaatgatttggaataccagaaattcaacttatatatttacaggtaaaattctaattgtaaattcaggattcatagattctagggatttctgaggtatccagaattccttcatctttgatgataagtagataataatggtaataaaaataacagcaacaggcccagcacagtgacccacacctgtaatcccagcactttgggagactgaggcaggtggatcacttgaggtcaggagttcaagaccagcctggcggacatggcaaaaccccatttctactaaaaatgcaaaaattagctgagcatagtggcatgtgcctgtaatcccagctactcagtaggctgagtcataagaatcatttgaatctgggaggtggagattgcggtgagctaagatcgcgccactgcactccggcctttatgacagaactcgactccatctcaaaaaaacaaaacaaaacaaaacaaaacaaaaacaaaatgcaaaaaaacagcaacaataataggtaacatttctttaaggcctactatgtaccaggcactatttgaacctctttatatattaggtaatacgatacaactctatgagaatgagtattttatttcctgacccttctatttaaaagtaaaaccccccacccggcactgtttctctttcctgctttatttttctccatagaaaaatatcactcataagtgtaacatactttattatctgtcctgtgtggtagtagcccctgccctcaattataaactccatgaaatcagggagtcagttttgttcactgctgtattcccagtgcctagaacagtgcctggaatcatggtaggtacccagcgaatattggttgaatgaatgagtcttggttttacagatgaggaaactataaatttcccaggtcacacatttggtaataggacagttgtgtacactgaaatgttctctaaaatatttgatggaacgaaaattagcttttggacagctacatctccaagagtgtgaaatgaccttcagcactggatttggtggattttcctttttctaatccctagagttccatttaatgagcgtttgggttcttgagctaccttacaaattgaacacttttttctccagctttcactcaagaaacacaaaacatggcttgtcctttttttttttttttttttttttgagactgggtctcactctgtcacccaggttggagtgcagtgcacaatcatggttcattgcaacctctgcctcccaggctcaagcaatcctcctaactcagcctcctgagtagctgggactacaggcttgtgcctccactcctggctaatttttttgtattttttgtagagatggggtttgtccaggctggccttgaagtgctggactcaagtgatccgtccacctgggcctcccaaagtgctggggttacaggcgtaaaccactatagctagccctgattgtcttttattgtgagattttaataacagctaagacttgaaaattaacattttataaattttcttttagactacttagtgatatactaagtatctaaggtttgtaatacttagtataaactcaaaagggttcagtgcctcattctcttttactctttccctttagtagataggtgacagaggactgggtcatgcagttgagacttggtccaagatgacttagtaagctacttgtcccagaactatttatttatttacttatttttgagatggagtctcgctctgtcgcccaggctggagtgcagtggtgtgatcttggctcactgcaacccccgtctcctgggttcaagcgattcttttgcctcagcctcccgagtagctgggattataggtgcccgccaccactcccggctaattttttgtatttttagtagagacttggtttcattgtgttagccaggattgtttcgatctcctgacctcatgatccacctgcgtggacctcccaaaatgctaggattacaggcgtgagtcaccacccccggaccctggaactatttatgacggtgcactttatgcacttaacacactcacatgtctttaagcttggtgactcgtgtggctttttcgaaggagatttgattctggaagtggttaagtaggatgtgaatggctaaggtctggtcattggtgaagcctaggggaagaaaagaaaggaaacacaagtcttagaagaatttcagatcggccccaacgactagaagggtggttctactaagaaaatgtgtgtagtcagaaaatgaagagtcagttgcttaaaattttactttttttcttgttcctggcatgtaaagtcatatccatactttctgttataatttcttcttacaaattccattgataatccctattcttggatagcaatgagcagcattacttcttttttatttttttaaaaaaattaaattttttgttgaaatgagggtcctgctgtattgcccaggctggtatcaaatttctgggctcaactgatcctcctgcctcagcctcccaaagcgctgggattacagttgtgagccagtgtgtctggttgtaccttttaatttttgtgttcaggcaacattaactctgagtcacagtaagctttttttttcttcctgtcatattatggacatagaagttttttggttttctttagattgtttctccttaggttgcagaacatcaagaaatggattacagtcattttcctctcttccccatgctcttccctttcttttccttttttcttttctttttttttttttggagacagaatcttgctctttggccgaggctggagtacagtgtcatgatcttggctcactgtaacctccccgcaccaggttcaagtgattctggtgcccaagcctccctagtagctgggatgtcaggatgcgccaccacaccctgctaatttttgtatttttttgtagagatggggtttcaccatgttgtccaggctgacctcaaactcctggactcaaatgatctgccctcctcggtctcccaaagtgctgggattataggcatgagccaccacatctggcctcttttccatttttaaaaaggactgtctccaacatattaaaattcacaaaaaataatataaacacacatgtactcactggctaggcttaataaaaaacatttagtcatgtttactttaaagctttttatttttttgagaaataggcattaaagagttgaagtctcctttctgtcttttcataattctgttcttccctcttccttccttgagatcttcactattcttgggttaatttggatctttctactccttgttaccacagaaaagtaattcttaatgaatttgaccatattttaaacttctgatttcagtgggcaggtaactcattttatggtttctgtattgtgagccattttcaatgactcaactagatttttttcatcgttgacttctcatttctgggcaacagcataatgttctcatttgagctatttctaaagattgtgtttaactatttaaaatatttgtggtactctgatcatcagatgtgatttttttttttttttgagacggagtctcactctttcaccaggctggagtgcagtggcgcgatctcggctcactgtaacctccttctcccaggttcaagtgatgctcctgcctcagcctcccaagtagctgggactattggtgcgggttaccacacccggctaattttttgtatttttagtagagacagggtttcaccatgtttgctaggatggtctcgatcttctgacctcgtgatctgcctgccttggcctcccaaagtgctgggattacaggcgtgagccactgcacctggccagaagtgatattaactatcttatatgtatatttctgttgcgggaagtcaggggccccaaacggagggaccggctggagctgtggcagaggaacgtaaattgtgattatttcatggacacttaccagttcccaaataatattcttataatttcttacacctgtctttaatctcttaatcctgttatcttcgtaagctgaggatgtacctcacctcagggccactatgataattgtgttaactgtacaaattgattgtaaaacgtgtgtttgaacaatatgaaatcagtgcaccttgaacagaataacagcaattttagggaacaagggaagacaaccataaggtctgactgcctgtggggttgggcaaaatagagccatatttttcttctttgcagagagcctataaacggacatgcaagtagggaagatatcgctaaattcttttcctagcaaggaattttaataatactctggagaaggaatgcattccttggaggaggtctatagggcatgtctgtcttatgctgttgacataaggactgaaatacaccctggtctcctgcagtaccctcaggcttattagggtggggaaaaaaccccaccctggtaaatttgaggtcagatcagttttctgctctcaaaccctgttttctgttgtttaagatgtttatcaagacaatttgtgcaccgctgaacatagactcttatcagtaattttgcttttgccttttgccttgtgatctttgttggacccttatcaggagtttctgattttgcccttgtcctgtttcctcagaagcatgtgatctttgttctcctttttgccctttgaggcatgtgatctttgtgacctactcactgttcttaggccccctccccttttgaaatccttaataaacacttgcttattttgcagctcaggtgggcatcacggtcctaccgatatatgtgaggcccagctgtgaaattcctctcttcgtactcttatttcttagccggctgacgcttatagaaaatagaaagaacctacattgaaatattgggggcaggttcccctgatatatttccttagtgacattcctgcaatctcctttagaaagtctttctgttcaccttctataaccagggaaggagagattgagaagagacgaaggatgattttatgtttttcagtcccagtcattatttgatgagaaactgatattacaagctttaaaaactcaagatatgtattcaacatgtagtagtagaacaagtatcttagtttaatagtctataaatttttgatgcactataatatattattgtagtcagtagcatcaaaattttaatgtgatattgcagtatgtttatggttagtttagacatgaggacagtgctaaaggagaaaatctaatgactgtgttgtttgttttgtcaaaatatgctgcctagctccagagtttcctattttggagaagcagaactggttgattcatcttcattatatccggaaagattatgaagcctgcaaggtaagagattgccataataataaaaatgagaggcaggatgttgggtaggcaactaacagtgcctgctaaacagagtgtggcagtttatatctcagtgataaaacatgaattccttcttccccatacttcatacactggttatcttttgctatggtagtgatgtttaacatacaacctcaatatttcagtggcccccaacaaacaaatattaattgctcatgggctttcagatcagctgtgggttggctgggtttgactgcaggctgtgggtcaggtttaggtgtgttccatgtgtcttctcatgtcaagagcaaacaactctcttggacatgttggtcttctggtggaggcagatgttcaactcagcatattaacttttttatctttggatagatgaaaaatggtattttgtcgagtttttttttttttttttttttttttgagatggagtctcactgtcacctaggctggagtgcagtggcatgatcttggctcattgcagcctttgtctcccaggttcaagcaattcttctgcctcagcctccccagtagatgggactacagatgagtgtcaccatgcccagctaattttttgtatttttagtagagatggggtttcaccatattggccaggctggtctcgaactcctgaccttgtgatctgcccgccttggcctcccaaagtgctgggattacaggcgtgagccaccgtgcccagccctgagttttattttttaatttctctcttactgcaaggttgatcatcatgtgtatatttaaaaaccatttgtatttccctttctctgtatctttggtgacataccatatgtgttacaaacttgcaggcagacagtggtagtactaacatgcagaatgtatccttggtgtcatcttttttggtatccagagctttgtgacccatctaaggtttttaatttatacccatggcatttatacctatggcaatgcacagaactaattcatactggtatgacaaagattcataccagtttttttttttctttttttaagtggagttttgctcttattgcccaggctagagtgcagtggcgcaatctcggctcactgcaacccccgctttccagtttcaagcaattctcctgcctcagcctcccaagtcgctgggattacaggtgcccgccaccatgcccagctaatttttttttttttttttgtatttctagtagaggtggagtttcaccatgttggtcaggctggtctcaaactgctgacctcgtaatccacctgcctcagcctcccaaagtgctgggattacaggcgtgagccaccgcacccggcccataccagttttttttgacaccgctgatccgaaggcagataccagtatgaatctttttttttttgagatggagttttgctcttgtcgccaagggtggagtgcaatggcgtgacctcggctcaccacaacctccgcctcctgggttcaagcgattgtcctgcctcagcctcctgagtagctgggattacaggcatgtgccaccacgcctggctaattttttgtgtttttagtagagatggggtttttccatgttggtcaggctggtctcaaactcccgacctcaggtgatctgcccgcttcggccacccaaagtgctgggattacatgcgtgagccaccgcgcctggccaccagtatgaatcttgaaaggttctctttctttttcatctgtgataatacttggaaatcttatcacacttttcttagcttgcctagttagattttagacaggggttggcaaactttttctgtaatgggccaacaatattttagggtttgtaggccacatacagtctctacatcatatttgttatcttattttttataaccctttagaaataaaaaaaccactgttagcttgagagctgtacaaaaatatacagggcctgtaagccctgtagtttgcaaatccctgttctagaagaagtaatcacaacaagggagttgaaattttaagaaactgaatgaactaatactttactaggcattattaatactctaggtttttttacatatgattcttgtccacgtctgctttttcattactatttgttttcttttttttttcagacagagtctcactctgttgcccaggctggagtgcagtggcgctatcttggctcactgcaacctccgcctcctgggttcaagcgattctccttcctcagcctcctgagtagctgggattacagacacgcaccactactgcccggctaatttttgtatttttagtagagatggggtttcaccatattggttaggctgatcttgaactcctgacctcataatctgcctgccttggtctcccaaagttttgggattacaagcatgagccaccgcacctggcctgtccatgtccactttttcttaaagacacctgaagaaacttaaccactgctcagaagcatttttctccctctttcaggctgttatcaaagaacagcttcaagagactcagggattgtgtgaatatgctatctatgtccaaggtaagacacatacttcttgtcttcttgctagagaaatacacttttcctaggttcttgaaaaagatcaggcaattgaagaaacaagttcaagtacagtcatgcaccacttaacaatggagatatgttctaagaaatgtgttgttaggcaattttgtcattgtgtgaacattacatggagtgtacttacacaaacatagatggatgatatagtgtactatacacatgatatagtctgttgctcccaggctacaaacctgtatgagcaggtgttataccgaatactgtaggcagttgtaaaacagtggtaagtgtatctaaacatagaaaaggtactgtaaaaatatggtataaaagataaaaaatagtatacctgtatagagtacttaccatggatggactggaagttgctctgggtgagttagtggtgagtgaatgtgaaggtctaggacattattgtatactaatgtagactttatgttgtatactaatgtagactttataaacactgtacacttagcctacactaaatttatttaaaaatattttttctacaatgataaattaactttagcttactataactttttactttataaactttaaaactttttggctcttttggggtaatacttaaaacacacaacaacattgtacatttgtacaaaaatagtttctttaggtccttattctataagcttttttctttttctttcttttttttttttggtagagagacagagtctcactttgttgcccaggctggtcttgaactcctgggctcaagcagttctcctgcctcagcctctcaaagtgctgggattataggcatgagctacgacacctggccctttatgctattcttaaaactttttatttttttacttttaaacttttttgttaaaaactacgatacacacactactacagtggtggtactaacatgtggaatgtgtccttgctgtcttttttggcattcagagctttgtgacccatctaaggtctttgtgacacacacacacacacacacacacacacacacacacgcacacgcacgcacgcactggtctaggcctacactgagtcaagattataaatatcactgtcttccacctccttatggaaggtcttcagtggcaataacatacatggagctgtcatctcctataacaataggaataccttctggaatacctcctgaaggatctgcctgaggcagttattcttttttttagtaagtggaaggagtacactctaaaataaagattaaaatgtatagcgtagtaaatacataaaccagtaatgtagtcatttattatcaagtattaagttctatatatatgtaattgtatatgctgtacttctatgtgactggcagcacagtaggtttgtttataccagcatcactacagataggtaagtaatgcattgcactgttttgattgctatgacgtcactgggcaataggaatttttcctcttcattataatcttaagtgatcatcatcatttatacagctgtcgaccaaaatgtcattacaggtgcatgagtttaaatgttccagaaaggttttattcagtattaatctttttatggaatctgaatataattactgtgttggatttgacttcagaaatgactagtaatgttaaaaaattgctatgattacccattttttagtttctggctagtgttttttggaatggatgcttaggattcctgcctaatgcagtgatttcagggccaaaagatgcttttggaaggattgcttgtaatcaagctaaaagagatgaagaagagcttgaggatttctgtaaggtgaatcaggatgaggggaagaagcctggaaataaacaagataaagcagagcataaattcagctcattagaaaccaaagataaggaccactcacttactttttttttttttttttttttttgagacagagtcttgctctgttgcccaggctggagtgcagtggtgcgatcccagctcactgcaacctctgccttccaggttcaagcgatcctcctgcctcagcccccctattagctgggattacaggcacatgccaccatgtccagctagtttttgtatttttagtagagacaaggttttgccatattggccaggctggtctcgaactcctgacctcaggtgatccacctgccttggcctaccaaagtgctgggattacaggcatgaaccactgcacctggcccactgacttaaattttcctctttagtggcataagtagcattcttagtttttccaggaactttctttttgactcttgggtgtaaataaatggttttgtttaccattcattgcatttgtagtcttcagattaacatataattttctgacataattgttaagatattgacaaatttaggacatcatggcaaaaaatgctcttattcccagtgtcacaagtatcagactttcagtgcctgataaattcttctggaaacataggcctaggaaaaacctctggttctaattggttgttacactgacaactgaagtcttaaatgttactttatcctttgccagaatctccatgttgaatttgaggtattgattccatttgccccatttgggggttcgctctgaaaactatcagttggaagtaaattatgataaatgaagcatctgatggggaagccccaaaatgttgttaatgtgaagagtttgtgtgataatttgcaaaggaactgattatctatgtgatggatcctgggagtagagagagaagtaggtaggtttgagctaccttgctaaaagacagttgagcttgtcagcagttttggttgttgtttcagcctgtccaaagccatatctgattgttttaaggatacagttgtccaaaggatttacttgatgtggtttcccagttttctcttctccaatttttctgaccccaggctccattcttcccagaacatggttttacttttttttgtattttctgtttcttggcagcattgatatttcgcctagaaggaaatatccaagaatccctagaactcttccagacatgtgcagttcttagtcctcagagtgctgataacctcaagcaggtggccagatctttgtgagtattggcaacctggaggccctagggcactcacagagaacagtgtaaaatgcattcctaggtccagcctgctgctggcagctgcatcagcctgatacacaagtgggggaatggtttaataggtacagtgggattcactctgaagagcatggattaagtttgaaatttgagaaaatgagataactagtgttaaggaactaagcattttaaacactgtgcattctagtttgatgggggaccaatattgtttatcatgtaaatagagacaccttgtaccctaagtcttctaaacttattggcaatccttggaatttttctcatctactcttctaacacttagtatttgtcacacagtaagtttttagtaaggacagagagttcctgacttctgatggttcaacttacataatttttcaactttacaatgatgtaaaattgttatgtattcagtagaaactgtacttcaagtatccatacagccattccgtttttcattttcagtatagtattcagtaaattacatgagatattcagcattttattataaagttggcattgtgttagatggttttgcctaactgtcagcaaatgtagttaagaaagtggagataggaactccatggaacagagtaagtgttctgagcatgcttaagataggctaggctatctatgatgtctggtagagtagatgtattacatgcatttttgaattacagtgttttcaatttacaatgggtttactgggatgtaaccccatcataagttgaggagcatctctatttgttgagtgaatgtcctaaagattcctagatggaaagaatctcaagtgtttataaactactaggtactcccttttcagtcctttgttccatggagttcctatctcccctttcttagccacattgccattcatacctgtgttgtttttgcatagagcttggttttccctgtttctctctaaactcaggatccaatatcaaggaaagagacttagtcttggaaggaaaggatgtgtccctaatgggtgatgataaatgatggtagttactgcttaacatggtatatcattaggcttatttcttttttggtctgcatttatagtacattgtagaagaaaaattccacaagactctcactaaaattggtatagaatgagaccaaggccttggaacagctgccagtgcaatccctactaagagagcttctgctgttagtgtatagcagcttcactgaccaaaccagcacaaccacctcatagagaaaaggcttctagaattctctgctggatgaaatatgattaaaatgtgggactagtagggttagtcttctaagaattttgaggtaataattatggaaaatatatcttttacagatttcttttgggaaaacataaagctgccattgaagtatataatgaagcagctaaactcaaccagaaagattgggtaagtagagaactttcagttctttcttattagtaaacttgctaatggttccatttatcatctggctgtcttatttctgaattcttacattccaaaaatgtcttgattttaacctcatacttaattcatgatttgtataagtataggatcaaaaaccatgtttcctcataactttgcaggcattgctgcatgattttctagcagtttgctgacgagcagtctcttaccagtctgattcttgttgatgacccctagaagctttgggtatttttttcgtcattggaattccacagtatcagcaataggcatctagttgtgtttcatgtctttttcccgtccccatctgtgtgacattcaattgactctttcattctgaagacccttgcctttctttgggtcagggcctttgagtagttctttatttttcccctccccttctctttgtgtcaattgaggattgtgtgtaaatgcaacagaaaatttgactaaacattggctttacaaattcgtttttgtttttttttttaattctcatgaaacaagatgtccaggtaagtagttgctggcattgatttggtggtcctaggatgtcaagactgagagtttttcctcatggttacaagaagactgctgcatccagcatcatatctgcattctagggaggcagaaagagaaagcaacaaggagaaaaggacagagcctatactgggaaagcacaactttcccagaagtcccccacagacttccacttatgtcatatcagctccccttctataaggaaggctggttaaatgtcgtttttaatctggtcacactgccactctaaacaaaattagggttcttttagtaaggaaaaagagaagagtaggtagcaggtaggcaagtagataactagcagcatctgccacactgttttccattctctatgagagatgttctctaactattctctacaactcttaacttgcctctcattttctacctctgtgtccttttctttgtgtgtggtgcgggggggtacagaggctcactctgttgcccaggctggagtgcagtggcgtgatctcggctcactgcaacctctttcttccaggttcaagtgattctcctgtctcagcctcctgagtagctgggattacaggcgcctgccaccatgcccggctaatttttgtatttttggtagagacggggtttcaccatgttggctaggctggtctccaactcctgacctcaggtgattcacctgccttgtcctcccaaagtgttgggattataggtgtgagacaccacgcctgaccctccttgtcattttattatatgttcaggacatgtattcagtcttatcttccatatcatcatttttgtttttagctatttgtattctgttatataccctatccatccaatattttttatttcatttccttttattgtatttttaatttccaaaaatcttgtcttttcttcaatgtctctgattcttgaagttcttttctgcttctcagaattatctttttcttcctctctgcattttggttcttctattttatgctgttggtatttttcaagtatttggtgattctcagagagacattcatatctgtgagtgaagaactagatttattagtacagagaattagcatggatttcctttgcagttcttacggggcactattatttttgaagtgtgttcaatttgttagtcgcttttcttctgtacatcggaagattgagttgagtctttatgccatggagtatgttatagctaacagccagagtgaaactacagatgaagaaaaattcatgtacttttcattcagtcggtttttcaaaaaatgagtatgtctgctatatgccaagcactgatctatgccctggagatgcaaagatggactgttggattataagatactcaactagaataggaaatgaaggaagaagagcaaggtttggaagaaggtgatggtaagaaatcagagttaaatcctgtctttcagaggattttggatatgataagttttaggttctgaggggatatctaaattgagatgtgtccagtaggattggatatagaaatctgaaactcaagtgttttggagtagagatgtgaattctggagtcagcaacataaaggtggtaattgaaaccattagattggttgacattaccctgcaatgagctgaggatgggaccctggaaaaaaagagttttttactttttttttgtctgtttgagacggcacaggaaaagttactgctttaatgcagggaggaagccctgcattctctatgggggccaggatcatgggggtggccagtgccacaaatggtcaccatacaggccagggaggagccagggcccaccaataatccctggaacatccctggatgctagcagttttttactttctaaatttttttttttttttttaagagacaaggttgcctaggctggagtatagtggggtgatcatagcttactgtaacctccaactcctgggctcaagtgatcctcctgcctctgcctcctgagtagctggggctacaggtgcaagccaccatgcctggctaaatttattttgtggaaatgaggtctcatgttacccaggctggtctcaagctcctgtcctcaagtgatcctcctgctttagcttcccagagtgctgggattacaggtgtgagccatcaaaaagcaattttgaaggactgagcagaagaagagaacccatagagggagatagggaagaggtaaagcaggagagctcagggtcacagggggaatggaacgtatttcttaatctatccagttggttgaaagagctcatttggtattactgactcacttgggataaccatcccattgttactagtagatgtgatcattcacaaaacagccattctttttttttttttttgttgagacagagtctcattctgtcacctaggctagagtgcagtggctcaatcttggctcactgcaacctctgcctcctgggttcaagcgattctcctcccccagcctcctgagtagctgggatttacaggcacccgccaccatgcccagctaatttttgtatttttagtagagatgaggtttcaccatgttggtcaggctggtctcgagctcctgacgttgtgatccgcccaccttggcctcccaaagtgctgagactacaggtgtgagccaccaccttttttttttttaactttaaaatttttctttaaaattttccccttcatggcatttttattttctttttagaatattttaatgattttgaattttacttttattaatagcccttacctaccctacatatttcataagtacctgtagaaaaccttatagtagctggagcatggtggctcatacctgtaataccagcactttaaaaggatgctgagtggggaggatcacttgagcccaggagtctgagaccagcctgggcaacatagagacccagtttctaggaaaaaaaaataaaaattagtggtcgtgtgcacctgtagtcctagctattctagaggctgaggtaggaggatcacgttagcccaggaggttgaggctgcagtgatgcggtgaactgtgattgtgtcactgcacttcagcatggaaagcagagcaagaccctgtctcaaaaaaaaaaaaaaaaaagaaacaaccttgtagccctactttcttggactcatcagggtattccacagtcttgctgcaacaggggaatagtaattcctcctgccattatcttagttgacttttggaacagttctgttaagtagggagaatttcccccattgacaagtgaggaagctaaggctttggaagatggaagttgctacagtgaggtagttgctgagccagaactggaattcagacctgtgatctaggatgatctaagattcctcgtcttaagactgtgatcttttccactgtaccaactgcctttgcaggatgtctgctgggttcccttacctcctgaaagataggatttgactctgatttgttctgttgccctttccaaatttcttttgcagttagtttgttaaaggtatattgctgccttctcaactatctatgtcaaagattttaaaaggtcagaggttagccttcaggacatctatttacttacctaccttaacaattcctactgtagagcaggacatttaaaggacaagaaaggctttatttctgccttgtctctctccatgcatgcattcttatagcatgacaaagttggcagtatacaagttttggaagcaggcctgagttcaaatcccaatgttctataatatggacatgatttgtgattgaataaaaaaaatttttaaatgtgcggcatttgtgagataattggaaattttaacgtaattgaatatctaatatcaagcagtcactactttttttcgagtgtgacgatgtgggtagtttaagaaaaaggccttatcttttagaaataaatacggaaacatttgtggataaaacgttgggctgttatttgcttacaaaagttgtgggagtagatggggtgtggattggatggttgttgggacaggatgattagtacctaattctgtctgcacttacgtatgattgaaattctccctaggatgtagaactaaaaaagaaaaaaaaaatcccaatactctctgtcttaagttaggtaatctactcaacctctctgagcttcaatttccttatctgtaaaattggaaagattataactatgttgcaggtttgctgaaaattaaagtaacatatatgaaaacatctggcataaagcctgatgttagtaggtgctcaaccaatggttgctgttttgttgtttttactatttttggagacttggaaaacattaaatcagttgttatctctgagcctgggggtccatgtttcctcagacagggacacatctccactactaatagggtagttcttactatgtttcccaagagcattttccttacccttgctttctccttttccaaagctaccttaaataaagggaggtttattataaaggaatttgagagtccataaaacagtatcaagagatgcaggttggtcttttagtgaagcagaactggaacgcttcagcatccaaggtagctactctgccttttctgcttcatcttttctttctgtagatcaaaggttggcaaactttttttgtaaagggccagttaataaatattttaatttgtatagcttcatacagactctgttgcaacgacttaactctgcagttctaatgcaaaagagccatacaaaaacaatagttgtgtctgtgttccaatgaatctgtacttataaaaaagggcagggaatggatttggcccatggaccatagttttcccatgtcagctctagacttctgcagatggctccaattacatgtattccatcacagcagactccaggtggcgctgtcagtcctcaagttcacatcacctagtaaatttagtacttgtaactaactagctctcttccaattccagattcctagggaaaggacttcagttgtgtcaggtgtcactatccaactgtgttgccttaagggcggaaatgtgtggctagcagccctctcagcaggggctgtgggtagtctctcctgagaagaaggagcaaagggtatgggtgatgggcaactcttaaagaaaaaaggtatggggatgggctgggtatgtgccccagggttccccatagatccaggaagatcacctgtttattctgcttttatttcttataatctgtatttttttatgttgaggaacttatttttaacaattaatttgagtatgaactctaataaaaagctgactgtaatgcatagtttaaagtttaaaccttgccgagcaataacaatctctagatgtctgttgtttcactctaatacttactgtggaattacacctgagttgttttccttcttttttatgagcctaggagatcagccataacctaggagtttgctacatatacctgaagcagttcaacaaggtaatttatagaagtggtgatagatttcactgagggtgcacttgttgcagaagttgttacattgctcatttggtattatccctagtgcttgcagaggtttttggaactgaaaattgaaagtacctttatacatttttttctgttttaattctcacttgtcattattcatctgttgttttctgcttgtaataagaacatggaaagttctagaaatatgagggaatggcagtttttctcctttcttctttttctctacctccagttaaatttcccagtttagaaacagatgcttaataaaacatacatatcaaaaagtggacccttaagtcttaaaggtgtgatcatgaccatgtgagctatctccatgccctgacggcaacttagtttttagggtcattgaaaataaattttaaattttaagtggatctgatttctgagttttcagttttaattttatagttattttccatgatgagaaattatatttcactgtgattaagctatagactcctatatcagagaagacaagttgagcttacctcaaatttggtactcaggtaagaaaaagtatatatcataattgaggagtagacaaaattactgagagctctaaaacttagtgatgagagcgttgggtagtttccttcatagagctcacagttagtgattgtgaagttttattctcctttctccgatgccaccaggactgagaatctgaattggttagtacccatttgacaatgtttagtttgtgtcaatttgcagactggtgtaactagtatcccacactggtgtgaaaaaaaatatgcacattagcagttggggtgtaaaagtaacttttctcctgagataacaatatatatacataaaatacatttagtgggccccttaggttttgtagatggatctatagttttatatacttggttaggagatttttctcttcagagacaatttcaaacaggcacatttctattcacaggattattctgagtcaggggaaaagaaggatttgtctttggttggatctgtgctgagaagaaatatatttagattttactgtacagctaacaggctaggcaaatacaatacctggcatttatataaatgcttgttgaatctgtgaatgactaaacaaagcccttttgtttactaggagaaggtaagctcctccagagcaaggagttggttttataaactcaaatatatttagcatctagaacagcaagcagttgggtgaataaatgagaacaatctatttattcatttatcatcacattgatggggaaacctggcccaccatagggaaggttgtgcacttggtcagtgttacagctgggatttagtttagtgtagtactctacactgtactatgatggcccttttgacttatgaagtatgagtcataggtgtgaatatcaggcagaaaacattcagaaagattaatcgtcttgtataaattcttccaagtggctccagaagcagatatcccatgttgccagctgtcttttcaacaaggacagttttggtatgttttggtctttgggtagtgggggctgtttgctgaaatgtgatgttcctatgtcaatacagcagaaagtgtctttacattagccatataaaggtatagttcgttcagtggtagtgatttggttttctttattttgttaaacttgtcaggcacaagaccagttgcacaatgccctgaatcttaataggcacgatctgacttatataatgctggggaagatccacttgctggagggagacttggacaaggccattgaagtctacaagaaagcagtggagtaagtgtatctgtttcctttaaaacagtgagaaactaaaaaaattgagtggatatgtgaactcccaagcctaaaagagtgaatatgtttgattaattacttactgtatgagttaaaggttaagctgaagtttaagagctcccagtagcttcaataaggtagactgtgtttctttcttacctataaggatgactgctgctttaggttagctgggcagctctattctacaaggtcagccagggatccaggtttcttccttattaactcaccattccttaggctgttgtctttacctgcatggttgatgctgaatgtaacatccacatccaggctgtggtggaaggagatggtttgggaagctaagcatggaataagcatctggctatatatatatatatatatagagagagagagagagagagagagagacatgatcttactccatcactcaggctggagtgcagtggagaacacagctcactgcagcctcaacctcttgggctaaagcaatcttcctacctcagcctcccaagtagttgggactacaggcatgtgccaccatgcccagctaatttaaaaaaaaaaactgtttttgtgttgacagggtcttgctgtgttgcccaggctggtcttaaacttctgggctcaagcgatcctcctgcctcagccttccaaagtgctggaattacaggtgtgagccactgcacctggccttggtaataagttttaaatgacccagaaattgcacacatcgttcctgcttacattccatggttcaaaactacatgatagttacaagggaagtgggcagacatgcactcaagaagaaggaaataacagatttaagagttggccgacagtctgccattttggtatcatatgttaataacagatcttctgttttcagagatattattagggacagaaatctcctgattcagtaaaaaacaaaacaaaacaaaacaaaacatttggccttattagcatgagaccagtatcttttttcccccttccccattttcccttccccttccccgttttccccttccctttccccgttttcccttcccccttttctcttccccctttccctttcccccttcccccttcccccttcctcttccccttcctccttccctcttcccccatcccccttcccccatccccctttccccatccccctttccccatccccctttccccatccccctttccccatccccctttccccatccccctttccccatccccctttccccatcccccttccccctttccccttccccctttccccttcctcctttcccttccccctttccccttttcccatctcccttcccctttcccctccctctctcccttccttcctttttctctcttttctttccatcctttccctccctcccattcccatctttctttgtttctttcttttcttcctttcttccttcctttctttccttcctttcatttatttcaacagtctcgctctgtcgcccaggggtgagtgcagtggcgcgatctcgcctcactgcaacctctgcctcctgggttcaagcgattctcatgcctcagcctcctgagtagctgggactgcacgagcacgccaccacccctggctaatgtttgtatttttagcagagacagggtttcaccatgttggtcaggctggtctcgaattcctggcctcaagtgatctgcttgccttggtctcccatagtgctgggattgcaggcgtgaaccactgcgcccagccttgtgttgttacttttaaatgggatagctgtagcaaaatgccttgtctcatttgtttggtcccttaatagaatgtctggtctgtggttcaaggcttattattcctaataattagattctgaactaaacttagatttctattaatttgttaatcatctttgtcttctaccatggtagtaaattttctggttatatcagtcacagcactgctttctgaattttcttcaaccatattttgtgtctaaaacagaaaaatcccttggtttgttaagctacagaacagacttttgtcatcaagaggctgtatatttgggcaagtagtaaggagccatgtaacatgttcagtgcctctgtggtgctaggtagtagccctgatccctgacccctgccttctagaggttagctctttgagaatagcatacataaatcccaaggggaacattcttccagtaactgatcaaggactttggtcactaaatttcctaagggagaaatgtggacagctaaaatctgaagccttactgagaagatagagaccattgttcatgacctacagctttgaagagagtagtcatgttgtagtggggaagccaatattgctagaattacagaagttacctggctttggggagggaagtgatcaaagtggatgtttattatggcagaaagtgaaaggcggattcccagttgaattgagaaagctctgtttggtcagctcaggcctcccctggctggggctttgcatcttctggttcaggtcttcctataggtaaccagtgccctatatcattccttagaagcagaagacattgttcatagccctttggtgttttactgttgaaactgtctgatgatcctatggtcagatcatctcaactcagtgttgccttggttttgtgacaaagacaaatactagtgagggattgagcaggcaatccctgatgtgagtattttacttacatcagtgtttactcccaaaggtcagtagcaccttctttcctaggattggtatgtatcttccttcttttgtttagtttggctacttggtatagctctttgtttaagtggagagaacagcattaggggccttgggatcctaaattacatagaaaattatgctgcctggcattgtgagcacaatgaggatagaaaaaaaattccacaagagaggactggtgaaactgtgtgtgttctaggctgacttggtttataaagcattgttctttaattttatcagtgtgaccaagacagtcatgcaaaacattctataggttctttcttaggacttttaccctaagaaaggaatctgaattctaagcctcatttttcttgctgagcagttctccttatcaccagggttgagatgacctacttttgatggcaattcccaaattgccttcaggtatttccacggggaggaagaggctcagtggggtctgtcaagtattgcacgagggcatattactgtgcatgtgtcttcgtgtttctcatctacatcttgtttccctctgagcatctctatgttgcaggttctcaccagaaaatacagagcttcttacaactttaggattactctacttacaggtaatgaaaactctgtactcattcatgcactgatgttagaaatggttttgggtttgtgtgtatggtggttttcctgcattctgatatttattttattaaaggtcatataaagttcatgaactacactctctctattcgatactctttgctaaaggaattaattttctgcatttaaattggaagcaattctattttagcctagtgcaattataattcttatctaggctgggtgtggtctcatgcctgtaatcccagcaatttgggaggctgaggctggtggatcacttgagctcaggagttggagaccagcctgggtaacatagtgagaccctgtctctacaaaaaataaaaaaattagccaggcatggtggcatgcttctgtagtcccagctacttgggaggctgtgatgggaagattgcttgaactcggaaggcagaggttgcagtgagctgagattgagtcactgcactccatcctgggtgacagagccagatcctgtctcagaaaaaaaaaaaaattcttatgctatccaggaaagagcatatatgagaaataactctggtcttggaggctgttattttgttgtgaggagagaaacagatacaagtgagcacttagggctttggggcaaagccatttcttttgatctttcttcccagccagagtcttattggaaagagagaaggcaaagtatacttttatctagaataagaagttttctgtcccctcaacattcctgaatgtgaatgggattcttttagctccattgattctctggctgaggacccagggcccaggtatccaaggggcttttccctcttccccaatatacacatttgccaagttccttggtcagctgattctgcctccagccctgcctctgtggtggcctttatgtctatttcatttttctttaaaaggaatcaggagcttaaccctgggtcttcctgggctttggcttgggaggttggctccacgggagatgaggatacccagctcatttcctgcaaagaggcattaatgtggaacagtactagtgtggcagagatggttcttatcaaatagatactttgaccttatcaggtgacaaattaacaaaaatagaaggaaaaccatgactggggatttttagttttctttctttattatctggtaactgtagctgctttttttttttttttttttttttttaaagtcaagagaactcaaaaaagccagagcatttctgttctgggtgaggttggccagactgtttttttttttttttttttggagacggagtttcactctttttgcctaggctagagtgcaatggcgtgatctcggctcactgcaacctctgcctcctgggttcaagcgattctcctgcctcagcctcccaagtagctgggattacaggcatgtgccaccatgcctgggtaattttgtatttttagtagagatggggtttctccatgttggtcaggctggtctcgaactcctgacctcaggtgatccacccaccttagcctcccaaagtgctgggattataggcattagccaccacgcctggtctggccagactcttttaactgccgtctccttgctgatgtaaattgtcttgtttgctttttttccaagctcggcatttaccagaaggcatttgaacatcttggcaatgcactgacttatgaccctaccaactacaaggtattacaggctgtgaaggctctggccttcatatagacggtcccactgctcctagaggtgatctgaccctggaaagcaaaggaatagcttcttaaatttggatacctgagaaatagaaaaaatataaataaaaggtggctcttcttatttgaaaatagtgtcaagtatgctctacttatcttctaaaagtgcacatttgttataatagacgtgtaacccctgcagaaggcagatcatagtgctagtaaagcttatgtgttacttaggaaattagcaatgcctccacaactattgtcaaaaataaatctgcggcccggcgcggtggctcacgcctgtaatcccagcactttgggaggctgaggtgggcagatcacgaggtcaggagatcgagaccatcctggctaacacagtgaaaccccgtctctactaaaaatacaaaaaaattagccgggcgtggtggcgggcgcctgtagtcccagctcctcgggaggctgaggcaggagaatggcgtgaacccgggaggcagagcttgcagtgagctgagatcacgcgccactgcactccagcctgggtgacagagcgagactctgtctcaaaaaaaaaaaaaataaaaaataaaaaaaataaatctgctgggcatggtggcttatgcctgtaatcccagcactttggaatgctgaggcaggaggatcacttgaggccaggagttcaagaccaggctgggccacatagtgagacccccatttctacaaaaaaaattatccaggcatggtggcacacacctgtagtcctagccactcggaaggtggaagagggaagatcacttgagcccaggagtttgagtctacagtgggctatgatggcaccactatactccagcctgggtgacagagaccctgtctctaaaaagaaacaataattatgttgaaatgacttctagagtcctaatgatttgatactacaactttttttctagatgtgactttgggaatgagaaggaatagcatcaaatggatgaacatcattgaggagatgcagcaagacaagctgtttattaaaggatacaaactgaattctgatttaggaagtaacattagactgtcagctcccaccttgatacctttccttagagaaatgaaagggctgggctgatgaagcctaaagctgactcgccctctgttctacggtagaaagaaatttaccttaagtagccacgtacaggtgtatttcaggtatctagaacacttggtataccaaataggggctgcagagaacagattaaaggaagtttttacttaaagggctctggtattcattctgaaatactgactttcctggctagaagtaggaaacagatgggtaaagcaagtaacattttatctttttttttttttttttttttttttttttttgtgctgtgccagagagccacagtgtagagtgcaaggacattcctcaggaacatttgtcccaataggttggatatatttatgtccctggaagaaattttccagtcccatctatgctgatgggcctgctgagtatagactcaggaaagctgccccactgctacagccttttgggaatgactgaatgactttctctgtgccatgttttcaggccatcttggcagcaggcagcatgatgcagacccacggggactttgatgttgccctcaccaaatacagagttgtggcttgtgctgttccagaaagtcctccactctggaataacattggaatgtgtttctttggcaagaagaaatatgtggcggtgagtgtcccctcatgttctttgtttgtatttctacatgtggttattgggtctgtttagcttgcccttctcattgagtgccccttctctctcataggccatcagctgcctgaaacgagccaactacttggcaccctttgattggaagattctgtataatttgggccttgtccatttgaccatgcagcagtatgcatcagcttttcattttctcagtgcggccatcaacttccagccaaagatgggggagctctacatgctcttggcaggtaagaaacatttatgtggaaaactctctctgccatctgtaatgagggaaaaatggattagaatcatagaagatcagtggctgtctcataggagccattcccttagagatcctgtaggaatctggattactgtcctggagcttgaagaaatagaaaaagatgacaaaggaacttggttgtttctaacttgggggagtttgactcagagaccaacaggttaaataaagatcatccctagttcaccttttaccagttttttcctcttgccttgacaattcatttatgtatatattgagtccaactaagttccagacagcaagtgttaagagcttgggttttaggtagggtcctgcctctactacttattatatgtacctagggctgatgtgaggattgcatgattaagctctcaattaataatactggttttgttgaaatactgatttttgaaaactgttggttttactgtggttatataattggtctattattatcaatattgttgttactataattggcccctaggtgatacttccaagtcaagctaccttatgttgaaacccttatctcttctgagcatgttatatagaatgccattctcttcctgaaactccattttatgccatgcaaatactaaaattgatcataaaaataagttaaaattaatcaaacactttaacaattatgcacaaccattttaaagtactgactagtctttctaggaatttttttctccatatacatttacttactaaatgtaagacccaaagcagatttccatgtcctcatttggcagtcgtcttccagtggctttttgttcattactgtgggttcttatttaaaagagaaagcttgcaaaagcaattgtggttatttgagggttgcctgaatacaaagataactttaaaaaaaaaacataggttttattattattcagatatggtatgggcaacagatcagaagacatctgccactggaaagatagtctgttacaattcctgagaaggagggcatgctacaccgtgcagggccacatggggaagcaccaggtcaatcaggaggtagagggagcaaggggtaaatgtgggcacaattctttattgtagttttcatgggtagaaatgccctccccggggcaagaccgggaaagcaggttaaccaggttggggattggccagtttgaataatttcagtgggctctgggctatagggctgtctctaggtgtctggtacctgaccctcgggtgactaggactagggaatattggcccagtgtcagggcccagtaaaggaggcagttaagaatatgaacactgggttggtcggtctgcatacagaaggtactcttgtaggggttatatctaggaattagctgactgtgggagggacagtctccccagggtcagtaaggccccagatgtcaaaacatcagaataaaaaggctaaagtggggtgtgatggtacatacctgtagtgctggctacttgggaggctaaggcaggaagtttgcttaagcccaggagttgggagtacagcctgggcaacacagtgagactccattcctctctctttttttaaaaattttattttaggttcaggggtacatgtgcatcctgttacacaggcacgtgtgtcatggggattagttgtacagattatttcatcacccaggtactaagcctagtacccaatagttatttttttctggccctccccctcctccagtaagctccagtgtctgtttccctctgtgtctccatgtgttctcatcatttagctcttatagtgagaacatgcaggatttggttttctatcctttattaatttgctaaggatggtggcctccagctccatctatgttgctgcaaaggacacgatcttgttcttttgtatggctgtgtcgtattccatggtgtacatttacattttgtttatccagtctaccattgatgggcatttaggttgatttcacatctttgctattgtgaatagtgctgcattgaacacacacatgcatgtgtctttatggcagaacgatttacattcctttgggcatatacccagtaatgggattgctgggtcgaagggtagttgtatttttagctctttggggaattgccagattgctttccacaatggttgaactaatttacactcccatcaacagtgtataagcattcccttttctctgcagcctcaccaggatgttatattttgagtttttaataatagccattttgactggtgtgagatggttatctcactgtggtttcaatttgcatttctctaatcagtgatagagtttttcatatgcttgttggctgcatacatgacttcttttgaagtgtctgtttatgtcctttgcccattttaatgggattgtattcttcttgtaaatttgcttaagttccttatagatcctggatattagacctgcatggtttgcaaatattttctcccattttgtacattgtctgtttactgtgttgatagtttctttagatagctgggttctaatggaacacagaaatgtaaacagccataatgtaagagataacagcgatgctaactttacaaagtagagatggcattcaaactggatcctgaacaacaagctaaaatggaatagcacagaatggctgaggagccactgtgaagaaaggcatgcagccatgaaactgcagtgtcccttgctgttagtgggggttagtgttagagaatatgatgggagatgaatcaggaaagatattctggggtcagattatggaggtcatgcgtacagtgcaaggactttatcttagaggccatgtttgtccagctgtcttcctagatctcctcttaggtgcctggtaggagtgagtgcatagctggtggggaggtggaatgggcagggcttccagagcagctgtttttgttttatatattaggtgtcaaggaaatactgattttaaaaagtggggggagtgttttactgctaaatgaaagtgtaaagatcatggttatagatgtggggggccagtgaggattcctaagtaggatggtaatgtggtcagatttgtaaggcagtgagatacctggcagcgctgtggaaggtggaatggaggcaggtggggactttgacactggggaataaatggaaagcctaaaactacttgggcctgaacaagggcagtgtcagaaaagaaactgcaaaaaaaggatgcatagaacctggcaactgattgactgtagaagagatggttgaagatagcaccaggtatctaagctgacttagtaaactctggtgccatgagctgacagggtgaagtttactttgggggtagtctttaatactccttttgtcttctaagctgagctctccagctgcagtgctttctttgttgcagtggctctgaccaatctggaagatatagaaaatgccaagagagcctacgcagaagcagtccacctggataagtatgcactttgttgagaatggtactggcgggggttggactctccaaagccatgaggtggtgccatacatagcattggtgctgcctgtgtcagcccagctgttcctctatggcattagtacatagcagacctcagtgtggagggatgtgtctcctaagtatgtggtggctcagcaggaattgacactctgagaaaatgtttccagtcctaaactgagtaatcaggaggctagagaatgtcagaactggcagtgggcttgggttgctgatagctatgggctagctggaatatcagatgggactctgggctgtttaattcaagataaaacttgactcttccaggatttactccgctggcatcttctagacagcagggtagagatccctttttcaaccctggcctaggtagtctctgttgagggctgagatgccagatttggtcccaataccagctttgcttgttaggccattaactccttgattcttctccacaggtctgcttagcacgtatgtacctaccttgctgcataatggagaaatctctacttaaccagttttgttttgtttttgtgtaatgagaaggatctctaaatgaccatttgttgcagagcccccagctccatagaatctctgtctgccacaggtgtaaccctttagtaaacctgaactatgctgtgctgctgtacaaccagggcgagaagaagaacgccctggcccaatatcaggagatggagaagaaagtcagcctactcaaggacaatagctctctggaatttgactctgaggtatgtcttttattagctcccaagagtcataagtaagctctcaggagacttttaaaaatcaagcccagatcatccaaatccaaggtattacacgttcatggctgttctggctttgatgttcctagcagcatgagttcatcaattaataacagcctgagaaaaactttcctagaataataataaaaggaaattcaggcttactgagttgttattgctaattcaactcatcaaagttgaggtctgtgtctgtctgtagcttccttctatttcactttttttttttttttttttttgagacggaatctcgctctgttgcccaggctggagtgcaatggcgcaatctcagttcactgcaacctccgcctcctgggttcaagcaattctcctgcctcagccttccaagtagctgggactacaggcgcgtgccaccacgcccagctaatttttgtatttttagtagagacggggtttcaccatgttggccaggatggtcttgatctcttgacctcgtgatccacgtgcccagccctatttcacttgttgtaggaaatgcactgtttggcccggtaatgcaccaggcttgaattgttgggttttgagatcctatgtgaaccaccatgccatccagtaaaggcaatctgtaatctctactgtttgataagtacttcctgcctcaactgctagtacgaccagacactatttcagctaaaaccccagctcgaagaccaaagaagtgggttggcttgtctctgacagtcacgcttttgattcttttacttcctttgtggacacaagatggtggagatggctcagaagttgggagctgctctccaggttggggaggcactggtctggaccaaaccagttaaagatcccaaatcaaagcaccagaccacttcaaccagcaaacctgccagtttccagcagcctctgggctctaatcaagctctaggacaggcaatgtcttcagcagctgcatacaggacgctcccctcaggtaggaccatacagagctccatgaagacctggcaggtacaagccacatgtgtctgtcagcagagattatagctttcagtgaggttctcttcagactcatatgtccaacgtagtattggccacaaggggagaaaaaaaacacagggtggctaaattggcacttgtttccttaaggcgagctatgtagtaggtaacagctactcacagacttagttggatggtctatacactggtctttccaattttagcaatatgttattaagtatatcctgttatgcaatgtttaatttttactgctttatcagaagttgacacgtaaatatttttcagtgactcattgaaggcaaacttgactgttgctttatttctcagttatagtcttcccttatagttaatgggtcagtcccactggttccagaaaatatggggtttcctcttgaactctaacagcaaaaaagaatgatttcttctgaaattgtggaacatgaggattcaagtttttattttgttactaggtgctggaggaacatcccagttcacaaagcccccatctcttcctctggagccagagcctgcggtggaatcaagtccaactgaaacatcagaacaaataagagagaaataagaatagaatgaatgaccccaaaatagggttttcttgggcgaggatgtgctggattaggaaaggtgacatgacacaggcagagcagagtggcacccaccacagaatacagtgtgtgttattacgaggagccagcagttgagcctaaggtccttctacctacctggtattggcatttgaggtcggaaaccctctactgccccataagccaggaaaagtgaaaagagaacacagttcctttaagaactggcagcaaggcttgaggccttatgtatgtagctgagtcagcaaggtacatgatgctgtctgctttcaaaaggacttttctctcctagctgactgactccttccttagttcaaggaacagctgagacagacctctgctgagtagctctgtgatgacaaagccttggtttaactgaggtgatcctcaggttgtgaggtttattagtccccaaggcaaacacaaatattagattaataatccaactttaatagtatacatttaaaagaaaaaaaacaaaagccctggaagttgaggccaagcctgctgagtattgcagctgcatttgcccaaagggaatccagaacaagtccctccctgtattttgttcttgagaggggtcagtctagaagctagatcctatcaggatgaggagcagcagcccagggcttgtctggatcagcaccaacgattttaaagaaaaaaggaagagtttcttagatgagtaattgttattgaagatagtcagtgataaccactgaccagatgctatcaatacactatgtgtcctttttagaataaagattacatatcatcattcctttggggaaaattgttattcaggtataaaaacaagagatcataataaaaacctaaaagaaccta

SEQ ID NO: 15478 - DNA, 52297 bp, Homo sapiens; identical to SEQ ID NO: 1143
